(19) United States
(12) Patent Application Publication
(10) Pub. No.: US 2022/0409675 A1
(43) Pub. Date: Dec. 29, 2022

(54) COMPOSITIONS COMPRISING BACTERIAL SPECIES AND METHODS RELATED THERETO

(71) Applicant: XBIOME INC., New York, NY (US)

(72) Inventors: Jason HUDAK, New York, NY (US); Jun MA, New York, NY (US); Jackie PAPKOFF, New York, NY (US)

(73) Assignee: XBIOME INC., New York, NY (US)

(21) Appl. No.: 17/756,274

(22) PCT Filed: Nov. 20, 2020
(86) PCT No.: PCT/US20/61586

§ 371 Date: May 20, 2022

Related U.S. Application Data
(60) Provisional application No. 62/939,120, filed on Nov. 22, 2019.

(51) Int. Cl. A61K 35/742; C12N 1/20; A61K 9/107; A61K 9/14

(52) U.S. Cl. CPC A61K 35/742; C12N 1/205; A61K 9/107; A61K 9/14

(57) ABSTRACT

The disclosure relates generally to bacterial strains of the genus Anaerostipes, e.g., Anaerostipes rhamnosivorans bacterial strains, and compositions, e.g., pharmaceutical compositions, comprising such bacterial strains. The disclosure further relates to method of using such bacterial strains and compositions for preventing or treating a disorder, e.g., an inflammatory disorder, a gastrointestinal disorder, a metabolic disorder, and/or dysbiosis when administered to a subject in need thereof.

### CROSS REFERENCE TO RELATED APPLICATIONS

[0001] This application claims the benefit of, and priority to, U.S. provisional patent application Ser. No. 62/939,120, filed on Nov. 22, 2019, which is hereby incorporated by reference herein in its entirety.

### SEQUENCE LISTING

[0002] The instant application contains a Sequence Listing which has been filed electronically in ASCII format and is hereby incorporated by reference in its entirety. Said ASCII copy, created on Nov. 20, 2020, is named ASP-060WO SL.txt and is 4,684,004 bytes in size.

### BACKGROUND

[0003] The gastrointestinal tract (GI), as well as other organ systems, is a complex biological system that includes a community of many different organisms, including diverse strains of bacteria. Hundreds of different species may form a commensal community in the gastrointestinal tract and other organs in a healthy person. Moreover, microorganisms present in the gut not only play a crucial role in digestive health, but also influence the immune system. A disturbance or imbalance in a biological system, e.g., the gastrointestinal tract, may include changes in the types and numbers of bacteria in the gut which may lead to the development of, or may be an indicator of, an unhealthy state and/or disease.

### SUMMARY

[0004] The disclosure relates generally to bacterial strains, bacterial strain mixtures, and compositions, e.g., comprising strains of the genus Anaerostipes. Disclosed bacterial strains, bacterial strain mixtures, or compositions are useful for treating gastrointestinal disorders and/or inflammatory disorders, including, for example, dysbiosis and/or immune mediated inflammatory disorders, such as inflammatory skin disorders. Exemplary inflammatory skin disorders include, but are not limited to, disorders associated with cell proliferation, such as psoriasis, eczema, dermatitis (e.g., eczematous dermatitides, topic and seborrheic dermatitis, allergic or irritant contact dermatitis, eczema craquele, photoallergic dermatitis, phototoxicdermatitis, phytophotodermatitis, radiation dermatitis, and stasis dermatitis), and acne.

[0005] In one aspect, provided herein is a composition, for example, a pharmaceutical composition, comprising a bacterial strain of the genus Anaerostipes. In some embodiments, the bacterial strain comprises a 16s rRNA gene sequence with at least about 97% sequence identity to the polynucleotide sequence of SEQ ID NO: 1. In a particular embodiment, the Anaerostipes bacterial strain is a strain of the species Anaerostipes rhamnosivorans. In some embodiments, the composition further comprises an excipient, diluent, and/or carrier. In some embodiments, the bacterial strain in the composition is lyophilized, freeze dried, or spray dried.

[0006] In some embodiments, the composition is capable of increasing production of at least one anti-inflammatory gene product, e.g., IL-10 and/or CCL-18, in a human cell, e.g., a macrophage (e.g., a THP-1 macrophage), a monocyte, a peripheral blood mononuclear cell (PBMC), or a monocyte-derived dendritic cell. For example, in some embodiments, the composition increases production of at least one anti-inflammatory gene product, e.g., IL-10 and/or CCL-18, in a human cell, e.g., a macrophage (e.g., a THP-1 macrophage), a monocyte, a peripheral blood mononuclear cell (PBMC), or a monocyte-derived dendritic cell, when the human cell is contacted with the composition. In some embodiments, the composition is capable of reducing or preventing disruption of, or increasing, barrier integrity of a human cell (e.g., an epithelial cell) monolayer, e.g., a HT29MTX-E12 cell monolayer treated with TNF-α. For example, in some embodiments, the composition reduces or prevents disruption of, or increases, barrier integrity of a human cell (e.g., an epithelial cell) monolayer, e.g., a HT29MTX-E12 cell monolayer treated with TNF-α, when the human cell monolayer is contacted with the composition.

[0007] In some embodiments, the composition comprises a bacterial strain of Anaerostipes that comprises a 16s rRNA gene sequence with at least about 98% sequence identity to the polynucleotide sequence of SEQ ID NO: 1. In some embodiments, the Anaerostipes bacterial strain comprises a 16s rRNA gene sequence with at least about 98.5%, 99%, or 99.5% sequence identity to the polynucleotide sequence of SEQ ID NO: 1. In some embodiments, the Anaerostipes bacterial strain comprises a 16s rRNA gene sequence of SEQ ID NO: 1. In some embodiments, the Anaerostipes bacterial strain shares at least 70% DNA-DNA hybridization with strain Anaerostipes sp. P127-B2a, deposited under accession number DSM 33275. In some embodiments, the Anaerostipes bacterial strain comprises a nucleotide sequence having at least about 70% identity to any one of SEQ ID NOs: 2-52. In some embodiments, the Anaerostipes bacterial strain comprises a genome having at least 95% average nucleotide identity (ANI) with the genome of Anaerostipes sp. strain P127-B2a, deposited under accession number DSM 33275. In some embodiments, the Anaerostipes bacterial strain comprises a genome having at least 96.5% average nucleotide identity (ANI) and at least 60% alignment fraction (AF) with the genome of Anaerostipes sp. strain P127-B2a, deposited under accession number DSM 33275. In some embodiments, the Anaerostipes bacterial strain is Anaerostipes sp. P127-B2a, deposited under accession number DSM 33275.

[0008] In some embodiments, the Anaerostipes bacterial strain of the composition is viable. In some embodiments, the bacterial strain is capable of at least partially colonizing an intestine of a human subject.

[0009] In some embodiments, the composition is suitable for oral delivery to a subject. In some embodiments, the composition is formulated as an enteric formulation. In some embodiments, the enteric formulation is formulated as a capsule, tablet, caplet, pill, troche, lozenge, powder, or granule. In some embodiments, the composition is formulated as a suppository, suspension, emulsion, or gel. In some embodiments, the composition comprises at least 1×10³ CFU of the bacterial strain.

[0010] In some embodiments, the composition comprises a therapeutically effective amount of the bacterial strain sufficient to prevent or treat a disorder when administered to a subject in need thereof. In some embodiments, the disorder is selected from the group consisting of an inflammatory disorder, a gastrointestinal disorder, inflammatory bowel disease, cancer, non-alcoholic fatty liver disease (NAFLD), non-alcoholic steatohepatitis (NASH), metabolic syndrome, insulin deficiency, insulin resistance-related disorders, insulin sensitivity, glucose intolerance, pre-diabetes, diabetes, high body mass index (BMI), excess adiposity, obesity, excess weight, cardiovascular disease, atherosclerosis, hyperlipidemia, hyperglycemia, abnormal lipid metabolism, and hypertension. In some embodiments, the gastrointestinal disorder is selected from the group consisting of ulcerative colitis, Crohn's disease, and irritable bowel syndrome. In some embodiments, the inflammatory disorder is an inflammatory skin disorder, for example, an inflammatory skin disorder selected from the group consisting of psoriasis, eczema, dermatitis (e.g., eczematous dermatitides, topic and seborrheic dermatitis, allergic or irritant contact dermatitis, eczema craquele, photoallergic dermatitis, phototoxicdermatitis, phytophotodermatitis, radiation dermatitis, and stasis dermatitis), and acne.

[0011] In some embodiments, the composition comprises an excipient selected from the group consisting of a filler, a binder, a disintegrant, and any combination(s) thereof In some embodiments, the excipient is selected from the group consisting of cellulose, polyvinyl pyrrolidone, silicon dioxide, stearyl fumarate or a pharmaceutically acceptable salt thereof, and any combination(s) thereof. In some embodiments, the composition further comprises a cryoprotectant. In some embodiments, the cryoprotectant is selected from the group consisting of a fructooligosaccharide, trehalose and a combination thereof. In some embodiments, the fructooligosaccharide is Raftilose® (fructooligosaccharide derived from inulin). In some embodiments, the composition is suitable for bolus administration or bolus release. In some embodiments, the composition comprises the Anaerostipes bacterial strain and at least one more additional bacterial strain(s).

[0012] In another aspect, provided herein is a bacterial strain, e.g., an isolated bacterial strain, of the genus Anaerostipes, wherein the bacterial strain comprises a 16s rRNA gene sequence with at least about 98% sequence identity to the polynucleotide sequence of SEQ ID NO: 1. In some embodiments, the Anaerostipes bacterial strain is capable of increasing production of at least one anti-inflammatory gene product, e.g., IL-10 and/or CCL-18, in a human cell, e.g., a macrophage (e.g., a THP-1 macrophage), a monocyte, a peripheral blood mononuclear cell (PBMC), or a monocyte-derived dendritic cell. For example, in some embodiments, the Anaerostipes bacterial strain increases production of at least one anti-inflammatory gene product, e.g., IL-10 and/or CCL-18, in a human cell, e.g., a macrophage (e.g., a THP-1 macrophage), a monocyte, a peripheral blood mononuclear cell (PBMC), or a monocyte-derived dendritic cell, when the human cell is contacted with the Anaerostipes bacterial strain. In some embodiments, the Anaerostipes bacterial strain is capable of reducing or preventing disruption of, or increasing, barrier integrity of a human cell (e.g., an epithelial cell) monolayer, e.g., a HT29MTX-E12 cell monolayer treated with TNF-α. For example, in some embodiments, the Anaerostipes bacterial strain reduces or prevents disruption of, or increases, barrier integrity of a human cell (e.g., an epithelial cell) monolayer, e.g., a

[0013] HT29MTX-E12 cell monolayer treated with TNF-α, when the human cell monolayer is contacted with the Anaerostipes bacterial strain.

[0014] In some embodiments, the Anaerostipes bacterial strain comprises a 16s rRNA gene sequence with at least about 98.5%, 99%, or 99.5% sequence identity to the polynucleotide sequence of SEQ ID NO: 1. In some embodiments, the Anaerostipes bacterial strain comprises a 16s rRNA gene sequence of SEQ ID NO: 1. In some embodiments, the Anaerostipes bacterial strain shares at least 70% DNA-DNA hybridization with strain Anaerostipes sp. P127-B2a, deposited under accession number DSM 33275. In some embodiments, the Anaerostipes bacterial strain comprises a nucleotide sequence having at least about 70% identity to any one of SEQ ID NOs: 2-52. In some embodiments, the Anaerostipes bacterial strain comprises a genome having at least 95% average nucleotide identity (ANI) with the genome of Anaerostipes sp. strain P127-B2a, deposited under accession number DSM 33275. In some embodiments, the Anaerostipes bacterial strain comprises a genome having at least 96.5% average nucleotide identity (ANI) and at least 60% alignment fraction (AF) with the genome of Anaerostipes sp. strain P127-B2a, deposited under accession number DSM 33275. In some embodiments, the Anaerostipes bacterial strain is Anaerostipes sp. P127-B2a, deposited under accession number DSM 33275. In some embodiments, the bacterial strain is capable of at least partially colonizing an intestine of a human subject.

[0015] In another aspect, provided herein is a food product comprising an Anaerostipes bacterial strain described herein, or a composition comprising an Anaerostipes bacterial strain described herein.

[0016] In another aspect, provided herein is a method of preventing or treating a disorder, for example, an inflammatory disorder, a gastrointestinal disorder, inflammatory bowel disease, cancer, non-alcoholic fatty liver disease (NAFLD), non-alcoholic steatohepatitis (NASH), metabolic syndrome, insulin deficiency, insulin resistance-related disorders, insulin sensitivity, glucose intolerance, pre-diabetes, diabetes, high body mass index (BMI), excess adiposity, obesity, excess weight, cardiovascular disease, atherosclerosis, hyperlipidemia, hyperglycemia, abnormal lipid metabolism, and hypertension in a subject in need thereof, the method comprising administering an Anaerostipes bacterial strain described herein or a composition comprising an Anaerostipes bacterial strain described herein (e.g., a therapeutically effective amount of an Anaerostipes bacterial strain described herein or a composition comprising an Anaerostipes bacterial strain described herein) to the subject. In some embodiments, the gastrointestinal disorder is ulcerative colitis, Crohn's disease or irritable bowel syndrome. In some embodiments the inflammatory disorder is an inflammatory skin disorder, for example, an inflammatory skin disorder selected from the group consisting of psoriasis, eczema, dermatitis (e.g., eczematous dermatitides, topic and seborrheic dermatitis, allergic or irritant contact dermatitis, eczema craquele, photoallergic dermatitis, phototoxicdermatitis, phytophotodermatitis, radiation dermatitis, and stasis dermatitis), and acne. Also provided herein is a method of treating a dysbiosis in a subject in need thereof, the method comprising administering an Anaerostipes bacterial strain described herein or a composition comprising an Anaerostipes bacterial strain described herein (e.g., a therapeutically effective amount of an Anaerostipes bacterial strain described herein or a composition comprising an Anaerostipes bacterial strain described herein) to the subject. Also provided herein is a method of modifying a gut microbiome in a subject, the method comprising administering an Anaerostipes bacterial strain described herein or a composition comprising an Anaerostipes bacterial strain described herein (e.g., a therapeutically effective amount of an Anaerostipes bacterial strain described herein or a composition comprising an Anaerostipes bacterial strain described herein) to the subject. In some embodiments of the methods provided herein, the method further comprises administering a prebiotic to the subject. In some embodiments, the subject is selected from the group consisting of a human, a companion animal, or a livestock animal.

### DESCRIPTION OF THE DRAWINGS

[0017] The disclosure can be more completely understood with reference to the following drawings.

[0018] FIG. 1 depicts a distance tree based on pairwise comparisons of the closest neighbors of Anaerostipes rhamnosivorans P127-B2a.

[0019] FIG. 2 depicts (A) a light micrograph and (B) a scanning electron micrograph of Anaerostipes rhamnosivorans P127-B2a bacterial cells (9.48k x magnification).

[0020] FIG. 3 depicts the short-chain fatty acid (SCFA) production profile of Anaerostipes rhamnosivorans P127-B2a cultured for 72 hours. Levels of butyric acid, propionic acid, and acetic acid in batch culture supernatants were analyzed by HPLC (ABPDU Berkeley CA).

[0021] Non-inoculated YCFAC media was used as a negative control.

[0022] FIG. 4 depicts the effect of Anaerostipes rhamnosivorans P127-B2a on HT29-MTX-E12 barrier integrity. The % change in TEER (ohms x cm²) between time 0 and 24 hour following basal compartment addition of TNF-α was plotted for 10% v/v of freshly cultured Anaerostipes rhamnosivorans P127-B2a (2 doses) and an unrelated bacterial strain negative control with no protective effect. The PBS control was set as baseline. Each test article was evaluated in 6 replicates and results are representative of at least two independent experiments. *p value ≤0.05 student t-test.

[0023] FIG. 5 depicts the effect of Anaerostipes rhamnosivorans P127-B2a on (A) CCL-18 and (B) IL-10 production in human THP-1 macrophages. THP-1 macrophages were co-cultured with PBS only or the Anaerostipes rhamnosivorans P127-B2a strain (3 doses), and supernatants were collected and assayed for production of the indicated cytokine. Each test article was evaluated in 4 replicates and results are representative of at least two independent experiments. p value ≤0.05 (one-way ANOVA).

[0024] FIG. 6 depicts the effect of Anaerostipes rhamnosivorans P127-B2a on (A) TNF-α, (B) IL-113, and (C) IL-12p40 production in human THP-1 macrophages. THP-1 macrophages were co-cultured with PBS only or the Anaerostipes rhamnosivorans P127-B2a strain (3 doses), and supernatants were collected and assayed for production of the indicated cytokine. Each test article was evaluated in 4 replicates and results are representative of at least two independent experiments. p value <0.05 (one-way ANOVA).

[0025] FIG. 7 depicts the effect of Anaerostipes rhamnosivorans P127-B2a on (A) TNF-α, (B) IL-1β, (C) TRAIL and (D) IFN-γ production in human peripheral blood mononuclear cells (PBMCs). PBMCs were co-cultured with PBS only or the Anaerostipes rhamnosivorans P127-B2a strain (2 doses), and supernatants were collected and assayed for production of the indicated cytokine. Each test article was evaluated in 4 replicates and results are representative of at least two independent experiments. p value <0.05 (one-way ANOVA).

[0026] FIG. 8 depicts the effect of Anaerostipes rhamnosivorans P127-B2a on (A) IL-17A, (B) IL-6, (C) IL-2 and (D) IL-10 production in human PBMCs. PBMCs were co-cultured with PBS only or the Anaerostipes rhamnosivorans P127-B2a strain (2 doses), and supernatants were collected and assayed for production of the indicated cytokine. Each test article was evaluated in 4 replicates and results are representative of at least two independent experiments. p value <0.05 (one-way ANOVA).

[0027] FIG. 9 depicts the effect of Anaerostipes rhamnosivorans P127-B2a on (A) TNF-α, (B) IL-1β, (C) TRAIL and (D) IFN-β production in human monocyte-derived dendritic cells (moDCs). moDCs were co-cultured with PBS only or the Anaerostipes rhamnosivorans P127-B2a strain (2 doses), and supernatants were collected and assayed for production of the indicated cytokine. Each test article was evaluated in 4 replicates and results are representative of at least two independent experiments. p value <0.05 (one-way ANOVA).

[0028] FIG. 10 depicts the effect of Anaerostipes rhamnosivorans P127-B2a on (A) IL-12p′70, (B) IL-6, (C) IL-23 and (D) IL-27 production in human moDCs. moDCs were co-cultured with PBS only or the Anaerostipes rhamnosivorans P127-B2a strain (2 doses), and supernatants were collected and assayed for production of the indicated cytokine. Each test article was evaluated in 4 replicates and results are representative of at least two independent experiments. p value <0.05 (one-way ANOVA).

[0029] FIG. 11 depicts the effect of Anaerostipes rhamnosivorans P127-B2a on IL-10 production in human moDCs. moDCs were co-cultured with PBS only or the Anaerostipes rhamnosivorans P127-B2a strain (2 doses), and supernatants were collected and assayed for production of IL-10. Each test article was evaluated in 4 replicates and results are representative of at least two independent experiments. p value <0.05 (one-way ANOVA).

[0030] FIG. 12 depicts the effect of oral dosing of Anaerostipes rhamnosivorans P127-B2a on back skin thickness in an Imiquimod-(IMQ) induced psoriasis-like skin inflammation mouse model. *p value<0.05, **p value<0.01, ***p value<0.005, and ****p value<0.001 (one-way ANOVA or two ANOVA with Fisher's LSD post test).

[0031] FIG. 13 depicts the effect of oral dosing of Anaerostipes rhamnosivorans P127-B2a on skin redness (erythema) in an oxazolone-induced atopic dermatitis mouse model. *p value<0.05, **p value<0.01, ***p value<0.005, and ****p value<0.001 (one-way ANOVA or two ANOVA with Fisher's LSD post test).

[0032] FIG. 14 depicts the effect of oral dosing of Anaerostipes rhamnosivorans P127-B2a on back skin scaling in an oxazolone-induced atopic dermatitis mouse model. *p value <0.05, **p value<0.01, ***p value<0.005, and ****p value<0.001 (one-way ANOVA or two ANOVA with Fisher's LSD post test).

[0033] FIG. 15 depicts the effect of oral dosing of Anaerostipes rhamnosivorans P127-B2a (AR) on (A) back skin thickness, and (B) total psoriasis area and severity index (PAST) score in an Imiquimod-(IMQ) induced psoriasis-like skin inflammation mouse model. *p value<0.05, **p value<0.01, ***p value<0.005, and ****p value<0.001 (one-way ANOVA or two ANOVA with Fisher's LSD post test).

[0034] FIG. 16 depicts the effect of oral dosing of Anaerostipes rhamnosivorans P127-B2a (AR) on skin levels of (A) IL-17A, (B) TNF-α, (C) IL-1β, (D) KC/GRO, and (E) IL-4 in an Imiquimod-(IMQ) induced psoriasis-like skin inflammation mouse model. *p value<0.05, **p value<0.01, ***p value<0.005, and ****p value<0.001 (one-way ANOVA or two ANOVA with Fisher's LSD post test).

[0035] FIG. 17 depicts the effect of oral dosing of Anaerostipes rhamnosivorans P127-B2a (AR) on (A) back skin thickness, and (B) total PASI score in a DNFB-induced atopic dermatitis mouse model. *p value<0.05, **p value<0.01, ***p value<0.005, and **** p value<0.001 (one-way ANOVA or two ANOVA with Fisher's LSD post test).

[0036] FIG. 18 depicts the effect of oral dosing of Christensenella sp. P152-H6d (ChA), and the combination of Christensenella sp. P152-H6d plus Faecalibacterium prausnitzii P162-C10a plus Anaerostipes rhamnosivorans P127-B2a (ChA +Fp +AR), respectively, on (A) skin redness (erythema), and (B) back skin thickness (edema) in a DNFB-induced atopic dermatitis mouse model. *p value<0.05, **p value<0.01, ***p value<0.005, and **** p value<0.001 (one-way ANOVA or two ANOVA with Fisher's LSD post test).

### DETAILED DESCRIPTION

### I. Bacterial Strains

[0037] A contemplated bacterial strain, for example, for use in a bacterial strain mixture, pharmaceutical composition or unit, or method provided herein, includes an Anaerostipes species strain. Exemplary Anaerostipes species include Anaerostipes butyraticus, Anaerostipes caccae, Anaerostipes hadrus, and Anaerostipes rhamnosivorans. Those of skill in the art will recognize that the genus Anaerostipes may undergo taxonomical reorganization. Thus, it is intended that a contemplated Anaerostipes species include Anaerostipes species that have been renamed and/or reclassified, as well as those that may be later renamed and/or reclassified. For example, contemplated strains of Anaerostipes hadrus includes those formerly classified as Eubacterium hadrum (Allen-Vercoe et al., Anaerobe. 18(5):523-529 (2011)). In particular embodiments, a contemplated Anaerostipes species strain is an Anaerostipes rhamnosivorans strain.

[0038] As used herein, the term “species” refers to a taxonomic entity as conventionally defined by genomic sequence and phenotypic characteristics. A “strain” is a particular instance of a species that has been isolated and purified according to conventional microbiological techniques. Bacterial species and/or strains described herein include those that are live and/or viable, as well as those that are killed, inactivated or attenuated. Additionally, bacterial species and/or strains described herein include vegetative forms and non-spore forming forms of bacteria.

[0039] In some embodiments, a bacterial strain of Anaerostipes comprises a 16S rRNA gene sequence having a certain % identity to a reference sequence. rRNA, 16S rDNA, 16S rRNA, 16S, 18S, 18S rRNA, and 18S rDNA refer to nucleic acids that are components of, or encode for, components of the ribosome. There are two subunits in the ribosome termed the small subunit (SSU) and large subunit (LSU). Ribosomal RNA genes (rDNA) and their complementary RNA sequences are widely used for determination of the evolutionary relationships among organisms as they are variable, yet sufficiently conserved to allow cross-organism molecular comparisons. 16S rDNA sequence of the 30S SSU can be used, in embodiments, for molecular-based taxonomic assignments of prokaryotes. For example, 16S sequences may be used for phylogenetic reconstruction as they are general highly conserved but contain specific hypervariable regions that harbor sufficient nucleotide diversity to differentiate genera and species of most bacteria. Although 16S rDNA sequence data has been used to provide taxonomic classification, closely related bacterial strains that are classified within the same genus and species, may exhibit distinct biological phenotypes.

[0040] Accordingly, a bacterial strain of the species Anaerostipes rhamnosivorans provided herein includes strains comprising a 16s rRNA gene sequence having a certain % identity to

[0041] SEQ ID NO: 1. In some embodiments, the bacterial strain is a strain of the genus Anaerostipes comprising a 16s rRNA gene sequence with at least 93% sequence identity to the polynucleotide sequence of SEQ ID NO: 1. In some embodiments, the bacterial strain comprises a 16s rRNA gene sequence with at least about 93.25%, about 93.5%, about 93.75%, about 94%, about 94.25%, about 94.5%, about 94.75%, about 95%, about 95.25%, about 95.5%, about 95.75%, about 96%, about 96.25%, about 96.5%, about 96.75%, about 97%, about 97.05%, about 97.1%, about 97.15%, about 97.2%, about 97.25%, about 97.3%, about 97.35%, about 97.4%, about 97.45%, about 97.5%, about 97.55%, about 97.6%, about 97.65%, about 97.7%, about 97.75%, about 97.8%, about 97.85%, about 97.9%, about 97.95%, about 98%, about 98.05%, about 98.1%, about 98.15%, about 98.2%, about 98.25%, about 98.3%, about 98.35%, about 98.4%, about 98.45%, about 98.5%, about 98.55%, about 98.6%, about 98.65%, about 98.7%, about 98.75%, about 98.8%, about 98.85%, about 98.9%, about 98.95%, about 99%, about 99.1%, about 99.2%, about 99.3%, about 99.4%, about 99.5%, about 99.6%, about 99.7%, about 99.8%, or about 99.9% identity to the polynucleotide sequence of SEQ ID NO: 1. In a particular embodiment, the bacterial strain comprises a 16s rRNA gene sequence identical to SEQ ID NO: 1. In some embodiments, the sequence identity referred to above is across at least about 70% of SEQ ID NO: 1. In other embodiments, the sequence identity referred to above is across at least about 71%, 72%, 73%, 74%, 75%, 76%, 77%, 78%, 79%, 80%, 81%, 82%, 83%, 84%, 85%, 86%, 87%, 88%, 89%, 90%, 91%, 92%, 93%, 94%, 95%, 96%, 97%, 98%, 99% or 100% of SEQ ID NO: 1.

[0042] In some embodiments, a bacterial strain of Anaerostipes rhamnosivorans comprises a genomic sequence (e.g., a whole genome sequence, or fragments or contigs thereof) having a certain % identity to one or more of SEQ ID NOs: 2-52. In some embodiments, an Anaerostipes rhamnosivorans strain comprises a polynucleotide sequence selected from any one of SEQ ID NOs: 2-52, or a nucleotide sequence having at least about 65%, about 70%, about 75%, about 80%, about 85%, about 90%, about 91%, about 92%, about 93%, about 94%, about 95%, about 96%, about 97%, about 98%, or about 99% identity to a polynucleotide sequence selected from any one of SEQ ID NOs: 2-52. In some embodiments, the sequence identity referred to above is across at least about 70% of the bacterial genome. In other embodiments, the sequence identity referred to above is across at least about 75%, 80%, 85%, 90%, 95% or greater than 95% of the bacterial genome. In some embodiments, an Anaerostipes rhamnosivorans strain genome may comprise the polynucleotide sequence of each of SEQ ID NOs: 2-52, or each of a polynucleotide sequence having at least about 65%, about 70%, about 75%, about 80%, about 85%, about 90%, about 91%, about 92%, about 93%, about 94%, about 95%, about 96%, about 97%, about 98%, or about 99% identity to the polynucleotide sequence of each of SEQ ID NOs: 2-52.

[0043] In some embodiments, a bacterial strain of Anaerostipes rhamnosivorans comprises a whole genomic sequence having at least about 70% identity across at least 70% of its genome to the sum of all genomic contigs represented by SEQ ID NOs:2-52. In some embodiments, the whole genomic sequence has at least about 75%, 80%, 85%, 90%, 95% or greater than 95% identity to the sum of all genomic contigs represented by SEQ ID NOs:2-52. In some embodiments, the sequence identity referred to above is across at least 75%, 80%, 85%, 90%, 95% or greater than 95% of the whole genomic sequence of the bacterial strain. In some embodiments, a bacterial strain of Anaerostipes rhamnosivorans comprises a whole genomic sequence comprising coding regions having at least about 70% identity across at least 70% of the total coding regions in its genome to the coding regions within the sum of all genomic contigs represented by SEQ ID NOs:2-52. In some embodiments, the coding regions within the whole genomic sequence have at least about 75%, 80%, 85%, 90%, 95% or greater than 95% identity to the coding regions within the sum of all genomic contigs represented by SEQ ID NOs:2-52. In some embodiments, the sequence identity referred to above is across at least 75%, 80%, 85%, 90%, 95% or greater than 95% of the coding regions within the whole genomic sequence of the bacterial strain.

[0044] The identity of a bacterial strain of Anaerostipes may be determined by sequence analysis, for example, of the 16s rRNA gene sequence or a genomic sequence (e.g., a whole genome sequence, or fragments or contigs thereof) of the bacterial strain, using any sequencing methods known in the art, including, for example, Sanger sequencing. An example of a sequencing technology useful for identifying strains of Anaerostipes is the Illumina platform. The Illumina platform is based on amplification of DNA on a solid surface (e.g., flow cell) using fold-back PCR and anchored primers (e.g., capture oligonucleotides). For sequencing with the Illumina platform, bacterial DNA is fragmented, and adapters are added to terminal ends of the fragments. DNA fragments are attached to the surface of flow cell channels by capturing oligonucleotides which are capable of hybridizing to the adapter ends of the fragments. The DNA fragments are then extended and bridge amplified. After multiple cycles of solid-phase amplification followed by denaturation, an array of millions of spatially immobilized nucleic acid clusters or colonies of single-stranded nucleic acids are generated. Each cluster may include approximately hundreds to a thousand copies of single-stranded DNA molecules of the same template. The Illumina platform uses a sequencing-by-synthesis method where sequencing nucleotides comprising detectable labels (e.g., fluorophores) are added successively to a free 3′ hydroxyl group. After nucleotide incorporation, a laser light of a wavelength specific for the labeled nucleotides can be used to excite the labels. An image is captured and the identity of the nucleotide base is recorded.

[0045] These steps can be repeated to sequence the rest of the bases. Sequencing according to this technology is described in, for example, U.S. Patent Publication Application Nos. 2011/0009278, 2007/0014362, 2006/0024681, 2006/0292611, and U.S. Pat. Nos. 7,960,120, 7,835,871, 7,232,656, and 7,115,200. Another example of a sequencing technology useful for identifying strains of Anaerostipes is SOLiD technology by Applied Biosystems from Life

[0046] Technologies Corporation (Carlsbad, Calif). In SOLiD sequencing, bacterial DNA may be sheared into fragments, and adapters may be attached to the terminal ends of the fragments to generate a library. Clonal bead populations may be prepared in microreactors containing template, PCR reaction components, beads, and primers. After PCR, the templates can be denatured, and bead enrichment can be performed to separate beads with extended primers.

[0047] Templates on the selected beads undergo a 3′ modification to allow covalent attachment to the slide. The sequence can be determined by sequential hybridization and ligation with several primers. A set of four fluorescently labeled di-base probes compete for ligation to the sequencing primer. Multiple cycles of ligation, detection, and cleavage are performed with the number of cycles determining the eventual read length. Another example of a sequencing technology useful for identifying strains of Anaerostipes is Ion Torrent sequencing. In this technology, bacterial DNA is sheared into fragments, and oligonucleotide adapters are then ligated to the terminal ends of the fragments. The fragments are then attached to a surface, and each base in the fragments is resolvable by measuring the H³⁰ ions released during base incorporation. This technology is described in, for example, U.S. Patent Publication Application Nos. 2009/0026082, 2009/0127589, 2010/0035252, 2010/0137143, and 2010/0188073.

[0048] Upon obtaining a polynucleotide sequence of a bacterial strain (e.g., 16s rRNA gene sequence or genomic sequence), sequence identity with a polynucleotide sequence of an Anaerostipes strain may be determined in various ways that are within the skill in the art, e.g., using publicly available computer software such as BLAST, BLAST-2, BLAT (BLAST-like alignment tool), ALIGN or Megalign (DNASTAR) software. BLAST (Basic Local Alignment Search Tool) analysis using the algorithm employed by the programs blastp, blastn, blastx, tblastn and tblastx (Karlin et al., PROC. NATL. ACAD. SCI. USA 87:2264-2268 (1990); Altschul, J. MoL. EvoL. 36, 290-300 (1993); Altschul et al., NUCLEIC ACIDS RES. 25:3389-3402 (1997)) are tailored for sequence similarity searching. For a discussion of basic issues in searching sequence databases see Altschul et al., NATURE GENETICS 6:119-129 (1994) , which is fully incorporated by reference. Those skilled in the art can determine appropriate parameters for measuring alignment, including any algorithms needed to achieve maximal alignment over the full length of the sequences being compared. The search parameters for histogram, descriptions, alignments, expect value (i.e., the statistical significance threshold for reporting matches against database sequences), cutoff, matrix and filter are at the default settings. The default scoring matrix used by blastp, blastx, tblastn, and tblastx is the BLOSUM62 matrix (Henikoff et al., (1992) PROC. NATL. ACAD. SCI. USA 89:10915-10919), fully incorporated by reference). Four blastn parameters may be adjusted as follows: Q=10 (gap creation penalty); R=10 (gap extension penalty); wink=1 (generates word hits at every wink position along the query); and gapw=16 (sets the window width within which gapped alignments are generated). The equivalent Blastp parameter settings may be Q=9; R=2; wink=1; and gapw=32. Searches may also be conducted using the NCBI

[0049] (National Center for Biotechnology Information) BLAST Advanced Option parameter (e.g.: -G, Cost to open gap [Integer]: default=5 for nucleotides/11 for proteins; -E, Cost to extend gap [Integer]: default =2 for nucleotides/1 for proteins; -q, Penalty for nucleotide mismatch [Integer]: default =-3; -r, reward for nucleotide match [Integer]: default =1; -e, expect value [Real]: default =10; -W, wordsize [Integer]: default =11 for nucleotides/28 for megablast/3 for proteins; -y, Dropoff (X) for blast extensions in bits: default =20 for blastn/7 for others; -X, X dropoff value for gapped alignment (in bits): default=15 for all programs, not applicable to blastn; and —Z, final X dropoff value for gapped alignment (in bits): 50 for blastn, 25 for others). A Bestfit comparison between sequences, available in the GCG package version 10.0, uses DNA parameters GAP=50 (gap creation penalty) and LEN=3 (gap extension penalty) and the equivalent settings in protein comparisons are GAP=8 and LEN=2.

[0050] In a particular embodiment, a bacterial strain of Anaerostipes useful for the compositions and methods provided herein is Anaerostipes rhamnosivorans strain P127-B2a. A deposit of Anaerostipes rhamnosivorans strain P127-B2a was made to DSMZ (Deutsche Sammlung von Mikroorganismen and Zellkulturen GmbH, InhoffenstraBe 7B, 38124 Brunswick, Germany) under the Budapest Treaty on the International Recognition of the Deposit of Microorganisms for the Purposes of Patent Procedure on September 20, 2019.

[0051] This deposit was accorded accession number DSM 33275. The 16s rRNA gene sequence of Anaerostipes rhamnosivorans strain P127-B2a is provided herein as SEQ ID NO: 1, and genomic sequences of Anaerostipes rhamnosivorans strain P127-B2a are provided herein as SEQ ID NOs: 2-52.

[0052] The terms Anaerostipes rhamnosivorans strain P127-B2a, Anaerostipes sp. P127-B2a,

[0053] Anaerostipes P127-B2a, and P127-B2a are used interchangeably herein.

[0054] Additional bacterial strains of Anaerostipes provided herein include Anaerostipes strains having a DNA-DNA hybridization (DDH)) value of equal to or greater than about 70% with Anaerostipes rhamnosivorans strain P127-B2a. In particular embodiments, the Anaerostipes rhamnosivorans strain is one having greater than about 70%, about 75%, about 80%, about 85%, about 90%, about 95%, about 96%, about 97%, about 98%, or about 99% DNA-DNA hybridization with Anaerostipes rhamnosivorans strain P127-B2a, or any range between any of the above values. Any method for determining DNA-DNA hybridization values known in the art may be used to assess the degree of DNA-DNA hybridization, including but not limited to the spectrophotometric method for determining renaturation rates described by De Ley et al. Biochem 12 133-142 (1970)), slightly modified in hybridization temperature (Gavini et al., Ecology in Health and Disease 12 40-45 (2001)); and those described by Grimont et al., Curr Microbiol 4, 325-330 (1980) and Rossello-Mora, Molecular Identification, Systematics and Population Structure of Prokaryotes pp. 23-50 (2006). In some embodiments, the degree of DNA-DNA hybridization is determined by digital DNA-DNA hybridization (dDDH) analysis, for example, using the Genome-to-Genome Distance Calculator online tool (see Meier-Kolthoff et al., BMC Bioinformatics 14:60 (2013)). In particular embodiments, the Anaerostipes strain is one having a DDH or dDDH value of equal to or greater than about 70% with Anaerostipes rhamnosivorans strain P127-B2a. In some embodiments, the DDH or dDDH value is greater than about 75%, about 80%, about 85%, about 90%, about 95%, about 96%, about 97%, about 98%, or about 99% with Anaerostipes rhamnosivorans strain P127-B2a, or any range between any of the above values.

[0055] Additional bacterial strains of Anaerostipes provided herein include Anaerostipes strains having equal to or greater than 95% average nucleotide identity (ANI) with Anaerostipes rhamnosivorans strain P127-B2a. In some embodiments, the ANI is equal to or greater than about 95%, about 95.5%, about 96%, about 96.5%, about 97%, about 97.5%, about 98%, about 98.5%, about 99%, about 99.5% or 100% with Anaerostipes rhamnosivorans strain P127-B2a, or any range between any of the above values. The average nucleotide identity (ANI) of the shared genes between two strains is known to be a robust means to compare genetic relatedness among strains, and that ANI values of —95% correspond to the 70% DNA—DNA hybridization standard for defining a species. See, e.g., Konstantinidis and Tiedje, Proc Natl Acad Sci USA, 102(7):2567-72 (2005); and Goris et al., Int Syst Evol Microbiol. 57(Pt 1):81-91 (2007); and Jain et al., Nat Commun. 9(1):5114 (2018). In some embodiments, the ANI between two bacterial genomes is calculated from pair-wise comparisons of all sequences shared between any two strains and can be determined, for example, using any of a number of publicly available ANI tools, including but not limited to OrthoANI with usearch (Yoon et al. Antonie van Leeuwenhoek 110:1281-1286 (2017)); ANI Calculator, JSpecies (Richter and Rossello-Mora, Proc Natl Acad Sci USA 106:19126-19131 (2009)); and JSpeciesWS (Richter et al., Bioinformatics 32:929-931 (2016)). Other methods for determining the ANI of two genomes are known in the art. See, e.g., Konstantinidis, K. T. and Tiedje, J. M., Proc. Natl. Acad. Sci. U.S.A., 102: 2567-2572 (2005); and Varghese et al., Nucleic Acids Research, 43(14):6761-6771 (2015); and Jain et al., Nat Commun. 9(1):5114 (2018). In a particular embodiment, the ANI between two bacterial genomes can be determined using an alignment-based method, for example, by averaging the nucleotide identity of orthologous genes identified as bidirectional best hits (BBHs). Protein-coding genes of a first genome (Genome A) and second genome (Genome B) are compared at the nucleotide level using a similarity search tool, for example, NSimScan (Novichkov et al., Bioinformatics 32(15): 2380-23811 (2016). The results are then filtered to retain only the BBHs that display at least 70% sequence identity over at least 70% of the length of the shorter sequence in each BBH pair. The ANI of Genome A to Genome B is defined as the sum of the percent identity times the alignment length for all BBHs, divided by the sum of the lengths of the BBH genes. In another particular embodiment, the ANI between two bacterial genomes can be determined using an alignment-free method, for example, FastANI, which uses alignment-free approximate sequence mapping to assess genomic relatedness. See Jain et al., Nat Commun. 9(1):5114 (2018). FastANI has been demonstrated to reveal clear genetic discontinuity between species, with 99.8% of the total 8 billion genome pairs analyzed conforming to >95% intra-species and <83% inter-species ANI values. Accordingly, in a particular embodiment, a bacterial strain having a genome (Genome A) with equal to or greater than 95% average nucleotide identity (ANI) with the genome of Anaerostipes rhamnosivorans strain P127-B2a (Genome B) is identified as a bacterial strain of the species Anaerostipes rhamnosivorans.

[0056] Additional bacterial strains of Anaerostipes provided herein include Anaerostipes strains having equal to or greater than 60% alignment fraction (AF) with Anaerostipes rhamnosivorans strain P127-B2a. In some embodiments, the AF is equal to or greater than about 65%, about 70%, about 75%, about 80%, about 85%, about 90%, about 95%, or 100% with Anaerostipes rhamnosivorans strain P127-B2a, or any range between any of the above values. In some embodiments, the AF is computed by dividing the sum of the lengths of all BBH genes by the sum of the length of all the genes in Genome A. This computation is performed separately in both directions: from Genome A to genome B and from Genome B to Genome A.

[0057] In a particular embodiment, an Anaerostipes strain comprises a genome having equal to or greater than about 95% ANI and equal to or greater than 60% AF with the genome of Anaerostipes rhamnosivorans strain P127-B2a. In another particular embodiment, an Anaerostipes strain comprises a genome having equal to or greater than about 96.5% ANI and equal to or greater than 60% AF with the genome of Anaerostipes rhamnosivorans strain

[0058] P127-B2a.

[0059] Additional bacterial strains of Anaerostipes provided herein include Anaerostipes strains that having the same or approximately the same genome characteristics as Anaerostipes rhamnosivorans strain P127-B2a. Such genome characteristics can include, for example, genome size, G+C content, number of coding sequences, and number of tRNAs. In some embodiments, the Anaerostipes strain comprises a genome of about 3.5 to about 3.7 megabases (Mb) in size. In some embodiments, the Anaerostipes strain comprises a genome of about 3.55 to about 3.65 Mb in size. In some embodiments, the Anaerostipes strain comprises a genome of about 3.55, 3.56, 3.57, 3.58, 3.59, 3.60, 3.61, 3.62, 3.63, 3.64 or about 3.65 Mb in size. In a particular embodiment, the Anaerostipes strain comprises a genome of about 3.59 Mb in size. In some embodiments, the Anaerostipes strain comprises a genome that comprises a G+C content of about 43% to about 46%. In some embodiments, the Anaerostipes strain comprises a genome that comprises a G+C content of about 43.5% to about 45.5%. In some embodiments, the Anaerostipes strain comprises a genome that comprises a G+C content of about 43.6%, 43.7%, 43.8%, 43.9%, 44.0%, 44.1%, 44.2%, 44.3%, 44.4%, 44.5%, 44.6%, 44.7%, 44.8%, 44.9% or about 45.0%. In a particular embodiment, the Anaerostipes strain comprises a genome that comprises a G+C content of about 44.48%. In some embodiments, the Anaerostipes strain comprises a genome that comprises about 3400 to 3600 coding sequences. In some embodiments, the Anaerostipes strain comprises a genome that comprises about 3450 to 3550 coding sequences. In some embodiments, the Anaerostipes strain comprises a genome that comprises about 3465, 3466, 3467, 3468, 3469, 3470, 3471, 3472, 3473, 3474, 3475, 3476, 3477, 3478, 3479, 3480, 3481, 3482, 3483, 3484, or about 3485 coding sequences. In a particular embodiment, the Anaerostipes strain comprises a genome that comprises about 23473 coding sequences. In some embodiments, the Anaerostipes strain comprises a genome that comprises about 40 to 50 tRNA sequences. In some embodiments, the Anaerostipes strain comprises a genome that comprises about 43 to 49 tRNA sequences. In some embodiments, the Anaerostipes strain comprises a genome that comprises about 43, 44, 45, 46, 47, 48, 49 or 50 tRNAs. In a particular embodiment, the Anaerostipes strain comprises a genome that comprises about 46 tRNAs.

[0060] Additional bacterial strains of Anaerostipes provided herein include Anaerostipes strains that provide the same or approximately the same pattern as Anaerostipes rhamnosivorans strain P127-B2a when analyzed, for example, by DNA fingerprinting techniques. Any DNA fingerprinting technique known in the art may be used to identify strains of Anaerostipes, including but not limited to, Pulsed Field Gel Electrophoresis (PFGE), ribotyping, Randomly Amplified Polymorphic DNA (RAPD), Amplified Fragment Length Polymorphism (AFLP), Amplified Ribosomal DNA Restriction Analysis (ARDRA), rep-PCR (repetitive element primed PCR, directed to naturally occurring, highly conserved, repetitive DNA sequences, present in multiple copies in the genomes) including Repetitive Extragenic Palindromic PCR (REP-PCR), Enterobacterial Repetitive Intergenic Consensus Sequences-PCR (ERIC-PCR), BOX-PCR (derived from the boxA element), (GTG)₅-PCR, Triplicate Arbitrary Primed PCR (TAP-PCR), Multi-Locus Sequence Analysis (MLSA), Multi-Locus Sequence Typing (MLST), Multiple Locus Variable-number Tandem Repeat Analysis (MLVA) and DNA microarray-based genotyping techniques.

[0061] Additional bacterial strains of Anaerostipes provided herein include Anaerostipes strains showing phenotypic similarity to Anaerostipes rhamnosivorans strain P127-B2a.

[0062] Phenotypic similarity can be based on, for example, cell shape and size, colony morphology (e.g. size, color and odor of plate colonies), Gram staining, biochemical tests, pH and temperature optima, sugar fermentation, metabolic capabilities (e.g. catalase and/or oxidase negative), chemotaxonomic analysis (e.g. polar lipid and lipoquinone composition; see Tindall et al., Int JSyst Evol Microbiol 58, 1737-1745 (2008)) and/or fatty acid methyl ester (FAME) analysis. In some embodiments, the bacterial strain of Anaerostipes is catalase negative. In some embodiments, the bacterial strain of Anaerostipes is oxidase negative. In some embodiments, the bacterial strain of Anaerostipes is both catalase and oxidase negative.

[0063] In some embodiments, a bacterial strain of Anaerostipes is capable of fermenting at least one carbon source selected from dulcitol, fructose (e.g. D-fructose), galactose (e.g. D-galactose), glucosaminitol (e.g. N-acetyl-D-glucosaminitol), glucosamine (e.g. N-acetyl-D-glucosamine, D-glucosamine), glucose (e.g., a-D-glucose), malitol, maltose, mannitol (e.g., D-mannitol), mannose (e.g. D-mannose), palatinose, rhamnose (e.g. D-rhamnose), sorbitol (e.g., D-sorbitol), sorbose (e.g. L-sorbose), sucrose, tagatose (e.g. D-tagatose), turanose, butyric acid (β-hydroxy butyric acid), L-cysteine, L-Aspartic Acid, L-arginine, L-alanine, m-Inositol, X-α-D-glucoside, X-β-D-glucoside, X-β-D-galactoside, X-α-D-mannoside, X-α-D-Glucuronide, and X-α-D-galactoside. In some embodiments, the bacterial strain of Anaerostipes is capable of fermenting each of dulcitol, fructose (e.g. D-fructose), galactose (e.g. D-galactose), glucosaminitol (e.g. N-acetyl-D-glucosaminitol), glucosamine (e.g. N-acetyl-D-glucosamine, D-glucosamine), glucose (e.g., a-D-glucose), malitol, maltose, mannitol (e.g., D-mannitol), mannose (e.g. D-mannose), palatinose, rhamnose (e.g. D-rhamnose), sorbitol (e.g., D-sorbitol), sorbose (e.g. L-sorbose), sucrose, tagatose (e.g. D-tagatose), turanose, butyric acid (β-hydroxy butyric acid), L-cysteine, L-Aspartic Acid, L-arginine, L-alanine, m-Inositol, X-α-D-glucoside, X-β-D-glucoside, X-β-D-galactoside, X-α-D-mannoside, X-α-D-Glucuronide, and X-α-D-galactoside. In certain other embodiments, the bacterial strain of Anaerostipes is not capable of fermenting, or substantially fermenting, mannitol (e.g., D-mannitol) or sorbitol (e.g., D-sorbitol).

[0064] In some embodiments, an Anaerostipes bacterial strain useful for the compositions and methods provided herein is capable of producing one or more short-chain fatty acids (SCFAs). In some embodiments, the SCFA is butyric acid. In some embodiments, the Anaerostipes bacterial strain is capable of utilizing one or more short-chain fatty acids (SCFAs) selected from the group consisting of propionic acid and acetic acid.

[0065] A contemplated bacterial strain, bacterial strain mixture, or composition may be characterized as having an effect on gene product production, e.g., IL-10, IL-12, or CCL-18 production, in an immune cell, e.g., a macrophage (e.g., a THP-1 macrophage) or PBMC (including lymphocytes (T cells, B cells, NK cells) and monocytes). In vivo, major sources of IL-10 include T helper cells, monocytes, macrophages and dendritic cells, however myriad immune effector cell types are capable of producing IL-10 in certain contexts including B cells, cytotoxic T cells, NK cells, mast cells, and granulocytes like neutrophils and eosinophils. Gene product production, e.g., IL-10, IL-12, or CCL-18, in a macrophage may, for example, be assayed as follows. THP-1 human macrophages are made by culturing the THP-1 human monocyte cell line with phorbol 12-myristate 13-acetate (PMA) for 24 hours, optionally followed by IL-4 and IL-13 as described previously (Genin et al., BMC Cancer 15:577 (2015)). A bacterial strain, bacterial strain mixture, or composition is incubated with THP-1 macrophages in the presence of lipopolysaccharide (LPS) for 24 hours. Gene product production is assessed by measuring the concentration of the gene product, e.g., IL-10, IL-12, or CCL-18, in the cell culture supernatant by ELISA. Gene product production may also be assayed as described in Sudhakaran et al., Genes Nutr., 8(6): 637-48 (2013). Gene product production, e.g., IL-10, IL-12, or CCL-18 production, in a PBMC may, for example, be assayed as follows. Primary PBMCs are isolated from blood samples of donors using a percoll gradient (Sim et al., J. Vis. Exp. (112), e54128 (2016)). A bacterial strain, bacterial strain mixture, or composition is incubated with PBMCs for 24 hours. Gene product production is assessed by measuring the concentration of the gene product, e.g., IL-10, IL-12, or CCL-18, in the cell culture supernatant by ELISA.

[0066] For example, in some embodiments, an Anaerostipes (e.g., Anaerostipes rhamnosivorans) bacterial strain, or a bacterial strain mixture or composition comprising an Anaerostipes (e.g., Anaerostipes rhamnosivorans) bacterial strain, increases, or is capable of increasing, production of at least one anti-inflammatory gene product, e.g., an anti-inflammatory cytokine or chemokine, in a cell, tissue, or subject. Exemplary anti-inflammatory gene products include CCL-18, IL-1Ra, IL-2, IL-4, IL-6, IL-10, IL-11, IL-13, IFN-β and TGF-β. For example, in some embodiments, an Anaerostipes bacterial strain (or bacterial strain mixture or composition comprising the Anaerostipes bacterial strain), increases production of CCL-18 and/or IL-10 in a cell, tissue, or subject. In some embodiments, the increased production of an anti-inflammatory gene product, e.g., CCL-18, occurs in a human cell, e.g., a THP-1 macrophage, monocyte, PBMC or moDC. For example, contacting a human cell, e.g., a THP-1 macrophage, PBMC or moDC, with the Anaerostipes bacterial strain (or bacterial strain mixture or composition comprising the Anaerostipes bacterial strain), e.g., by culturing the human cell with the Anaerostipes bacterial strain (or bacterial strain mixture or composition comprising the Anaerostipes bacterial strain) increases production of CCL-18 and/or IL-10 in the cell by at least about 10%, at least about 20%, at least about 30%, at least about 40%, at least about 50%, at least about 75%, at least about 100%, at least about 200%, at least about 300%, at least about 400%, at least about 500%, at least about 750%, at least about 1000%, from about 10% to about 20%, from about 10% to about 50%, from about 10% to about 100%, from about 10% to about 200%, from about 10% to about 500%, from about 10% to about 1000%, from about 20% to about 50%, from about 20% to about 100%, from about 20% to about 200%, from about 20% to about 500%, from about 20% to about 1000%, from about 50% to about 100%, from about 50% to about 200%, from about 50% to about 500%, from about 50% to about 1000%, from about 100% to about 200%, from about 100% to about 500%, from about 100% to about 1000%, from about 200% to about 500%, from about 200% to about 1000%, or from about 500% to about 1000%, relative to a cell (e.g., of the same cell type) that was not contacted, e.g., cultured, with the Anaerostipes bacterial strain (or bacterial strain mixture or composition comprising the Anaerostipes bacterial strain). In some embodiments, the contacting of the human cell with the Anaerostipes bacterial strain (or bacterial strain mixture or composition comprising the Anaerostipes bacterial strain) occurs in vitro. In other embodiments, the contacting of the human cell with the Anaerostipes bacterial strain (or bacterial strain mixture or composition comprising the Anaerostipes bacterial strain) occurs in vivo.

[0067] In some embodiments, an Anaerostipes (e.g., Anaerostipes rhamnosivorans) bacterial strain, or a bacterial strain mixture or composition comprising an Anaerostipes (e.g., Anaerostipes rhamnosivorans) bacterial strain, may have anti-and/or pro-inflammatory activity. For example, in some embodiments, an Anaerostipes bacterial strain (or bacterial strain mixture or composition comprising the Anaerostipes bacterial strain), increases, or is capable of increasing, production of at least one pro-inflammatory gene product, e.g., a pro-inflammatory cytokine or chemokine, in a cell, tissue, or subject. Exemplary pro-inflammatory gene products include IL-1-β, IL-4, IL-5, IL-6, IL-8, IL-12 IL-13, IL-17, IL-21, IL-22, IL-23, IL-27, IFN-y, TNF-α, TRAIL, CCL-2, CCL-3, CCL-5, CCL-20, CXCL-5, CXCL-10, CXCL-12, and CXCL-13. For example, in some embodiments, an Anaerostipes bacterial strain (or bacterial strain mixture or composition comprising the Anaerostipes bacterial strain), increases production of IL-1-β, IL-12, and TNF-α in a cell, tissue, or subject. In some embodiments, the increased production of IL-1-β, IL-12, and/or TNF-α occurs in a human cell, e.g., a THP-1 macrophage, monocyte, PBMC or moDC. For example, contacting a human cell, e.g., a THP-1 macrophage, monocyte, PBMC or moDC, with the Anaerostipes bacterial strain (or bacterial strain mixture or composition comprising the Anaerostipes bacterial strain), e.g., by culturing the human cell with the Anaerostipes bacterial strain (or bacterial strain mixture or composition comprising the Anaerostipes bacterial strain) increases production of IL-1-β, IL-12, and/or TNF-α in the cell by at least about 10%, at least about 20%, at least about 30%, at least about 40%, at least about 50%, at least about 75%, at least about 100%, at least about 200%, at least about 300%, at least about 400%, at least about 500%, at least about 750%, at least about 1000%, from about 10% to about 20%, from about 10% to about 50%, from about 10% to about 100%, from about 10% to about 200%, from about 10% to about 500%, from about 10% to about 1000%, from about 20% to about 50%, from about 20% to about 100%, from about 20% to about 200%, from about 20% to about 500%, from about 20% to about 1000%, from about 50% to about 100%, from about 50% to about 200%, from about 50% to about 500%, from about 50% to about 1000%, from about 100% to about 200%, from about 100% to about 500%, from about 100% to about 1000%, from about 200% to about 500%, from about 200% to about 1000%, or from about 500% to about 1000%, relative to a cell (e.g., of the same cell type) that was not contacted, e.g., cultured, with the Anaerostipes bacterial strain (or bacterial strain mixture or composition comprising the Anaerostipes bacterial strain). In some embodiments, the contacting of the human cell with the Anaerostipes bacterial strain (or bacterial strain mixture or composition comprising the Anaerostipes bacterial strain) occurs in vitro. In other embodiments, the contacting of the human cell with the Anaerostipes bacterial strain (or bacterial strain mixture or composition comprising the Anaerostipes bacterial strain) occurs in vivo.

[0068] In other embodiments, an Anaerostipes bacterial strain (or bacterial strain mixture or composition comprising the Anaerostipes bacterial strain), reduces or attenuates, or is capable of reducing or attenuating, production of at least one pro-inflammatory gene, e.g., a pro-inflammatory cytokine or chemokine, in a cell, tissue, or subject. In some embodiments, the bacterial strain reduces or attenuates, or is capable of reducing or attenuating, production of at least one pro-inflammatory gene, e.g., a pro-inflammatory cytokine or chemokine, in a cell, tissue, or subject, for example, in the presence of a pro-inflammatory stimulus. Such pro-inflammatory cytokine or chemokine includes IL-113, IL-4, IL-5, IL-6, IL-8, IL-12, IL-13, IL-17, IL-21, IL-22, IL-23, IL-27, IFN, CCL-2, CCL-3, CCL-5, CCL-20, CXCL-5, CXCL-10, CXCL-12, CXCL-13, IFN-y, KC/GRO (keratinocyte chemoattractant (KC) chemokines CXCL1/2, mouse homologues of human growth-regulated oncogenes (GRO)) and TNF-α. For example, in some embodiments, the bacterial strain of Anaerostipes rhamnosivorans reduces or attenuates, or is capable of reducing or attenuating, production of IL-4 and/or KC/GRO in a cell, tissue, or subject. In some embodiments, the reduced or attenuated production of an anti-inflammatory gene product, e.g., IL-4 and/or KC/GRO, occurs in a human cell, e.g., a THP-1 macrophage or monocyte, moDC or a PBMC. For example, contacting a human cell, e.g., a THP-1 macrophage or PBMC, with Anaerostipes rhamnosivorans, e.g., by co-culturing the human cell with Anaerostipes rhamnosivorans, reduces or attenuates production of IL-4 and/or KC/GRO in the cell by at least about 10%, at least about 20%, at least about 30%, at least about 40%, at least about 50%, at least about 75%, from about 10% to about 20%, from about 10% to about 50%, from about 10% to about 100%, from about 20% to about 50%, from about 20% to about 100%, or from about 50% to about 100%, relative to a cell (e.g., of the same cell type) that was not contacted, e.g., cultured with Anaerostipes rhamnosivorans. In some embodiments, the contacting of the human cell with Anaerostipes rhamnosivorans occurs in vitro. In other embodiments, the contacting of the human cell with Anaerostipes rhamnosivorans occurs in vivo.

[0069] A contemplated Anaerostipes (e.g., Anaerostipes rhamnosivorans) bacterial strain, or a bacterial strain mixture or composition comprising an Anaerostipes (e.g., Anaerostipes rhamnosivorans)bacterial strain, may (i) reduce or prevent disruption to, or increase, or be capable of reducing or preventing disruption to, or increasing, the integrity of an epithelial barrier (e.g., an epithelial cell monolayer); and/or (ii) increase, or be capable of increasing, production of at least one pro-barrier integrity gene (e.g., ZO-1) in a cell, tissue, or subject. In some embodiments, the epithelial barrier is an intestinal barrier, e.g., an intestinal mucosal barrier. The intestinal epithelium is organized in a single layer of 20 μm, and includes 5 different cell types: enterocytes, endocrine cells, M cells, goblet (mucous) cells and Paneth cells. The enterocytes are the most represented cell type, acting as a physical barrier, inhibiting the translocation of luminal contents in the inner tissues. They are connected by intercellular junctions, characterized by transmembrane proteins that interact with near cells and with intracellular proteins associated with the cytoskeleton. Contemplated bacterial strains, bacterial strain mixtures, or compositions may be characterized by an effect on the integrity of an epithelial barrier, e.g., a HT29MTX-E12 cell monolayer or a Caco-2 monolayer, or any intestinal epithelial cell or cell line monolayer. In certain embodiments, contemplated bacterial strains, bacterial strain mixtures, or compositions may be characterized by an effect on barrier integrity of a human epithelial cell monolayer, e.g., a HT29MTX-E12 cell monolayer or a Caco-2 monolayer, treated with TNF-α. Barrier integrity of a HT29MTX-E12 cell monolayer treated with TNF-α may, for example, be assayed as follows. HT29MTX-E12 cells are seeded into a transwell plate system for 18-21 days to form polarized monolayers as described previously (Hall et al., Journal of Pediatric Surgery 48:353-358 (2013)). A bacterial strain, bacterial strain mixture, or composition is added to the apical layer of the transwell followed by the addition of TNF-α to the basal layer of the transwell, thus modeling an inflamed gut. The monolayer integrity is assessed by measuring the trans-epithelial electrical resistance (TEER) across the cell barrier at 0 and 24 hours after TNF-α addition. Barrier integrity may also be assayed as described in Pontier et al., J. Pharm. Sci., 90(10): 1608-19 (2001).

[0070] For example, in certain embodiments, an Anaerostipes (e.g., Anaerostipes rhamnosivorans) bacterial strain provided herein, or a bacterial strain mixture or composition comprising an Anaerostipes (e.g., Anaerostipes rhamnosivorans) bacterial strain provided herein, reduces or prevents disruption to, or increases, or is capable of reducing or preventing disruption to, or increasing, barrier integrity of a mucosal epithelium. For example, an Anaerostipes bacterial strain (or bacterial strain mixture or composition comprising the Anaerostipes bacterial strain) may reduce or prevent disruption of, or increase, barrier integrity of a HT29MTX-E12 cell monolayer, e.g., a HT29MTX-E12 cell monolayer treated with TNF-α. For example, incubation of a contemplated Anaerostipes species strain (or bacterial strain mixture or composition comprising the Anaerostipes bacterial strain) with a HT29MTX-E12 cell monolayer, e.g., a HT29MTX-E12 cell monolayer treated with TNF-α, may reduce or prevent disruption of, or increase, barrier integrity, e.g., as measured by trans-epithelial electrical resistance (TEER), by at least about 10%, at least about 20%, at least about 30%, at least about 40%, at least about 50%, at least about 60%, at least about 70%, at least about 80%, at least about 90%, at least about 100%, from about 20% to about 100%, from about 40% to about 100%, from about 60% to about 100%, from about 80% to about 100%, from about 20% to about 80%, from about 40% to about 80%, from about 60% to about 80%, from about 20% to about 60%, from about 40% to about 60%, or from about 20% to about 40%, relative to a HT29MTX-E12 cell monolayer that was not incubated with the Anaerostipes bacterial strain (or bacterial strain mixture or composition comprising the Anaerostipes bacterial strain).

[0071] Also provided herein are strains of the species Faecalibacterium prausnitzii, for example, a strain referred to herein as Faecalibacterium prausnitzii P162-C10a, and compositions, for example, pharmaceutical compositions, comprising such strains. A bacterial strain of the species Faecalibacterium prausnitzii provided herein includes strains comprising a 16s rRNA gene sequence having a certain % identity to SEQ ID NO: 53. In some embodiments, the bacterial strain comprises a 16s rRNA gene sequence with at least about 98.00%, about 98.05%, about 98.1%, about 98.15%, about 98.2%, about 98.25%, about 98.3%, about 98.35%, about 98.4%, about 98.45%, about 98.5%, about 98.55%, about 98.6%, about 98.65%, about 98.7%, about 98.75%, about 98.80%, about 98.85%, about 99%, about 99.1%, about 99.2%, about 99.3%, about 99.4%, about 99.5%, about 99.6%, about 99.7%, about 99.8%, or about 99.9% identity to the polynucleotide sequence of SEQ ID NO:

[0072] 53. In a particular embodiment, the bacterial strain comprises a 16s rRNA gene sequence identical to SEQ ID NO: 53. In some embodiments, the sequence identity referred to above is across at least about 70% of SEQ ID NO: 53. In other embodiments, the sequence identity referred to above is across at least about 71%, 72%, 73%, 74%, 75%, 76%, 77%, 78%, 79%, 80%, 81%, 82%, 83%, 84%, 85%, 86%, 87%, 88%, 89%, 90%, 91%, 92%, 93%, 94%, 95%, 96%, 97%, 98%, 99%, or 100% of SEQ ID NO: 53.

[0073] In a particular embodiment, a bacterial strain of Faecalibacterium prausnitzii, provided herein is Faecalibacterium prausnitzii P162-C10a. A deposit of Faecalibacterium prausnitzii P162-Cl0a was made to DSMZ (Deutsche Sammlung von Mikroorganismen and Zellkulturen GmbH, InhoffenstraBe 7B, 38124 Brunswick, Germany) under the Budapest

[0074] Treaty on the International Recognition of the Deposit of Microorganisms for the Purposes of Patent Procedure on March 6, 2020. This deposit was accorded accession number DSM 33533. The 16S rDNA sequence of Faecalibacterium prausnitzii P162-C10a is provided as SEQ ID NO: 53.

[0075] Additional bacterial strains of the species Faecalibacterium prausnitzii provided herein include Faecalibacterium prausnitzii strains having a DNA-DNA hybridization (DDH) value of equal to or greater than about 70% with Faecalibacterium prausnitzii P162-C10a. In particular embodiments, the Faecalibacterium prausnitzii strain is one having greater than about 70%, about 75%, about 80%, about 85%, about 90%, about 95%, about 98%, or about 99% DNA-DNA hybridization with Faecalibacterium prausnitzii P162-C10a, or any range between any of the above values. In particular embodiments, the Faecalibacterium prausnitzii strain is one having a DDH or dDDH value of equal to or greater than about 70% with Faecalibacterium prausnitzii P162-C10a. In some embodiments, the DDH or dDDH value is greater than about 75%, about 80%, about 85%, about 90%, about 95%, about 98%, or about 99% with Faecalibacterium prausnitzii P162-C10a, or any range between any of the above values.

[0076] Additional bacterial strains of the species Faecalibacterium prausnitzii provided herein include Faecalibacterium prausnitzii strains having equal to or greater than 95% average nucleotide identity (ANI) with Faecalibacterium prausnitzii P162-C10a. In some embodiments, the ANI is equal to or greater than about 95%, about 95.5%, about 96%, about 96.5%, about 97%, about 97.5%, about 98%, about 98.5%, about 99%, about 99.5%, or 100% with Faecalibacterium prausnitzii P162-C10a, or any range between any of the above values.

[0077] Additional bacterial strains of the species Faecalibacterium prausnitzii provided herein include Faecalibacterium prausnitzii strains having equal to or greater than 60% alignment fraction (AF) with Faecalibacterium prausnitzii P162-C10a. In some embodiments, the AF is equal to or greater than about 65%, about 70%, about 75%, about 80%, about 85%, about 90%, about 95%, or 100% with Faecalibacterium prausnitzii P162-C10a, or any range between any of the above values. In some embodiments, the AF is computed by dividing the sum of the lengths of all BBH genes by the sum of the length of all the genes in Genome A. This computation is performed separately in both directions: from Genome A to genome B and from Genome B to Genome A.

[0078] In a particular embodiment, an Faecalibacterium prausnitzii strain comprises a genome having equal to or greater than about 95% ANI and equal to or greater than 60% AF with the genome of Faecalibacterium prausnitzii P162-C10a. In another particular embodiment, an Faecalibacterium prausnitzii strain comprises a genome having equal to or greater than about 96.5% ANI and equal to or greater than 60% AF with the genome of Faecalibacterium prausnitzii P162-C10a.

[0079] The present disclosure encompasses derivatives of the disclosed bacterial strains. The term “derivative” includes daughter strains (progeny) or stains cultured (sub-cloned) from the original but modified in some way (including at the genetic level), without negatively altering a biological activity of the strain.

[0080] II. Compositions Comprising an Anaerostipes Strain

[0081] In another aspect, provided herein are compositions, for example pharmaceutical compositions, comprising a bacterial strain of Anaerostipes (e.g., Anaerostipes rhamnosivorans). In some embodiments, the compositions comprise one or more bacterial strains, including one or more bacterial strains of Anaerostipes. In some embodiments, a composition provided herein comprises a bacterial strain of Anaerostipes rhamnosivorans and does not comprise any other strains or species of bacteria. In other embodiments, the composition comprises a bacterial strain of Anaerostipes rhamnosivorans and at least one or more additional strains or species of bacteria. In some embodiments, the at least one additional strain or species of bacteria in the composition is a bacterial strain of the genus Anaerostipes. For example, the composition may comprise an additional strain of Anaerostipes rhamnosivorans and/or one or more strains of an Anaerostipes species that is not Anaerostipes rhamnosivorans. Exemplary additional Anaerostipes species include

[0082] Anaerostipes butyraticus, Anaerostipes caccae, and Anaerostipes hadrus. In other embodiments, the composition may comprise Anaerostipes rhamnosivorans and one or more non Anaerostipes bacterial species. In yet other embodiments, the composition may comprise an Anaerostipes strain selected from Anaerostipes butyraticus, Anaerostipes caccae, and Anaerostipes hadrus, and one or more non Anaerostipes bacterial species.

[0083] In some embodiments, the one or more non Anaerostipes bacterial species includes a member of the genus Faecalibacterium, for example, Faecalibacterium prausnitzii. Exemplary strains of Faecalibacterium prausnitzii for use in combination with an Anaerostipes strain described herein includes the strain Faecalibacterium prausnitzii P162-C10a, deposited under accession number DSM 33533. The 16S rDNA sequence of Faecalibacterium prausnitzii P162-Cl0a is provided as SEQ ID NO: 53. Other strains of Faecalibacterium prausnitzii useful for combining with Anaerostipes rhamnosivorans P127-B2a in a composition provided herein include strains comprising a 16S rDNA sequence having at least 98% identity to SEQ ID NO: 53. Additional useful strains include Faecalibacterium prausnitzii strain ATCC 27768.

[0084] In some embodiments, the one or more non-Anaerostipes bacterial species includes a member of the genus Christensenella, for example, Christensenella sp. P152-H6d (Christensenella californii). Christensenella sp. P152-H6d is described in U.S. patent application Ser. No. 17/006,430, filed Aug. 28, 2020. A deposit of Christensenella sp. P152-H6d, strain P152-H6d was made to DSMZ (Deutsche Sammlung von Mikroorganismen and Zellkulturen GmbH, InhoffenstraBe 7B, 38124 Brunswick, Germany) under the Budapest Treaty on the International Recognition of the Deposit of Microorganisms for the Purposes of Patent Procedure on Aug. 12, 2019. This deposit was accorded accession number DSM 33237. The 16s rRNA gene sequence of Christensenella sp. P152-H6d, strain P152-H6d is provided herein as SEQ ID NO: 54. In some embodiments, the Christensenella bacterial strain comprises a 16s rRNA gene sequence with at least about 98.00%, about 98.05%, about 98.1%, about 98.15%, about 98.2%, about 98.25%, about 98.3%, about 98.35%, about 98.4%, about 98.45%, about 98.5%, about 98.55%, about 98.6%, about 98.65%, about 98.7%, about 98.75%, about 98.80%, about 98.85%, about 99%, about 99.1%, about 99.2%, about 99.3%, about 99.4%, about 99.5%, about 99.6%, about 99.7%, about 99.8%, or about 99.9% identity to the polynucleotide sequence of SEQ ID NO: 54. In a particular embodiment, the bacterial strain comprises a 16s rRNA gene sequence identical to SEQ ID

[0085] NO: 54. In some embodiments, the sequence identity referred to above is across at least about 70% of SEQ ID NO: 54. In other embodiments, the sequence identity referred to above is across at least about 71%, 72%, 73%, 74%, 75%, 76%, 77%, 78%, 79%, 80%, 81%, 82%, 83%, 84%, 85%, 86%, 87%, 88%, 89%, 90%, 91%, 92%, 93%, 94%, 95%, 96%, 97%, 98%, 99%, or 100% of SEQ ID NO: 54.

[0086] Additional bacterial strains of the species Christensenella californii include Christensenella californii strains having a DNA-DNA hybridization (DDH) value of equal to or greater than about 70% with Christensenella sp. P152-H6d. In particular embodiments, the Christensenella californii strain is one having greater than about 70%, about 75%, about 80%, about 85%, about 90%, about 95%, about 98%, or about 99% DNA-DNA hybridization with Christensenella sp. P152-H6d, or any range between any of the above values. In particular embodiments, the Christensenella californii strain is one having a DDH or dDDH value of equal to or greater than about 70% with Christensenella sp. P152-H6d. In some embodiments, the DDH or dDDH value is greater than about 75%, about 80%, about 85%, about 90%, about 95%, about 98%, or about 99% with Christensenella sp. P152-H6d, or any range between any of the above values.

[0087] Additional bacterial strains of the species Christensenella californii include Christensenella californii strains having equal to or greater than 95% average nucleotide identity (ANI) with Christensenella sp. P152-H6d. In some embodiments, the ANI is equal to or greater than about 95%, about 95.5%, about 96%, about 96.5%, about 97%, about 97.5%, about 98%, about 98.5%, about 99%, about 99.5%, or 100% with Christensenella sp. P152-H6d, or any range between any of the above values.

[0088] Additional bacterial strains of the species Christensenella californii include Christensenella californii strains having equal to or greater than 60% alignment fraction (AF) with Christensenella sp. P152-H6d. In some embodiments, the AF is equal to or greater than about 65%, about 70%, about 75%, about 80%, about 85%, about 90%, about 95%, or 100% with Christensenella sp. P152-H6d, or any range between any of the above values. In some embodiments, the AF is computed by dividing the sum of the lengths of all BBH genes by the sum of the length of all the genes in Genome A. This computation is performed separately in both directions: from Genome A to genome B and from Genome B to Genome A.

[0089] In a particular embodiment, a Christensenella californii strain comprises a genome having equal to or greater than about 95% ANI and equal to or greater than 60% AF with the genome of Christensenella sp. P152-H6d. In another particular embodiment, a Christensenella californii strain comprises a genome having equal to or greater than about 96.5% ANI and equal to or greater than 60% AF with the genome of Christensenella sp. P152-H6d.

[0090] In some embodiments, the one or more non-Anaerostipes bacterial species includes (i) a member of the genus Faecalibacterium, for example, Faecalibacterium prausnitzii, and (ii) a member of the genus Christensenella, for example, Christensenella sp. P152-H6d (Christensenella californii).

[0091] A contemplated composition or bacterial strain mixture may, e.g., comprise or consist essentially of 2, 3, 4, 5, 6, 7, 8, 9, 10, or more than 10 bacterial strains. In some embodiments, one or more strains of the composition or bacterial strain mixture are vegetative. In some embodiments, all the strains of the composition or bacterial strain mixture are vegetative. For example, in certain embodiments, a disclosed composition or bacterial strain mixture comprises or consists essentially of 2 to 10, 2 to 9, 2 to 8, 2 to 7, 2 to 6, 2 to 5, 2 to 4, or 2 to 3 bacterial strains; or, for example, may comprise or consist essentially of 3 to 10, 3 to 9, 3 to 8, 3 to 7, 3 to 6, 3 to 5 or 3 to 4 bacterial strains; or, for example, may comprise or consist essentially of 4 to 10, 4 to 9, 4 to 8, 4 to 7, 4 to 6 or 4 to 5 bacterial strains; or, for example, may comprise or consist essentially of 5 to 10, 5 to 9, 5 to 8, 5 to 7, 5 to 6, 6 to 10, 6 to 9, 6 to 8, 6 to 7, 7 to 10, 7 to 9, or 7 to 8 bacterial strains; or, for example, may comprise or consist essentially of 8 to 10 or 8 to 9 bacterial strains. In some embodiments, a disclosed composition or bacterial strain mixture comprises or consists essentially of 2 or 3 bacterial strains.

[0092] A composition, e.g., a pharmaceutical unit provided herein, may include each bacterial strain at any appropriate ratio, measured either by total mass or by colony forming units of the bacteria. For example, a disclosed pharmaceutical composition or unit may include two strains at a ratio of 0.1:1, 0.2:1, 0.25:1, 0.5:1, 0.75:1, 1:1, 2:1, 3:1, 4:1, 5:1, or 10:1, either by total mass or by colony forming units of the bacteria. For example, a disclosed pharmaceutical composition or unit may include three strains at a ratio of 1:1:1, 1:1:2, 1:1:4, 1:2:1, 1:2:2, 1:2:4, 1:4:1, 1:4:2, 1:4:4, 2:1:1, 2:1:2, 2:1:4, 2:2:1, 2:4:1, 4:1:1, 4:1:2, 4:1:4, 4:2:1, 4:4:1, either by total mass or by colony forming units of the bacteria.

[0093] In certain embodiments, the composition comprises a bacterial strain of Anaerostipes rhamnosivorans, and optionally, one or more additional strains or species of bacteria, wherein the composition: (i) increases production of one or more anti-inflammatory gene products, for example CCL-18, IL-1Ra, IL-4, IL-6, IL-10, IL-11, IL-13, and TGF-β, in a human cell, e.g., a THP-1 macrophage or monocyte or a PBMC; and/or (ii) reduces or prevents disruption of, or increases, or is capable of reducing or preventing disruption of, or increasing, barrier integrity of an epithelial cell monolayer, e.g., a HT29MTX-E12 cell monolayer treated with TNF-α.

[0094] Excipients

[0095] A bacterial strain of Anaerostipes disclosed herein may be combined with pharmaceutically acceptable excipients to form a pharmaceutical composition, which can be administered to a patient by any means known in the art. As used herein, the term “pharmaceutically acceptable excipient” is understood to mean one or more of a buffer, carrier, or excipient suitable for administration to a subject, for example, a human subject, without excessive toxicity, irritation, allergic response, or other problem or complication, commensurate with a reasonable benefit/risk ratio. The excipient (s) should be “acceptable” in the sense of being compatible with the other ingredients of the formulations and not deleterious to the recipient.

[0096] Pharmaceutically acceptable excipients include buffers, solvents, dispersion media, coatings, isotonic and absorption delaying agents, and the like, that are compatible with pharmaceutical administration. Pharmaceutically acceptable excipients also include fillers, binders, disintegrants, glidants, lubricants, and any combination(s) thereof. For example, a contemplated composition may comprise a pharmaceutical excipient selected from the group consisting of cellulose, polyvinyl pyrrolidone, silicon dioxide, stearyl fumarate or a pharmaceutically acceptable salt thereof, lactose, starch, glucose, methyl cellulose, ethyl cellulose, hydroxypropyl methyl cellulose, magnesium stearate, mannitol, sorbitol, and any combination(s) thereof. For further examples of excipients, carriers, stabilizers and adjuvants, see, e.g., Handbook of Pharmaceutical Excipients, 8^{th} Ed., Edited by P. J. Sheskey, W. G. Cook, and C.G. Cable, Pharmaceutical Press, London, UK [2017]. The use of such media and agents for pharmaceutically active substances is known in the art.

[0097] Stabilized Bacterial Compositions

[0098] In certain embodiments, bacterial strains of Anaerostipes described herein may be used in any composition in stabilized form, including, for example, in a lyophilized state (with optionally one or more appropriate cryoprotectants), frozen (e.g., in a standard or super-cooled freezer), spray dried, and/or freeze dried. Stabilized bacteria (e.g. via lyophilization, freezing, spray drying or freeze drying), and in particular, stabilized anaerobic bacteria, may, in certain embodiments, possess advantageous properties over bacteria in culture with respect to administration, e.g., administration of a pharmaceutical composition provided herein. For example, lyophilizing bacterial strains involves a freeze-drying process that removes water from the bacterial cells. The resulting lyophilized bacterial strains may, in certain embodiments, have enhanced stability as compared to bacterial cultures, and thus may be stored for longer periods of time (i.e. extending shelf-life). In addition, in certain embodiments, in stabilized form, dehydrated bacterial cells do not grow or reproduce, but remain viable and may grow and reproduce when rehydrated. In certain embodiments, viability of stabilized anaerobic Anaerostipes bacteria is maintained even when exposed to oxygen, thus facilitating their formulation (for example, into oral dosage forms) and use as a live biotherapeutic product that retains biological activity. Thus, in particular embodiments, the bacterial strains of Anaerostipes described herein are stabilized (e.g. via lyophilization, freezing, freeze-drying or spray-drying), live and viable, and retain some, most, or all of its chemical stability, and/or biological activity upon storage. Stability can be measured at a selected temperature and humidity conditions for a selected time period. Trend analysis can be used to estimate an expected shelf life before a material has actually been in storage for that time period. For live bacteria, for example, stability may be measured as the time it takes to lose 1 log of cfu/g dry formulation under predefined conditions of temperature and/or humidity. Alternatively, stability may be defined in terms of biological function as the time required to measure a decrease in a particular biological function per unit of dry formulation.

[0099] In certain embodiments, a pharmaceutical composition or pharmaceutical unit comprising Anaerostipes rhamnosivorans loses at most 0.5 log cfus, 1 log cfus, 1.5 log cfus, 2 log cfus, 2.5 log cfus, 3 log cfus, 3.5 log cfus, 4 log cfus, 4.5 log cfus, 5 log cfus, 5.5 log cfus, 6 log cfus, 6.5 log cfus, 7 log cfus, 7.5 log cfus, 8 log cfus, 8.5 log cfus, 9 log cfus, 9,5 log cfus, or 10 log cfus (total, or per gram of dry formulation) of each bacterial strain present in the pharmaceutical composition or unit upon storage for 1 month, 2 months, 3 months, 4 months, 5 months, 6 months, 7 months, 8 months, 9 months, 10 months 11, months, 12 months, 1 year, 1.5 years, 2 years, 2.5 years, 3 years, 3.5 years, 4 years, 4.5 years, or 5 years at 4° C. or -20° C. For example, the pharmaceutical composition or pharmaceutical unit may lose at most 3 log cfus of each bacterial strain present in the pharmaceutical composition or unit upon storage for 6 months, 1 year, or 2 years at 4° C.

[0100] An Anaerostipes bacteria disclosed herein may be combined with one or more cryoprotectants. Exemplary cryoprotectants include fructooligosaccharides (e.g., Raftilose®, fructooligosaccharide derived from inulin), trehalose, maltodextrin, sodium alginate, proline, glutamic acid, glycine (e.g., glycine betaine), mono-, di-, or polysaccharides (such as glucose, sucrose, maltose, lactose), polyols (such as mannitol, sorbitol, or glycerol), dextran, DMSO, methylcellulose, propylene glycol, polyvinylpyrrolidone, non-ionic surfactants such as Tween 80, and/or any combinations thereof.

[0101] In certain embodiments, the cryoprotectant comprises Raftilose® (fructooligosaccharide derived from inulin), maltodextrin, alginate, trehalose, and sucrose, or any combinations thereof. In some embodiments, a pharmaceutical composition comprising a bacterial strain of Anaerostipes further comprises sucrose as a cryoprotectant. In some embodiments, a pharmaceutical composition comprising a bacterial strain of Anaerostipes further comprises Raftilose® (fructooligosaccharide derived from inulin), maltodextrin, alginate, trehalose, and sucrose as cryoprotectants. In some embodiments, a pharmaceutical composition comprising a bacterial strain of Anaerostipes further comprises Raftilose® (fructooligosaccharide derived from inulin), maltodextrin, alginate, and trehalose as cryoprotectants.

[0102] In some embodiments, a lyophilized powder form of a bacterial strain, as contemplated herein, includes about 10% to about 80% (by weight) of one or more bacterial strains (e.g., one bacterial strain) and about 20% to about 90% (by weight) of a cryoprotectant and/or excipient, such as a cryoprotectant and/or excipient selected from the group consisting of Raftilose° (fructooligosaccharide derived from inulin), maltodextrin, sodium alginate, trehalose, sucrose, water, and/or combinations thereof. For example, 5 mg of contemplated lyophilized powder form of a bacterial strain may include about 0.5 mg to about 1.5 mg of the bacterial strain, about 1.5 mg to about 2.5 mg of the bacterial strain, about 2.5 to about 3.5 mg of the bacterial strain, or about 3.5 mg to about 4.5 mg of the bacterial strain. It can be appreciated that each lyophilized powder form of bacterial strain that may form a component of a disclosed composition may each have different excipients and/or amounts of excipients, as well as a discrete bacterial strain.

[0103] A pharmaceutical composition should be formulated to be compatible with its intended route of administration. The bacterial compositions disclosed herein can be prepared by any suitable method and can be formulated into a variety of forms and administered by a number of different means. The compositions can be administered orally, rectally, or enterally, in formulations containing conventionally acceptable carriers, adjuvants, and vehicles as desired. As used herein, “rectal administration” is understood to include administration by enema, suppository, or colonoscopy. A disclosed pharmaceutical composition may, e.g., be suitable for bolus administration or bolus release. In an exemplary embodiment, a disclosed bacterial composition is administered orally.

[0104] Solid dosage forms for oral administration include capsules, tablets, caplets, pills, troches, lozenges, powders, and granules. A capsule typically comprises a core material comprising a bacterial composition and a shell wall that encapsulates the core material. In some embodiments the core material comprises at least one of a solid, a liquid, and an emulsion. In some embodiments the shell wall material comprises at least one of a soft gelatin, a hard gelatin, and a polymer. Suitable polymers include, but are not limited to:

[0105] cellulosic polymers such as hydroxypropyl cellulose, hydroxyethyl cellulose, hydroxypropyl methyl cellulose (HPMC), methyl cellulose, ethyl cellulose, cellulose acetate, cellulose acetate phthalate, cellulose acetate trimellitate, hydroxypropylmethyl cellulose phthalate, hydroxypropylmethyl cellulose succinate and carboxymethylcellulose sodium; acrylic acid polymers and copolymers, such as those formed from acrylic acid, methacrylic acid, methyl acrylate, ammonio methylacrylate, ethyl acrylate, methyl methacrylate and/or ethyl methacrylate (e.g., those copolymers sold under the trade name “Eudragit®”); vinyl polymers and copolymers such as polyvinyl pyrrolidone, polyvinyl acetate, polyvinylacetate phthalate, vinylacetate crotonic acid copolymer, and ethylene-vinyl acetate copolymers; and shellac (purified lac). In some embodiments at least one polymer functions as a taste-masking agent.

[0106] Tablets, pills, and the like can be compressed, multiply compressed, multiply layered, and/or coated. A contemplated coating can be single or multiple. In one embodiment, a contemplated coating material comprises at least one of a saccharide, a polysaccharide, and glycoproteins extracted from at least one of a plant, a fungus, and a microbe. Non-limiting examples include corn starch, wheat starch, potato starch, tapioca starch, cellulose, hemicellulose, dextrans, maltodextrin, cyclodextrins, inulins, pectin, mannans, gum arabic, locust bean gum, mesquite gum, guar gum, gum karaya, gum ghatti, tragacanth gum, funori, carrageenans, agar, alginates, chitosans, or gellan gum. In some embodiments a contemplated coating material comprises a protein. In some embodiments a contemplated coating material comprises at least one of a fat and an oil. In some embodiments the at least one of a fat and an oil is high temperature melting. In some embodiments the at least one of a fat and an oil is hydrogenated or partially hydrogenated. In some embodiments the at least one of a fat and an oil is derived from a plant. In some embodiments the at least one of a fat and an oil comprises at least one of glycerides, free fatty acids, and fatty acid esters. In some embodiments a contemplated coating material comprises at least one edible wax. A contemplated edible wax can be derived from animals, insects, or plants. Non-limiting examples include beeswax, lanolin, bayberry wax, carnauba wax, and rice bran wax. Tablets and pills can additionally be prepared with enteric or reverse-enteric coatings.

[0107] Alternatively, powders or granules embodying a bacterial composition disclosed herein can be incorporated into a food product. In some embodiments a contemplated food product is a drink for oral administration. Non-limiting examples of a suitable drink include water, fruit juice, a fruit drink, an artificially flavored drink, an artificially sweetened drink, a carbonated beverage, a sports drink, a liquid diary product, a shake, an alcoholic beverage, a caffeinated beverage, infant formula and so forth. Other suitable means for oral administration include aqueous and nonaqueous solutions, emulsions, suspensions and solutions and/or suspensions reconstituted from non-effervescent granules, containing at least one of suitable solvents, preservatives, emulsifying agents, suspending agents, diluents, sweeteners, coloring agents, and flavoring agents.

[0108] In certain embodiments, a pharmaceutical composition provided herein includes: (a) an Anaerostipes strain; and (b) a filler (e.g., microcrystalline cellulose, lactose, sucrose, mannitol, or dicalcium phosphate dihydrate), a disintegrant (e.g., polyvinyl pyrrolidone, sodium starch glycolate, starch, or carboxymethyl-cellulose), a flow-aid/glidant (e.g., talc or silica derivatives (e.g., colloidal silica such as Cab-O-Sil or Aerosil)), and a lubricant (e.g., sodium stearyl fumarate, magnesium stearate, calcium stearate, stearic acid, stearic acid salt, talc, liquid paraffin, propylene glycol (PG), PEG 6000, or magnesium/sodium lauryl sulfate).

[0109] In certain embodiments, a contemplated pharmaceutical composition includes: (a) an

[0110] Anaerostipes strain; and (b) a filler (microcrystalline cellulose), a disintegrant (polyvinyl pyrrolidone), a flow-aid/glidant (silicon dioxide), and a lubricant (sodium stearyl fumarate).

[0111] In certain embodiments, a contemplated pharmaceutical composition is formulated as a capsule. In certain embodiments, the capsule is a hydroxypropyl methylcellulose (HPMC) capsule. In certain embodiments, the capsule includes a banding polymer (e.g., hydroxypropyl methylcellulose (HPMC)), and a banding solvent (e.g., water or ethanol). In certain embodiments, the capsule includes two banding solvents, water and ethanol. In certain embodiments the capsule is coated with a reverse enteric coating polymer (e.g., amino methacrylate copolymer), and comprises a surfactant (e.g., sodium lauryl sulfate), a flow-aid/glidant (e.g., silicon dioxide), a lubricant (e.g., stearic acid), an anti-tacking agent (e.g., talc), and a coating solvent (e.g., water). In certain embodiments the capsule is coated with an enteric coating polymer (e.g., poly (methacrylic acid-co-methyl methacrylate)), and further includes a plasticizer (e.g., triethyl citrate), an anti-tacking agent (e.g., talc), a pH adjuster (e.g., ammonia solution), and a coating solvent (e.g., purified water and isopropyl alcohol).

[0112] In certain embodiments, a contemplated capsule is a capsule-in-capsule dosage form, which includes an inner capsule and an outer capsule. In certain embodiments, the inner capsule includes one or more lyophilized bacterial strains, a filler (e.g., microcrystalline cellulose, lactose, sucrose, mannitol, dicalcium phosphate dihydrate, or starch), a disintegrant (e.g., polyvinyl pyrrolidone, sodium starch glycolate, or carboxymethyl-cellulose), a flow-aid/glidant (e.g., silicon dioxide, talc, or colloidal silica), and a lubricant (e.g., sodium stearyl fumarate, magnesium stearate, calcium stearate, stearic acid, stearic acid salt, talc, liquid paraffin, propylene glycol (PG), PEG 6000, or magnesium/sodium lauryl sulfate). In certain embodiments, the outer capsule includes one or more lyophilized bacterial strains, a filler (e.g., microcrystalline cellulose, lactose, sucrose, mannitol, dicalcium phosphate dihydrate, or starch). a disintegrant (e.g., polyvinyl pyrrolidone, sodium starch glycolate, or carboxymethyl-cellulose), a flow-aid/glidant (e.g., silicon dioxide, talc, or colloidal silica), and a lubricant (e.g., sodium stearyl fumarate, magnesium stearate, calcium stearate, stearic acid, stearic acid salt, talc liquid paraffin, propylene glycol (PG), PEG 6000, or magnesium/sodium lauryl sulfate).

[0113] In certain embodiments, a contemplated capsule is a capsule-in-capsule dosage form, which includes an inner capsule and an outer capsule. In certain embodiments, the inner capsule includes one or more lyophilized bacterial strains, a filler (microcrystalline cellulose), a disintegrant (polyvinyl pyrrolidone), a flow-aid/glidant (silicon dioxide), and a lubricant (sodium stearyl fumarate). In certain embodiments, the outer capsule includes one or more lyophilized bacterial strains, a filler (microcrystalline cellulose), a disintegrant (polyvinyl pyrrolidone), a flow-aid/glidant (silicon dioxide), and a lubricant (sodium stearyl fumarate).

[0114] In certain embodiments, a disclosed pharmaceutical unit comprises a dual component capsule. For example, a dual component capsule may comprise an inner capsule, wherein the inner capsule has a reverse enteric polymeric coating, and an outer capsule encapsulating the inner capsule, wherein the outer capsule has an enteric polymeric coating. A contemplated inner and/or outer capsule may comprise a bacterial strain, a bacterial strain mixture. For example, a dual component capsule may comprise an inner capsule having an inner composition comprising a bacterial strain or bacterial strain mixture and one or more pharmaceutical excipients, wherein the inner capsule has a reverse enteric polymeric coating, and an outer capsule encapsulating the inner capsule and an outer composition comprising a bacterial strain or bacterial strain mixture and one or more pharmaceutical excipients, wherein the outer capsule has an enteric polymeric coating. A contemplated inner and/or outer composition may, e.g., comprise an Anaerostipes strain, and optionally one or more additional strains. The inner composition and the outer composition may be the same or different.

[0115] A contemplated dual component capsule may include a total of about 5 mg to about 60 mg of the inner and outer composition, e.g., a total of about 5 mg to about 50 mg of the inner and outer composition, a total of about 5 mg to about 15 mg of the inner and outer composition, a total of about 5 mg to about 25 mg of the inner and outer composition, or a total of about 25 mg to about 50 mg of the inner and outer composition. A contemplated dual component capsule may include a total of about 50 mg to about 120 mg of the inner and outer composition, e.g., a total of about 50 mg to about 75 mg of the inner and outer composition, a total of about 60 mg to about 85 mg of the inner and outer composition, a total of about 50 mg to about 95 mg of the inner and outer composition, or a total of about 25 mg to about 110 mg of the inner and outer composition.

[0116] In certain embodiments, a disclosed dual component capsule includes an inner capsule with a reverse enteric polymeric coating, and an outer capsule with an enteric polymeric coating. Each respective coating, for example, allows for biphasic release of the capsule's contents (including bacterial strains) at distinct sites along the gastrointestinal tract. For example, it has been determined that the GI tract has several regions sharply demarcated by local pH ranging from 1 to 8.2. The normal pH profile of the GI tract rises and falls between the stomach and the colon with pH ranges of 1-4 in the stomach, 5.5-6.4 in the duodenum, 6.8-8.2 in the ileum, and 5.5-6.5 in the colon. For example, while the distal ileum contains a region where the usual pH is between 6.8 and 8.2, the pH drops sharply from 8.2 to 5.5 after passage through the ileocecal valve into the cecum and ascending colon. The pH gradually rises once again to 8.0 in the progression from proximal to distal colon. Accordingly, in certain embodiments, the enteric polymeric coating of the outer capsule solubilizes in a pH of about 7 to 8, allowing for release in the ileum, and the reverse enteric polymeric coating of the inner capsule solubilizes in a pH of about 6.2 to 6.5, allowing for subsequent release in the colon. In certain embodiments, the outer capsule maintains integrity (e.g., absence of splits, cracks, or rupture of capsule shell) for about 2 hours at pH 1.2 and 37° C. In certain embodiments, the outer capsule maintains integrity (e.g., absence of splits, cracks, or rupture of capsule shell) for about 2 hours at pH 5.5 and 37° C. In certain embodiments, the outer capsule disintegrates within about 1 hour at pH 7.4 and 37° C. In certain embodiments, the inner capsule maintains integrity (e.g., absence of splits, cracks, or rupture of capsule shell) for up to 1 hour at pH 7.4 and 37° C. In certain embodiments, the inner capsule disintegrates within 2 hours at pH 6.5 and 37° C.

[0117] In certain embodiments, the inner and/or outer capsule coating is comprised of poly(dl-lactide-co-glycolide, chitosan (Chi) stabilized with PVA (poly-vinylic alcohol), a lipid, an alginate, carboxymethylethylcellulose (CMEC), cellulose acetate trimellitiate (CAT), hydroxypropylmethyl cellulose phthalate (HPMCP), hydroxypropylmethyl cellulose, ethyl cellulose, food glaze, mixtures of hydroxypropylmethyl cellulose and ethyl cellulose, polyvinyl acetate phthalate (PVAP), cellulose acetate phthalate (CAP), shellac, copolymers of methacrylic acid and ethyl acrylate, or copolymers of methacrylic acid and ethyl acrylate to which a monomer of methylacrylate has been added during polymerization. Methylmethacrylates or copolymers of methacrylic acid and methylmethacrylate are available as Eudragit° polymers (Evonik Industries, Darmstadt, Germany). For example, Eudragit® L100 and Eudragit® S100 (anionic copolymers based on methacrylic acid and methyl methacrylate) can be used, either alone or in combination. Eudragit® L100 dissolves at about pH 6 and upwards and comprises between 46.0% and 50.6% methacrylic acid units per g dry substance; Eudragit® S100 dissolves at about pH 7 and upwards and comprises between 27.6% and 30.7% methacrylic acid units per g dry substance. Another exemplary group of encapsulating polymers are the polyacrylic acids Eudragit® L and Eudragit® S which optionally may be combined with Eudragit® RL or RS (copolymers of ethyl acrylate, methyl methacrylate and a low content of methacrylic acid ester with quaternary ammonium groups). These modified acrylic acids are useful since they can be made soluble at a pH of 6 to 7.5, depending on the particular Eudragit chosen, and on the proportion of Eudragit® S to Eudragit® L, RS, and RL used in the formulation. In certain embodiments, a contemplated coating of the inner capsule is comprised of Eudragit EPO® ReadyMix. In certain embodiments, a contemplated coating of the outer capsule is comprised of Eudragit® L100 (methylacrylic acid-methyl methacrylate co-polymer (1:1)) and Eudragit® S100 (methylacrylic acid-methyl methacrylate co-polymer (1:2)). In certain embodiments, a contemplated capsule is suitable for extended or timed release. In certain embodiments, a contemplated inner and/or outer capsule coating further comprises a band/seal, e.g., hypromellose, an opacifier, e.g., titanium dioxide, a plasticizer, e.g. triethyl citrate (TEC) or an anti-tacking agent, e.g. talc.

[0118] Further exemplary capsule-in-capsule formulations are described in U.S. Pat. No. 9,907,755.

[0119] Unit Dosage Forms

[0120] Pharmaceutical compositions comprising an Anaerostipes strain disclosed herein can be presented in a unit dosage form, i.e., a pharmaceutical unit. A composition, e.g., a pharmaceutical unit provided herein, may include any appropriate amount of one or more bacterial strains, measured either by total mass or by colony forming units of the bacteria.

[0121] For example, a disclosed pharmaceutical composition or unit may include from about 10³ cfus to about 10¹² cfus, about 10⁶ cfus to about 10¹² cfus, about 10⁷ cfus to about 10¹² cfus, about 10⁸ cfus to about 10¹² cfus, about 10⁹ cfus to about 10¹² cfus, about 10¹⁰ cfus to about 10¹² cfus, about 10¹¹ cfus to about 10¹² cfus, about 10³ cfus to about 10¹¹ cfus, about 10⁶ cfus to about 10¹¹ cfus, about 10⁷ cfus to about 10¹¹ cfus, about 10⁸ cfus to about 10¹¹ cfus, about 10⁹ cfus to about 10¹¹ cfus, about 10¹⁰ cfus to about 10¹¹ cfus, about 10³ cfus to about 10¹⁰ cfus, about 10⁶ cfus to about 10¹⁰ cfus, about 10⁷ cfus to about 10¹⁰ cfus, about 10⁸ cfus to about 10¹⁰ cfus, about 10⁹ cfus to about 10¹⁰ cfus, about 10³ cfus to about 10⁹ cfus, about 10⁶ cfus to about 10⁹ cfus, about 10⁷ cfus to about 10⁹ cfus, about 10⁸ cfus to about 10⁹ cfus, about 10³ cfus to about 10⁸ cfus, about 10⁶ cfus to about 10⁸ cfus, about 10⁷ cfus to about 10⁸ cfus, about 10³ cfus to about 10⁷ cfus, about 10⁶ cfus to about 10⁷ cfus, or about 10³ cfus to about 10⁶ cfus of each bacterial strain, or may include about 10³ cfus, about 10⁶ cfus, about 10⁷ cfus, about 10⁸ cfus, about 10⁹ cfus, about 10¹⁰ cfus, about 10¹¹ cfus, or about 10¹² cfus of a bacterial strain or of each bacterial strain in the composition.

[0122] For example, a disclosed pharmaceutical composition or unit may include from about 10³ cfus to about 10¹² cfus, about 10⁶ cfus to about 10¹² cfus, about 10⁷ cfus to about 10¹² cfus, about 10⁸ cfus to about 10¹² cfus, about 10⁹ cfus to about 10¹² cfus, about 10¹⁰ cfus to about 10¹² cfus, about 10¹¹ cfus to about 10¹² cfus, about 10³ cfus to about 10¹¹ cfus, about 10⁶ cfus to about 10¹¹ cfus, about 10⁷ cfus to about 10¹¹ cfus, about 10⁸ cfus to about 10¹¹ cfus, about 10⁹ cfus to about 10¹¹ cfus, about 10¹⁰ cfus to about 10¹¹ cfus, about 10³ cfus to about 10¹⁰ cfus, about 10⁶ cfus to about 10¹⁰ cfus, about 10⁷ cfus to about 10¹⁰ cfus, about 10⁸ cfus to about 10¹⁰ cfus, about 10⁹ cfus to about 10¹⁰ cfus, about 10³ cfus to about 10⁹ cfus, about 10⁶ cfus to about 10⁹ cfus, about 10⁷ cfus to about 10⁹ cfus, about 10⁸ cfus to about 10⁹ cfus, about 10³ cfus to about 10⁸ cfus, about 10⁶ cfus to about 10⁸ cfus, about 10⁷ cfus to about 10⁸ cfus, about 10³ cfus to about 10⁷ cfus, about 10⁶ cfus to about 10⁷ cfus, or about 10³ cfus to about 10⁶ cfus of each bacterial strain, or may include about 10³ cfus, about 10⁶ cfus, about 10⁷ cfus, about 10⁸ cfus, about 10⁹ cfus, about 10¹⁰ cfus, about 10¹¹ cfus, or about 10¹² cfus of a bacterial strain in the composition.

[0123] In certain embodiments, a provided pharmaceutical unit comprises at least 1×10³ colony forming units of each bacterial strain (e.g., vegetative bacterial strain), or, at least 1 x 10⁴ colony forming units of bacterial strain (e.g., vegetative bacterial strain), or, at least 1×10⁵ colony forming units of bacterial strain (e.g., vegetative bacterial strain), or, at least 1×10⁶ colony forming units of each bacterial strain (e.g., vegetative bacterial strain), or, at least 1×10⁷ colony forming units of each bacterial strain (e.g., vegetative bacterial strain), or, at least 1×10⁸ colony forming units of each bacterial strain (e.g., vegetative bacterial strain), or, at least 1×10⁹ colony forming units of each bacterial strain (e.g., vegetative bacterial strain).

[0124] For example, disclosed compositions (e.g., a pharmaceutical unit such as e.g., a capsule) can include about 1 mg to about 5 mg (e.g., 2 mg to about 4 mg) of a bacterial strain, which can each be present in the unit, e.g., within about 5 mg to about 50 mg of a lyophilized powder form of the bacterial strain. For example, a pharmaceutical unit may comprise a total of about 30 mg to about 70 mg, about 30 mg to about 60 mg, about 30 mg to about 50 mg, about 30 mg to about 40 mg, about 40 mg to about 70 mg, about 40 mg to about 60 mg, about 40 mg to about 50 mg, about 50 mg to about 70 mg, about 50 mg to about 60 mg, about 80 mg to about 100 mg, about 90 mg to about 110 mg, about 100 mg to about 120 mg, or about 110 mg to about 150 mg of lyophilized powder forms of the bacterial strain. In certain embodiments, the pharmaceutical unit comprises a total of about 30 mg, 40 mg, 50 mg, 60 mg, 70 mg, 100 mg, 120 mg, 130 mg, 140 mg, or 150 mg of lyophilized powder form of the bacterial strain.

[0125] In certain embodiments, a disclosed composition such as a disclosed pharmaceutical unit may include about 5 to about 50 mg of each lyophilized powder form of a bacterial strain, for example, about 5 to about 45 mg, about 5 to about 40 mg, about 5 to about 35 mg, about 5 to about 30 mg, about 5 to about 25 mg, about 5 to about 15 mg, about 5 to about 10 mg, about 10 to about 50 mg, about 10 to about 35 mg of each lyophilized powder form of a bacterial strain (e.g., a vegetative bacterial strain), about 10 to about 20 mg, about 10 to about 15 mg, or about 15 to about 45 mg of each lyophilized powder form of a bacterial strain (e.g., a vegetative bacterial strain). In certain embodiments, a disclosed pharmaceutical unit comprises about 5, about 10, about 15, about 20, about 25, or about 30 mg of each lyophilized powder form of a bacterial strain (e.g., a vegetative bacterial strain). In certain embodiments, a disclosed pharmaceutical unit includes about 25 to about 50 mg of a lyophilized powder form of one bacterial strain (e.g., vegetative bacterial strain) and about 5 mg to about 10 mg of the remaining lyophilized powder forms of bacterial strains (e.g., vegetative bacterial strains), or about 5 to about 15 mg of one lyophilized powder form of bacterial strain (e.g., vegetative bacterial strain) and about 5 to 10 mg of the remaining lyophilized powder forms of bacterial strains (e.g., vegetative bacterial strains), for example, about 15 mg of one lyophilized powder form of bacterial strain (e.g., vegetative bacterial strain) and about 5 mg of the remaining lyophilized powder forms of bacterial strains (e.g., vegetative bacterial strains), or about 15 mg to about 25 mg of each of two lyophilized powder forms of bacterial strains (e.g., vegetative bacterial strains) and about 5 mg to 10 mg of the remaining lyophilized powder forms of bacterial strains (e.g., vegetative bacterial strains).

[0126] In certain embodiments a pharmaceutical composition or unit may include, or may be administered in combination with a prebiotic, i.e., a compound or composition which modifies the growth, maintenance, activity and/or balance of the intestinal micro flora (e.g., can allow for specific changes in the composition and/or activity of the microbiome). Exemplary prebiotics include complex carbohydrates, complex sugars, resistant dextrins, resistant starch, amino acids, peptides, nutritional compounds, biotin, polydextrose, fructooligosaccharide (FOS), galactooligosaccharides (GOS), inulin, lignin, psyllium, chitin, chitosan, chitosanoligosaccharides, lacitol, gums (e.g., guar gum), high amylose cornstarch (HAS), cellulose, β-glucans, hemi-celluloses, lactulose, mannooligosaccharides, mannan oligosaccharides (MOS), oligofructose-enriched inulin, oligofructose, oligodextrose, tagatose, trans-galactooligosaccharide, pectin, resistant starch, isomaltoligosaccharides, and xylooligosaccharides (XOS). Prebiotics can be found in foods (e.g., acacia gum, guar seeds, brown rice, rice bran, barley hulls, chicory root, Jerusalem artichoke, dandelion greens, garlic, leek, onion, asparagus, wheat bran, oat bran, baked beans, whole wheat flour, and banana), and breast milk. Prebiotics can also be administered in other forms (e.g., a capsule or dietary supplement).

### III. Therapeutic Uses

[0127] Compositions and methods disclosed herein can be used to treat various forms of inflammatory disorders, gastrointestinal disorders, and/or dysbiosis in a subject. The disclosure provides a method of treating a gastrointestinal disorder, inflammatory disorder, and/or dysbiosis in a subject. A contemplated method comprises administering to the subject an effective amount of a pharmaceutical composition and/or pharmaceutical unit comprising an Anaerostipes bacterial strain disclosed herein (and optionally one or more additional bacterial strains), either alone or in a combination with another therapeutic agent to treat the gastrointestinal disorder, inflammatory disorder, and/or dysbiosis in the subject.

[0128] As used herein, “treat”, “treating” and “treatment” mean the treatment of a disease in a subject, e.g., in a human. This includes: (a) inhibiting the disease, i.e., arresting its development; and (b) relieving the disease, i.e., causing regression of the disease state. As used herein, the terms “subject” and “patient” refer to an organism to be treated by the methods and compositions described herein. Such organisms preferably include, but are not limited to, mammals, e.g., human, a companion animal (e.g., dog, cat, or rabbit), or a livestock animal (for example, cow, sheep, pig, goat, horse, donkey, and mule, buffalo, oxen, or camel)).

[0129] It will be appreciated that the exact dosage of a pharmaceutical unit, pharmaceutical composition, or bacterial strain is chosen by an individual physician in view of the patient to be treated, in general, dosage and administration are adjusted to provide an effective amount of the bacterial agent to the patient being treated. As used herein, the “effective amount” refers to the amount necessary to elicit a beneficial or desired biological response. An effective amount can be administered in one or more administrations, applications or dosages and is not intended to be limited to a particular formulation or administration route. As will be appreciated by those of ordinary skill in this art, the effective amount of a pharmaceutical unit, pharmaceutical composition, or bacterial strain may vary depending on such factors as the desired biological endpoint, the drug to be delivered, the target tissue, the route of administration, etc. Additional factors which may be taken into account include the severity of the disease state; age, weight and gender of the patient being treated; diet, time and frequency of administration; drug combinations; reaction sensitivities; and tolerance/response to therapy.

[0130] It is understood that a disclosed bacterial strain, bacterial strain mixture, or composition may not require colonization of the gut, e.g., an intestine, of the subject and/or persistence in the subject in order elicit a beneficial or desired biological response. For example, in certain embodiments, a bacterial strain, bacterial strain mixture, or composition colonizes or partially colonizes the gut, e.g. an intestine, of the subject and/or persists in the subject after administration. In certain embodiments, a bacterial strain or bacterial strain mixture does not colonize the gut of the subject and/or persist in the subject after administration.

[0131] Inflammatory disorders may be characterized, for example, based on the primary tissue affected, the mechanism of action underlying the disorder, or the portion of the immune system that is misregulated or overactive. Examples of inflammatory disorders include inflammation of the skin, lungs, joints, connective tissue, eyes, nose, bowel, kidney, liver, central nervous system, vascular system, heart, or adipose tissue. In certain embodiments, inflammatory disorders which may be treated include inflammation due to the infiltration of leukocytes or other immune effector cells or mediators thereof into affected tissue. In certain embodiments, inflammatory disorders which may be treated include inflammation mediated by IgA and/or IgE antibodies. Other relevant examples of inflammatory disorders which may be treated by the present disclosure include inflammation caused by infectious agents, including but not limited to viruses, bacteria, fungi, and parasites. In certain embodiments, the inflammatory disorder that is treated is an allergic reaction. In certain embodiments, the inflammatory disorder is an autoimmune disease.

[0132] Inflammatory skin disorders include disorders associated with cell proliferation, such as psoriasis, eczema, dermatitis (e.g., eczematous dermatitides, topic and seborrheic dermatitis, allergic or irritant contact dermatitis, eczema craquelee, photoallergic dermatitis, phototoxicdermatitis, phytophotodermatitis, radiation dermatitis, and stasis dermatitis), and acne.

[0133] Inflammatory lung disorders include asthma, adult respiratory distress syndrome, bronchitis, pulmonary inflammation, pulmonary fibrosis, and cystic fibrosis (which may additionally or alternatively involve the gastro-intestinal tract or other tissue(s)). Immune mediated inflammatory diseases include systemic lupus erythematosus, systemic vasculitis, Sjogren's syndrome, alopecia areata, and systemic sclerosis. Inflammatory joint disorders include rheumatoid arthritis, seronegative spondyloarthropathies including ankylosing spondylitis, juvenile rheumatoid arthritis, osteoarthritis, gouty arthritis and other arthritic disorders. Inflammatory eye disorders include uveitis (including iritis), conjunctivitis, episcleritis, scleritis, and keratoconjunctivitis sicca. Inflammatory bowel disorders include Crohn's disease, ulcerative colitis, inflammatory bowel disease, and distal proctitis.

[0134] Inflammatory disorders of the endocrine system include, but are not limited to, autoimmune endocrinopathies, autoimmune thyroiditis (Hashimoto's disease), Type I diabetes, inflammation in liver and adipose tissue associated with Type II diabetes, and acute and chronic inflammation of the adrenal cortex. Inflammatory disorders of the cardiovascular system include, but are not limited to, coronary infarct damage, peripheral vascular disease, myocarditis, vasculitis, revascularization of stenosis, atherosclerosis, and vascular disease associated with Type II diabetes. Inflammatory disorders of the kidney include, but are not limited to, glomerulonephritis, interstitial nephritis, lupus nephritis, nephritis secondary to

[0135] Wegener's disease, acute renal failure secondary to acute nephritis, Goodpasture's syndrome, post-obstructive syndrome and tubular ischemia. Inflammatory disorders of the liver include, but are not limited to, hepatitis (arising from viral infection, autoimmune responses, drug treatments, toxins, environmental agents, or as a secondary consequence of a primary disorder), biliary atresia, primary biliary cirrhosis and primary sclerosing cholangitis. Metabolic disorders with inflammatory etiology include insulin resistance, metabolic syndrome, obesity, Nonalcoholic fatty liver disease (NAFLD), and Nonalcoholic steatohepatitis (NASH). In certain embodiments, the inflammatory disorder is an autoimmune disease, for example, rheumatoid arthritis, lupus, alopecia, autoimmune pancreatitis, Celiac disease, Behcet's disease, Cushing syndrome, and Grave's disease. In certain embodiments, the inflammatory disorder is a rheumatoid disorder, for example, rheumatoid arthritis, juvenile arthritis, bursitis, spondylitis, gout, scleroderma, Still's disease, and vasculitis. Additional exemplary inflammatory disorders include eosinophilic esophagitis and eosinophilic gastroenteritis.

[0136] Gastrointestinal disorders include for example, inflammatory bowel disease (IBD), Crohn's disease (CD), ulcerative colitis (UC), ulcerative proctitis, microscopic colitis, irritable bowel syndrome (IBS; e.g., IBS-c, IBS-m, or IBS-d), functional diarrhea, functional constipation, coeliac disease, radiation enteritis, Clostridium difficile (C. difficile) infection (CDI), recurrent C. difficile infection (rCDI), C. difficile associated diarrheal disease (CDAD), colitis (e.g., infectious, ischemic, indeterminate, or radiation colitis), ulcers (including gastric, peptic, and duodenal ulcers), gastroesophageal reflux disease (GERD), pouchitis, gastroenteritis, pancreatitis, mucositis (e.g., oral mucositis, gastrointestinal mucositis, nasal mucositis and proctitis), necrotizing enterocolitis, esophagitis, non-ulcer dyspepsia, chronic intestinal pseudo-obstruction, functional dyspepsia, colonic pseudo-obstruction, duodenogastric reflux, ileus inflammation, post-operative ileus, heartburn (high acidity in the GI tract), constipation (e.g., constipation associated with use of medications such as opioids, osteoarthritis drugs, osteoporosis drugs, post-surgical constipation, or constipation associated with neuropathic disorders), hemorrhoids, diverticular disease, chronic pancreatitis, blind loop syndrome, gastroparesis (including diabetic and/or idiopathic), diarrhea, dysphagia, fecal incontinence, short bowel syndrome (SBS), intestinal ischemia, infant regurgitation, infant rumination syndrome, cyclic vomiting syndrome, globus, volvulus, cancers of the gastrointestinal tract, and gastrointestinal allergies. It is contemplated that compositions and methods disclosed herein can be used to treat any functional gastrointestinal disorder, including, for example, a disorder mediated by or otherwise associated with a brain-gut interaction.

[0137] Inflammatory Bowel Disease or IBD is used interchangeably herein to refer to diseases of the bowel that cause inflammation and/or ulceration and includes without limitation Crohn's disease and ulcerative colitis. Crohn's disease (CD) and ulcerative colitis (UC) are chronic inflammatory bowel diseases of unknown etiology.

[0138] Ulcerative colitis (UC) afflicts the large intestine. The course of the disease may be continuous or relapsing, mild or severe. The earliest lesion is an inflammatory infiltration with abscess formation at the base of the crypts of Lieberkuhn. Coalescence of these distended and ruptured crypts tends to separate the overlying mucosa from its blood supply, leading to ulceration. Symptoms of the disease include cramping, lower abdominal pain, rectal bleeding, and frequent, loose discharges consisting mainly of blood, pus and mucus with scanty fecal particles. A total colectomy may be required for acute, severe or chronic, unremitting ulcerative colitis.

[0139] Crohn's disease, unlike ulcerative colitis, can affect any part of the bowel. The most prominent feature Crohn's disease is the granular, reddish-purple edematous thickening of the bowel wall. With the development of inflammation, these granulomas often lose their circumscribed borders and integrate with the surrounding tissue. Diarrhea and obstruction of the bowel are the predominant clinical features. As with ulcerative colitis, the course of Crohn's disease may be continuous or relapsing, mild or severe, but unlike ulcerative colitis, Crohn's disease is not curable by resection of the involved segment of bowel. Most patients with Crohn's disease require surgery at some point, but subsequent relapse is common and continuous medical treatment is usual.

[0140] Generally, dysbiosis refers to a state of the microbiota or microbiome of the gut or other body area, including, e.g., mucosal or skin surfaces (or any other microbiota niche) in which the normal diversity and/or function of the ecological network is disrupted. Any disruption from a typical (e.g., ideal) state of the microbiota can be considered a dysbiosis, even if such dysbiosis does not result in a detectable decrease in health. This state of dysbiosis may be unhealthy (e.g., result in a diseased state), or it may be unhealthy under only certain conditions, or it may prevent a subject from becoming healthier. Dysbiosis may be due to a decrease in diversity of the microbiota population composition, the overgrowth of one or more population of pathogens (e.g., a population of pathogenic bacteria) or pathobionts, the presence of and/or overgrowth of symbiotic organisms able to cause disease only when certain genetic and/or environmental conditions are present in a patient, or the shift to an ecological network that no longer provides a beneficial function to the host and therefore no longer promotes health. A distal dysbiosis includes, but is not limited to, a dysbiosis outside of the lumen of the gastrointestinal tract.

[0141] It is contemplated that dysbiosis may include infection with a pathogenic bacterium of a genus selected from the group consisting of Yersinia, Vibrio, Treponema, Streptococcus, Staphylococcus, Shigella, Salmonella, Rickettsia, Orientia, Pseudomonas, Neisseria, Mycoplasma, Mycobacterium, Listeria, Leptospira, Legionella, Klebsiella, Helicobacter, Haemophilus, Francisella, Escherichia, Ehrlichia, Enterococcus, Coxiella, Corynebacterium, Clostridium, Chlamydia, Chlamydophila, Campylobacter, Burkholderia, Brucella, Borrelia, Bordetella, Bifidobacterium, and Bacillus. Further examples of pathogenic bacteria include Aeromonas hydrophila, Campylobacter fetus, Plesiomonas shigelloides, Bacillus cereus, Campylobacter jejuni, Clostridium botulinum, Clostridium difficile, Clostridium perfringens, enteroaggregative Escherichia coli, enterohemorrhagic Escherichia coli, enteroinvasive Escherichia coli, enterotoxigenic Escherichia coli (LT or ST), Escherichia coli 0157:H7, Helicobacter pylori, Lysteria monocytogenes, Plesiomonas shigelloides, Salmonella typhi, Staphylococcus aureus, Vibrio cholerae, Vibrio parahaemolyticus, Vibrio vulnificus, Yersinia enterocolitica, carbapenem-resistant Enterobacteriaceae (CRE), extended spectrum beta-lactam resistant Enterococci (ESBL), vancomycin-resistant Enterococci (VRE), and multi-drug resistant bacteria.

[0142] Compositions and methods disclosed herein can also be used to treat cancer in a subject. A contemplated method comprises administering to the subject an effective amount of a pharmaceutical composition and/or pharmaceutical unit comprising an Anaerostipes bacterial strain disclosed herein (and optionally one or more additional bacterial strains), either alone or in a combination with another therapeutic agent to treat the cancer in the subject. Examples of cancers include solid tumors, soft tissue tumors, hematopoietic tumors and metastatic lesions. Examples of hematopoietic tumors include, leukemia, acute leukemia, acute lymphoblastic leukemia (ALL), B-cell, T-cell or FAB ALL, acute myeloid leukemia (AML), chronic myelocytic leukemia (CML), chronic lymphocytic leukemia (CLL), e.g., transformed CLL, diffuse large B-cell lymphomas (DLBCL), follicular lymphoma, hairy cell leukemia, myelodyplastic syndrome (MDS), a lymphoma, Hodgkin's disease, a malignant lymphoma, non-Hodgkin's lymphoma, Burkitt's lymphoma, multiple myeloma, or Richter's Syndrome (Richter's Transformation). Examples of solid tumors include malignancies, e.g., sarcomas, adenocarcinomas, and carcinomas, of the various organ systems, such as those affecting head and neck (including pharynx), thyroid, lung (small cell or non-small cell lung carcinoma (NSCLC)), breast, lymphoid, gastrointestinal (e.g., oral, esophageal, stomach, liver, pancreas, small intestine, colon and rectum, anal canal), genitals and genitourinary tract (e.g., renal, urothelial, bladder, ovarian, uterine, cervical, endometrial, prostate, testicular), CNS (e.g., neural or glial cells, e.g., neuroblastoma or glioma), or skin (e.g., melanoma). In certain embodiments, the cancer is colorectal cancer (CRC).

[0143] In other embodiments, the compositions and methods disclosed herein may also be useful for preventing one or more of the above diseases or conditions, when administered as vaccine compositions. In certain such embodiments, the bacterial strains provided herein are viable. In certain such embodiments, the bacterial strains are capable of at least partially or totally colonizing the gastrointestinal tract, e.g., the intestine. In certain such embodiments, the bacterial strains of the invention are viable and capable of at least partially or totally colonizing the gastrointestinal tract, e.g., the intestine. In other certain such embodiments, the bacterial strains of the invention may be killed, inactivated or attenuated. In certain such embodiments, the compositions may comprise a vaccine adjuvant. In certain embodiments, the compositions are for administration via injection, such as via subcutaneous injection.

### IV. Combination Therapy

[0144] The methods and compositions described herein can be used alone or in combination with other therapeutic agents and/or modalities. The term administered “in combination,” as used herein, is understood to mean that two (or more) different treatments are delivered to the subject during the course of the subject's affliction with the disorder, such that the effects of the treatments on the patient overlap at a point in time. In certain embodiments, the delivery of one treatment is still occurring when the delivery of the second begins, so that there is overlap in terms of administration. This is sometimes referred to herein as “simultaneous” or “concurrent delivery.” In other embodiments, the delivery of one treatment ends before the delivery of the other treatment begins. In certain embodiments of either case, the treatment is more effective because of combined administration. For example, the second treatment is more effective, e.g., an equivalent effect is seen with less of the second treatment, or the second treatment reduces symptoms to a greater extent, than would be seen if the second treatment were administered in the absence of the first treatment, or the analogous situation is seen with the first treatment. In certain embodiments, delivery is such that the reduction in a symptom, or other parameter related to the disorder is greater than what would be observed with one treatment delivered in the absence of the other. The effect of the two treatments can be partially additive, wholly additive, or greater than additive. The delivery can be such that an effect of the first treatment delivered is still detectable when the second is delivered. In certain embodiments, a side effect of a first and/or second treatment is reduced because of combined administration.

[0145] In certain embodiments, a method or composition described herein is administered in combination with one or more additional therapies. In certain embodiments, a contemplated additional therapy may include an aminosalicylate, a corticosteroid, a Tumor Necrosis Factor (TNF) antagonist, linaclotide, an antibiotic, or an immunosuppressive agent (e.g., azathioprine, 6-mercaptopurine, cyclosporine, methotrexate, or tacrolimus (Prograf)). In certain embodiments, a contemplated additional therapy may include a biologic agent (e.g., infliximab (Remicade), adalimumab (Humira), certolizumab pegol (Cimzia), golimumab

[0146] (Simponi), or etanercept (Enbrel)). It is contemplated that a subject treated with a disclosed method or composition may have had an inadequate response to a previous administration of a therapy, e.g., a previous administration of an aminosalicylate, a corticosteroid, or a biologic agent.

[0147] Further therapeutic agents suitable for use in combination therapy with a pharmaceutical composition or unit described herein include proton pump inhibitors (such as pantoprazole (Protonix), lansoprazole (Prevacid), esomeprazole (Nexium), omeprazole (Prilosec), and rabeprazole), H2 blockers (such as cimetidine (Tagamet), ranitidine (Zantac), famotidine (Pepcid), and nizatidine (Axid)), prostaglandins (such as misoprostoL (Cytotec)), sucralfate, and antacids.

[0148] In certain embodiments, a pharmaceutical composition or unit may include, or be administered in combination with, a corticosteroid. Corticosteroids are a class of chemicals that includes steroid hormones naturally produced in the adrenal cortex of vertebrates and analogues of these hormones that are synthesized in laboratories. Corticosteroids are involved in a wide range of physiological processes, including stress response, immune response, and regulation of inflammation, carbohydrate metabolism, protein catabolism, blood electrolyte levels, and behavior. Exemplary corticosteroids include betamethasone, budesonide, cortisone, dexamethasone, hydrocortisone, methylprednisolone, prednisolone, prednisone, or deflazacort. It is contemplated that a subject treated with a disclosed method or composition may have had an inadequate response to a previous administration of a corticosteroid.

[0149] In certain embodiments, a pharmaceutical composition or unit may include, or be administered in combination with, an aminosalicylate. Exemplary aminosalicylate include 4-Aminosalicylic acid, Balsalazide, Olsalazine, Sulfasalazine, and Mesalazine (5-Aminosalicylic acid). It is contemplated that a subject treated with a disclosed method or composition may have had an inadequate response to a previous administration of mesalamine, for example, a previous administration of ≥2.4g/day mesalamine orally for at least 8 weeks.

[0150] In certain embodiments, a pharmaceutical composition or unit may include, or be administered in combination with, a Tumor Necrosis Factor (TNF) antagonist. Exemplary TNF antagonists include infliximab (Remicade), adalimumab (Humira), certolizumab pegol (Cimzia), golimumab (Simponi), etanercept (Enbrel), thalidomide (Immunoprin), lenalidomide (Revlimid), pomalidomide (Pomalyst, Imnovid), xanthine derivatives (e.g., pentoxifylline), and bupropion. It is contemplated that a subject treated with a disclosed method or composition may have had an inadequate response to a previous administration of a TNF antagonist.

[0151] In certain embodiments, a pharmaceutical composition or unit may include, or be administered in combination with, an integrin α₄β₇ antagonist, e.g., vedolizumab. It is contemplated that a subject treated with a disclosed method or composition may have had an inadequate response to a previous administration of an integrin a₄β₇ antagonist.

[0152] In certain embodiments, a pharmaceutical composition or unit may include, or be administered in combination with, an anti-bacterial agent, e.g., an antibiotic. A disclosed method may comprise pretreatment with an antibiotic, e.g., administration of an antibiotic to a subject prior to administration of a disclosed pharmaceutical composition or unit. Exemplary antibiotics for use in combination therapy include vancomycin, metronidazole, gentamicin, colistin, fidaxomicin, telavancin, oritavancin, dalbavancin, daptomycin, cephalexin, cefuroxime, cefadroxil, cefazolin, cephalothin, cefaclor, cefamandole, cefoxitin, cefprozil, ceftobiprole, cipro, Levaquin, floxin, tequin, avelox, norflox, tetracycline, minocycline, oxytetracycline, doxycycline, amoxicillin, ampicillin, penicillin V, dicloxacillin, carbenicillin, methicillin, ertapenem, doripenem, imipenem/cilastatin, meropenem, amikacin, kanamycin, neomycin, netilmicin, tobramycin, paromomycin, cefixime, cefdinir, cefditoren, cefoperazone, cefotaxime, ceftazidime, ceftibuten, ceftizoxime, ceftriaxone, cefoxotin, and/or streptomycin.

[0153] In certain embodiments, a pharmaceutical composition or unit may include, or be administered in combination with, an anti-fungal or anti-viral agents. Exemplary anti-viral agents include abacavir, acyclovir, adefovir, amprenavir, atazanavir, cidofovir, darunavir, delavirdine, didanosine, docosanol, efavirenz, elvitegravir, emtricitabine, enfuvirtide, etravirine, famciclovir, foscarnet, fomivirsen, ganciclovir, indinavir, idoxuridine, lamivudine, lopinavir, maraviroc, MK-2048, nelfinavir, nevirapine, penciclovir, raltegravir, rilpivirine, ritonavir, saquinavir, stavudine, tenofovir trifluridine, valaciclovir, valganciclovir, vidarabine, ibacitabine, amantadine, oseltamivir, rimantidine, tipranavir, zalcitabine, zanamivir and zidovudine. Exemplary anti-fungal agents include natamycin, rimocidin, filipin, nystatin, amphotericin B, candicin, and hamycin, miconazole, ketoconazole, clotrimazole, econazole, omoconazole, bifonazole, butoconazole, fenticonazole, isoconazole, oxiconazole, sertaconazole, sulconazole, tioconazole, fluconazole, itraconazole, isavuconazole, ravuconazole, posaconazole, voriconazole, terconazole, and albaconazole, abafungin, terbinafine, naftifine, butenafine, anidulafungin, caspofungin, micafungin, polygodial, benzoic acid, ciclopirox, tolnaftate, undecylenic acid, flucytosine or 5-fluorocytosine, griseofulvin, and haloprogin.

[0154] Throughout the description, where compositions are described as having, including, or comprising specific components, or where processes and methods are described as having, including, or comprising specific steps, it is contemplated that, additionally, there are compositions of the present disclosure that consist essentially of, or consist of, the recited components, and that there are processes and methods according to the present disclosure that consist essentially of, or consist of, the recited processing steps.

[0155] In the application, where an element or component is said to be included in and/or selected from a list of recited elements or components, it should be understood that the element or component can be any one of the recited elements or components, or the element or component can be selected from a group consisting of two or more of the recited elements or components.

[0156] Further, it should be understood that elements and/or features of a composition or a method described herein can be combined in a variety of ways without departing from the spirit and scope of the present disclosure, whether explicit or implicit herein. For example, where reference is made to a particular compound, that compound can be used in various embodiments of compositions of the present disclosure and/or in methods of the present disclosure, unless otherwise understood from the context. In other words, within this application, embodiments have been described and depicted in a way that enables a clear and concise application to be written and drawn, but it is intended and will be appreciated that embodiments may be variously combined or separated without parting from the present teachings and disclosure. For example, it will be appreciated that all features described and depicted herein can be applicable to all aspects of the disclosure described and depicted herein.

[0157] It should be understood that the expression “at least one of” includes individually each of the recited objects after the expression and the various combinations of two or more of the recited objects unless otherwise understood from the context and use. The expression “and/or” in connection with three or more recited objects should be understood to have the same meaning unless otherwise understood from the context.

[0158] The use of the term “include,” “includes,” “including,” “have,” “has,” “having,” “contain,” “contains,” or “containing,” including grammatical equivalents thereof, should be understood generally as open-ended and non-limiting, for example, not excluding additional unrecited elements or steps, unless otherwise specifically stated or understood from the context.

[0159] Where the use of the term “about” is before a quantitative value, the present disclosure also includes the specific quantitative value itself, unless specifically stated otherwise. As used herein, the term “about” refers to a ±10% variation from the nominal value unless otherwise indicated or inferred.

[0160] It should be understood that the order of steps or order for performing certain actions is immaterial so long as the present disclosure remains operable. Moreover, two or more steps or actions may be conducted simultaneously.

[0161] The use of any and all examples, or exemplary language herein, for example, “such as” or “including,” is intended merely to illustrate better the present disclosure and does not pose a limitation on the scope of the disclosure unless claimed. No language in the specification should be construed as indicating any non-claimed element as essential to the practice of the present disclosure.

### EXAMPLES

[0162] The following Examples are merely illustrative and are not intended to limit the scope or content of the disclosure in any way.

### Example 1

### Isolation and Purification of Anaerostipes rhamnosivorans

[0163] 1.1 Source. Isolate P127-B2a was isolated from the stool sample of a healthy human donor. The donor underwent comprehensive clinical and laboratory testing to confirm healthy status including screening for infectious agents to minimize risk of transmissible infection. Serology screening included HIV-1/HIV-2 (IgG and EIA), HTLV-I and HTLV-II (Ab), Hepatitis A virus (IgM), Hepatitis B virus (HBSAg, anti-HBc IgG and IgM), Hepatitis C virus (anti-HCV IgG), Treponema pallidum (EIA, or RPR if EIA is positive), Strongyloides stercoralis Ab, CMV Viral Load, and EBV Viral Load. Stool screening included Clostridium difficile toxin AB (PCR), routine bacterial culture for enteric pathogens (with enrichment) including H. pylori EIA, Salmonella, Shigella, Yersinia, Campylobacter, and Vibrio, E. coli 0157 (perform E. coli 0157 culture, if stxl/2 EIA +ve), Shiga-like toxins stx1/2 (Shigella) EIA, Culture-based assays for vancomycin-resistant Enterococcus (VRE), extended spectrum beta-lactamase (ESBL) producers, carbapenem-resistant Enterobacteriaceae (CRE), and methicillin-resistant Staphylococcus aureus (MRSA), Giardia antigen (EIA), Cryptosporidium antigen (EIA), Cyclospora, Isospora, and Microsporidia (Microscopic observation with acid fast stain), Ova and Parasites (Microscopic observation), Rotavirus (EIA), Norovirus GI/GII (RT-PCR), and Adenovirus 40,41 EIA.

[0164] 1.2 Isolation and Purification. Dilutions of donor samples were plated on isolation media. Colonies were picked from isolation media agar plates (YCFAC, BHI supplemented with Vitamin K and Hemin, TSA supplemented with 5% sheep blood, BUA OxyPras) into a 96-well microtiter plate containing 200 μl of BHI+Hemin+Vitamin K. Once growth was observed visually in the 96-well microtiter plate, 20 μl of culture from each well of the 96-well microtiter plate was transferred into 96-well Deep-Well plate containing 1 ml BHI+Hemin+Vitamin K, followed by incubation at 37° C. After visually detecting growth, 1 ml of 50% glycerol was added to each well, and 600 μl of the mix was transferred into a Thermo Fisher Matrix tube plate. Individual cultures were subsequently plated on isolation media for conformation of colony morphology uniformity. Colonies were observed after 24 hour incubation at 37° C., appearing white and round. Individual colonies were picked for identification by 16S sequencing and replated on YCFAC. After colonies were visible and monomorphology was observed, a single colony was inoculated into 6 ml of YCFAC media. Once the liquid culture became turbid, a matrix plate was prepared by adding 6 ml 50% glycerol to the liquid culture and aliquoting 120 μl per matrix tube. Purity was confirmed by plating from one of the prepared matrix vials onto a BUA OxyPras plate and testing of single colonies by 16S sequencing.

### Example 2

### Taxonomic Characterization of Isolate P127-B2a

[0165] 2.1 16S Sequencing and Phylogenetic Analysis.

[0166] A taxonomic characterization of purified isolate P127-B2a was performed using full length 16S rRNA gene sequencing data. Homology searches were performed against existing publicly available strains present in the National Center for Biotechnology Information (NCBI) taxonomy database and the SILVA ribosomal RNA database (Max Planck Institute for Marine Microbiology and Jacobs University, Bremen, Germany).

[0167] 2.1.1 16S rRNA gene sequencing. 50 μ1 of a liquid culture of isolate P127-B2a was denatured at 95° C. for 10 minutes. The denatured sample was utilized as a template to PCR amplify the 16S gene by using 16S rRNA primers 27F and 1492R. Sanger sequencing was performed (Elim Biopharm, Hayward, CA) using a set of 4 primers (27F, 1492R, 515F, and 907R) to recover a near full length 16S rRNA gene fragment (SEQ ID NO: 1). The four amplicons were assembled into a single contiguous sequence using DNAbaser (Heracle BioSoft S. R. L., Arges, Romania) which was then searched against the NCBI database using BLASTn.

[0168] 2.1.2 Phylogenetic analysis. The P127-B2a contig and its close relatives from the NCBI 16S database including the outgroup were next searched against the ARB SILVA database using Alignment (SINA v1.2.11), Classification and Tree service. For search and classification, sequences bearing a minimum of 92 percent identity (15 total sequences) were utilized to classify P127-B2a. RaxML (Randomized Axelerated Maximum Likelihood) was used for performing the maximum likelihood search for building the phylogenetic tree (General Time Reversible (GTR+gamma) model with gamma as rate model for likelihoods).

[0169] Preliminary search against the 16S rRNA gene database on NCBI yielded a closest match of 96.94% over 98% of the sequence length of 1429 bps (SEQ ID NO:1). This match was from the species Anaerostipes caccae. The next closest match over the entire length was of 94.6% identity from the species Anaerostipes hadrus.

[0170] The selected sequences from NCBI database along with the P127-B2a 16S contig were searched against the ARB SILVA database. The closest match was found to be of 97.5% identity from the an unidentified Anaerostipes species named Clostridiales bacterium VE202-09. The reference 16S rRNA gene of length was 1515 bp (ARB ID: BAHWO₂₀₀₀₀₆₄). The identity dropped to 97.41% over the SEED alignment.

[0171] The P127-B2a contig was then searched against the Nucleotide collection (nt) database on NCBI using BLASTn, yielding a match of 100% over 100% of the sequence length of SEQ ID NO:1, corresponding to Anaerostipes rhamnosivorans strain ly2 (Sequence

[0172] ID: CP040058.1:14645 to 16073). A distance tree based on pairwise comparisons of the search results is provided in FIG. 1.

[0173] A summary of the taxonomic identification results is provided in Table 1.

TABLE 1
Taxonomic Identification Result Summary

| | Isolate 16S | |
|---|---|---|
| | sequence | Percent |
| Database match | coverage | Identity |
| Anaerostipes rhamnosivorans strain 1y2 | 100% | 100% |
| Anaerostipes caccae strain L1-92 | 98% | 96.94% |
| Anaerostipes hadrus strain DSM 3319 | 100% | 94.06% |
| Anaerostipes butyraticus strain JCM 17466 | 100% | 93.38% |

[0174] 2.2 Whole Genome Sequencing and Analysis.

[0175] 2.2.1 Sequencing. DNA extraction, sequencing, quality filtering, assembly and annotation was performed by Corebiome, Inc. (Minneapolis, MN). DNA was extracted from isolate P127-B2a with MO Bio PowerFecal (Qiagen) automated for high throughput on QiaCube (Qiagen), with bead beating in 0.1 mm glass bead plates. Samples were quantified with Qiant-iT Picogreen dsDNA Assay (Invitrogen). Libraries were prepared with a proprietary procedure adapted for the Nextera Library Prep kit (Illumina) and sequenced on an Illumina NextSeq using single-end 1×150 reads with a NextSeq 500/550 High Output v2 kit (Illumina). DNA sequences were filtered for low quality (Q-Score<20) and length (<50), and adapter sequences were trimmed using cutadapt v.1.15 (Martin, EMBnet Journal, [S.1.], v. 17, n. 1, p. pp. 10-12, (2011)).

[0176] 2.2.2 Assembly and Annotation. Sequences were assembled using SPAdes v3.11.0 (Bankevich et al., J Comput Biol. 19(5):455-477 (2012)). Protein annotation was performed with Prokka v 1.12 (Seemann, Bioinformatics 30(14):2068-2069 (2014)) on contigs over 1,000 bases in length.

[0177] 2.2.3 Quality Assessment. Sequencing quality was determined by inspecting quality scores generated by FASTQC, with bases of low quality indicated by scores less than 20. Assembly quality metrics were generated by QUAST v.4.5 (Gurevich et al., Bioinformatics 29(8):1072-1075 (2013)).

[0178] 2.2.4 Taxonomy. Taxonomic identities were made using appropriate score cut-offs on average nucleotide identity and alignment fraction scores.

[0179] 2.2.5 Genome Characteristics. Intrinsic properties of the isolate P127-B2a genome assembly were compared with that of the closest Anaerostipes reference, Anaerostipes caccae (accession no. NZ_ABAX00000000) and summarized in Table 2 below.

TABLE 2
Characteristics of P127-B2a PI assemblies.

| | |
|---|---|
| Genome Size | 3.59 |
| (Mb) | |
| Contigs | 51 |
| G + C Content | 44.48 |
| # CDS | 3473 |
| # tRNA | 46 |

PI = primary isolate;
Mb = megabase pairs;
CDS = coding sequence,
tRNA = transfer ribonucleic acid

[0180] 2.2.6 Genome wide similarity across P127-B2a and other members of Anaerostipes.

[0181] The PI genome was compared against other members of Anaerostipes to measure the extent of genomic similarity, in particular, average nucleotide identity (ANI). The results are summarized in Table 3 below.

TABLE 3
Average Nucleotide Identity (ANI) and Alignment Fraction
(AF) of P127-B2a compared to other Anaerostipes spp.

| Isolate ID (S) | Reference Species (R) | ANI S→R |
|---|---|---|
| P127-B2a | Anaerostipes rhamnosivorans | 99.91 |
| P127-B2a | Anaerostipes caccae | 81.09 |
| P127-B2a | Anaerostipes hadrus | 72.70 |

### Example 3

### Phenotypic Characterization of Isolate P127-B2a

[0182] P127-B2a cells are non-motile and obligate anaerobes, and are catalase and oxidase negative. P127-B2a was evaluated for its ability to utilize different carbon sources and nitrogen sources, as well as its ability to grow in a wide range of pH using Phenotypic Microarrays (Biolog, Hayward, CA). P127-B2a was able to utilize dulcitol, D-fructose, D-galactose, N-acetyl-D-glucosaminitol, N-acetyl-D-glucosamine, D-glucosamine, a-D-glucose, malitol, maltose, D-mannose, palatinose, D-rhamnose, L-sorbose, sucrose, D-tagatose, turanose, β-hydroxy butyric acid, L-cysteine, L-Aspartic Acid, L-arginine, L-alanine, m-Inositol, X-α-D-glucoside, X-β-D-glucoside, X-βD-galactoside, X-α-D-mannoside, X-α-D-Glucuronide, and X-α-D-galactoside. The P127-B2a strain was able to grow in pH ranging from 5 to 8.5, though optimal growth was observed at pH 7.

[0183] P127-B2a cells were prepared for imaging by electron microscopy. Cells were washed two times in PBS and fixed in 4% paraformaldehyde at room temperature for 30 minutes. Fixed cells were washed two times in PBS, then resuspended in sterile water. Twenty-five microliters of sample were applied to an ITO Coated Cover Slip, 22×22 mm Thickness #1, 30-60 Ohms Resistivity (SPI Supplies, Cat. No. 06471-AB1) and allowed to air dry. Cells were visualized using a Sigma 500 VP FESEM electron microscope. A representative light micrograph of P127-B2a is provided in FIG. 2A and a representative electron micrograph is provided in FIG. 2B. The cells appear as curly rods.

[0184] P127-B2a was also assessed for its ability to form spores. Using two distinct sporulation-inducing methods (heat-shock and chemical-shock), P127-B2a was found to be non-sporulating (Table 5). Clostridium butyricum (ATCC 19398) was used as a positive control.

TABLE 4
Assessment of sporulation.

| | Sporulation | Sporulation |
|---|---|---|
| | with heat- | with ethanol- |
| Strain | shock method (%) | shock method (%) |
| C. butyricum ATCC 19398 | 31.75 | 24.29 |
| P127-B2a | 0.0 | 0.0 |

[0185] P127-B2a was also assessed for its production of short-chain fatty acids (SCFAs) which are found to contribute to the maintenance of intestinal homeostasis through multiple mechanisms (Lee and Hase, Nat Chem Biol 10(6):416-424 (2014); Hoeppli et al., Front Immunol 6:61 (2015); Koh et al., Cell 165(6):1332-1345 (2016)). SCFAs produced by human gut microbes include propionate, acetate and lactate. The SCFA production profile of P127-B2a was evaluated after 72 hours of growth in batch culture in YCFAC media. Non-inoculated YCFAC media was used as a negative control. As seen in FIG. 3, butyric acid is the most abundant SCFA produced by P127-B2a and there is dramatic utilization of acetic acid by the strain.

### Example 4

### In vitro Functional Activity of Anaerostipes rhamnosivorans P127-B2a

[0186] This example describes studies of the activity of Anaerostipes rhamnosivorans P127-B2a in in vitro human epithelial, macrophage, monocyte and dendritic cell models.

### Example 4.1

### Preparation of Freshly Cultured Bacterial Strains for Cell Culture Assays

[0187] Freshly cultured bacteria from overnight cultures were prepared in anaerobic conditions. Bacteria were centrifuged at 4300×g for four minutes. Bacteria were washed once with pre-reduced anaerobic PBS (Gibco). Working stock solutions were prepared by resuspending washed bacteria with anaerobic PBS to the total surface area of ˜1×10\hat{ }10 μm². Total surface area was calculated by determining the number of particles (bacterial cells) in solution, then multiplying the total number of particles by the average surface area (μm²) of each particle, as measured by a particle counter (Beckman Coulter Counter). 10-fold serial dilutions were made using anaerobic PBS for specific assays.

### Example 4.2

### HT29-MTX-E12 Human Epithelial Barrier In vitro Assay

[0188] Symptoms of increased intestinal permeability can be reversed by reducing the levels of an inflammatory cytokine TNF-α with anti-TNF-α therapy (Michielan et al., Mediators Inflamm. 2015:628157 (2015)). Finding novel therapeutics that can reduce gut permeability and barrier disruption remains an important goal in developing treatments for various disorders. The functional activity of Anaerostipes rhamnosivorans P127-B2a was evaluated on human epithelial cells in the presence of TNF-α, as a model of gut barrier damage and permeability. The confluent HT29-MTX-E12 human epithelial cell line forms a polarized monolayer and produces mucin which are two major characteristics of primary human intestinal epithelial cells (Dolan et al., PLoS One. 7(10): e47300 (2012)).

[0189] The HT29-MTX-E12 human epithelial cell line (Sigma Aldrich cat#12040401-1VL) was cultured in 37° C. and 5% CO₂ using high glucose DMEM containing 4.00 mM L-glutamine, 4500 mg/L and sodium pyruvate (HyClone) supplemented with 10% heat-inactivated FBS (Corning), 100 I.U/mL Penicillin, 100m/mL Streptomycin and 0.292 mg/mL L-glutamine (Corning). Passage number was restricted to 6 passages. Apical compartments of HTS 96-well Transwell plates with 0.4 μm microscopically transparent polyester membrane (Corning) were coated with Type 1 Collagen from rat tail (Sigma Aldrich). The HT29-MTX-E12 human cell line was cultured until 70-80% confluent in T-175 tissue culture flasks. Cells were removed with 0.25% Trypsin 2.21 mM EDTA and counted. 30,000 cells were plated onto the apical compartments of pre-coated transwell plates with DMEM culture medium as above and basal reservoirs of transwell plates were filled with the same medium. Cells were cultured in 37° C. and 5% CO₂ for 18 days until a confluent monolayer was formed as described previously (Hall et al., Journal of Pediatric Surgery 48:353-358 (2013)). Media in the apical compartment and basal reservoir were replaced with new media every two days. One day before the experiment, apical compartment inserts containing the confluent monolayer of HT29-MTX-E12 were transferred to HTS Transwell-96 well receiver plates (Corning). Cells were washed and resuspended with DMEM culture media without antibiotics +non-heat-inactivated FBS (Tissue Culture Biologicals) and basal compartments of the transwell receiver plates were filled with the same.

[0190] A working solution of the indicated individual freshly cultured bacteria (Anaerostipes rhamnosivorans P127-B2a or negative control strain at 1×10\hat{ }9 μm²/ml and 1×10\hat{ }8 μm²/ml) or anaerobic PBS control at 10% v/v was added onto the apical compartment of the transwell plates containing confluent HT29-MTX-E12 monolayers. Test articles were centrifuged down to the monolayer at 515×g for four minutes. HT29-MTX-E12 monolayers were co-incubated with test articles for one hour in 37° C. and 5% CO₂. 100 ng/ml TNF-α (InvivoGen) was added to the basal compartment of the transwell plate for specific experiments. Trans-epithelial electrical resistance (TEER) across the cell barrier was measured at 0 (before addition of bacteria) and 24 hours after addition of TNF-α using the STX100C electrode attached to EVOM2 Volt/Ohm (TEER) Meter (World Precision Instruments). Cells were washed with HBSS (Corning) once and culture media in the apical and basal compartments was replaced by HBSS before TEER at the 24-hour time point was measured.

[0191] FIG. 4 shows a significant increase in TEER (measurement of cell monolayer integrity) when 1×10\hat{ }9 μ²/ml of Anaerostipes rhamnosivorans P27-B2a was incubated with the HT29-MTX-E12 monolayer in the presence of TNF-α compared to the PBS control and negative control strain. This indicates that Anaerostipes rhamnosivorans can protect human epithelial cells from cytokine-induced barrier damage and can reduce intestinal barrier permeability.

### Example 4.3

### Human Macrophage and Monocyte In vitro Cytokine and Chemokine Assay

[0192] The THP-1 human monocyte cell line (ATCC cat# TIB-202) was cultured in 37 ° C. and 5% CO₂ using RPMI 1640 containing 2.05mM L-glutamine (Corning) supplemented with 10% heat-inactivated FBS (Corning), 100 I.U/mL Penicillin, 100m/mL Streptomycin and 0.292 mg/mL L-glutamine (Corning). Passage number was restricted to 8 passages. The THP-1 human monocyte cell line was grown until 70-80% confluent. Cells were counted and resuspended in culture media. 100,000 cells were plated per well onto 96 well plates. THP-1 human macrophages were made by culturing the THP-1 human monocyte cells with 10 ng/mL phorbol 12-myristate 13-acetate (PMA) (InvivoGen) for 24 hours followed by 20ng/mL IL-4 (R&D Systems) and 20 ng/mL IL-13 (R&D Systems) for 48 hours in 37° C. and 5% CO₂ as described previously previously (Genin et al., BMC Cancer 15:577 (2015)). One day before the experiment, cells were washed and resuspended in RPMI culture media without antibiotics containing 20 ng/mL IL-4 and 20 ng/mL IL-13.

[0193] A working stock solution of the indicated individual freshly cultured, anaerobic PBS or 500 ng/ml LPS was added onto THP-1 macrophages at 10% v/v and centrifuged down onto the THP-1 cells at 515×g for four minutes. The test articles, controls and THP-1 macrophages were co-incubated for 3 hours in 37° C. and 5% CO₂. The coculture media was replaced by fresh RPMI culture media supplemented with antibiotics to limit excess bacteria growth. THP-1 cells were incubated after culture media replacement for 15 hours in 37° C. and 5% CO₂. THP-1 cell supernatants were collected and analyzed by ELISA. Levels of CCL-18, IL-10, TNFa, IL-1β, and IL12-p40 in culture supernatants were quantified by using commercial enzyme-linked immunosorbent assay (ELISA) kits from Biolegend or R&D

[0194] Systems with TMB detection according to manufacturer's specifications. FIG. 5 shows a significant, dose-dependent increase in the production of the anti-inflammatory cytokines (A) CCL-18 and (B) IL-10 by THP-1 macrophages induced by Anaerostipes rhamnosivorans P127-B2a. FIG. 6 shows similar significant, dose-dependent increases in the production of (A) TNFα, (B) IL-1β, and (C) IL12-p40 in THP-1 macrophages induced by Anaerostipes rhamnosivorans P127-B2a.

### Example 4.4

### Human PBMC In vitro Cytokine Assay

[0195] Trima residual blood product containing concentrated blood mononuclear cells was obtained from anonymous donors through Blood Centers of the Pacific (San Francisco, CA) and processed within 24 hours of collection. Blood samples were tested negative for HIV, HBV, HCV, HTLV, Syphilis, West Nile Virus and Zika Virus. PBMC were isolated using a ficoll gradient as described previously (Sim et al., J. Vis. Exp. (112), e54128 (2016)). Briefly, 50 mL of Trima residual was diluted with 50 mL of sterile PBS (Gibco) and 25 mL was overlaid on 15 mL Ficoll-Paque Plus (GE Healthcare) in 50 mL conical tubes. The samples were centrifuged at 450×g for 30 min at room temperature and allowed to stop without brake. The PBMC interphase was collected, washed with PBS and resuspended in RPMI 1640 containing 2.05 mM L-glutamine (Corning) supplemented with 10% heat-inactivated FBS (Tissue Culture Biologicals) and 0.292 mg/mL L-glutamine (Corning). The cells were maintained by incubation in 37° C. and 5% CO₂ and used for assay evaluation within 24 h or frozen for later use. Cells were cryopreserved in RPMI 1640 supplemented with 50% FBS and 10% DMSO (Sigma Aldrich) at a concentration of 5×10⁷ cells/mL and stored in liquid nitrogen until ready for use.

[0196] Human PBMCs, used immediately after isolation or thawed from cryo-storage, were diluted to 5×10⁶ cells/mL in RPMI 1640 containing L-glutamine (Corning) supplemented with 10% heat-inactivated FBS (Tissue Culture Biologicals) and 0.292 mg/mL L-glutamine (Corning). A 100 μL aliquot of the 5×10⁶ cells/mL cell suspension was added to each well within a round-bottom 96 well plate and cultured for 24 hours at 37° C. and 5% CO₂ before addition of test articles.

[0197] Test articles were prepared and added as described for other assays. After 3 hours of incubation in 37° C. with 5% CO_{2,} the plates containing cocultures were centrifuged (515 x g; four minutes), media removed, and replaced with RPMI 1640 supplemented with 10% heat-inactivated FBS, L-glutamine, and penicillin/streptomycin antibiotic. Culture plates were then incubated for an additional 15 h at 37° C. and 5% CO₂. The plates were centrifuged (515×g; four minutes) and supernatant was collected and analyzed by a custom U-plex multiplex kit from Meso Scale Discovery according to manufacturer's instructions. Results were averaged from 4 human donors with two experimental replicates from each donor.

[0198] FIG. 7 shows a significant, dose-dependent increases in the production of: (A) TNFa, (B) IL-1β, (C) TRAIL, and (D) IFNy by human PBMCs induced by Anaerostipes rhamnosivorans P127-B2a. FIG. 8 shows similar significant, dose-dependent increases in the production of: (A) IL-17A, (B) IL-6, (C) IL-2, and (D) IL-10 in human PBMCs induced by Anaerostipes rhamnosivorans P127-B2a.

### Example 4.5

### Human Monocyte-derived Dendritic Cell In vitro Cytokine Assay

[0199] Cryopreserved PBMCs were thawed in a 37° C. water bath, diluted in warm RPMI 1640 supplemented with 10% heat-inactivated FBS and L-glutamine, and centrifuged (515×g; four minutes). Cells were resuspended in PBS buffer containing 0.5% bovine serum albumin (BSA) and 2 mM EDTA and CD14+monocyte cells were isolated by selection using Miltenyi CD14 Microbeads according to manufacturer's directions. Isolated CD14+ monocytes were cultured in RPMI 1640 supplemented with 10% heat-inactivated FBS, L-glutamine, penicillin/streptomycin antibiotic, 50 ng/mL recombinant human IL-4 (R&D

[0200] Systems), and 100 ng/mL recombinant human GM-CSF (Biolegend). Media was replenished on days 3 and 6. On day 7 after isolation, cells were diluted to 5×10⁵ cells/mL in RPMI 1640 containing L-glutamine (Corning) supplemented with 10% heat-inactivated FBS (Tissue Culture Biologicals) and 0.292 mg/mL L-glutamine (Corning). A 100 μl aliquot of the 5×10⁵ cells/mL cell suspension was added to each well within a flat-well 96 well plate and cultured for 24 hours at 37° C. and 5% CO₂ before addition of test articles.

[0201] Test articles were prepared and added as described for other assays. After 3 hours of incubation in 37° C. with 5% CO_{2,} the plates containing cocultures were centrifuged (515 x g; four minutes), media removed, and replaced with RPMI 1640 supplemented with 10% heat-inactivated FBS, L-glutamine, and penicillin/streptomycin antibiotic. Culture plates were then incubated for an additional 15 h at 37° C. and 5% CO₂. The plates were centrifuged (515×g; four minutes) and supernatant was collected and analyzed by a custom U-plex multiplex kit from Meso Scale Discovery according to manufacturer's instructions. Results were averaged from 4 human donors with two experimental replicates from each donor. FIG. 9 shows a significant, dose-dependent increases in the production of: (A) TNFa, (B) IL-1β, (C) TRAIL, and (D) IFNβ by human monocyte-derived dendritic cells (moDCs) induced by Anaerostipes rhamnosivorans P127-B2a. FIG. 10 shows similar significant, dose-dependent increases in the production of: (A) IL-12p70, (B) IL-6, (C) IL-23, and (D) IL-27 in human moDCs induced by Anaerostipes rhamnosivorans P127-B2a. FIG. 11 shows a dose dependent increase in the production of IL-10 by moDCs induced by Anaerostipes rhamnosivorans P127-B2a.

### Example 5

### In vivo Functional Activity of Anaerostipes rhamnosivorans P127-B2a

[0202] Anaerostipes rhamnosivorans P127-B2a was tested for efficacy in two different well-validated mouse models of inflammatory skin disease: (1) imiquimod (IMQ)-induced psoriasis; and (2) oxazolone-induced atopic dermatitis.

[0203] 5.1 Imiquimod (IMQ)-Induced Psoriasis

[0204] Psoriasis is an immune-mediated chronic inflammatory skin disorder characterized by scaly, reddened skin lesions and thickening of the affected skin as well as epidermal and/or dermal cellular and histo-pathological changes. Topical application of Toll-like Receptor 7/8 activator, imiquimod (IMQ) is known to cause psoriasis-like skin inflammation both in humans and mice. See, e.g. van der Fits L. et al. Imiquimod-induced psoriasis-like skin inflammation in mice is mediated via IL23/IL17 axis; J Immunology, 2009, 182:5836-5845.

[0205] In this study, BALB/c mice received daily topical application of 5% IMQ cream (47 mg/day) on the back skin (area: 4 cm x 2 cm) for 6 consecutive days. Test items were administered once daily from Days -7 to termination and included live purified individual bacterial strains or vehicle (bacteria freezing media) by oral gavage once daily, approximately 1 to 2 hours after IMQ application. Animals receiving positive control were given 0.05% clobetasol cream (62.5 mg/day) applied topically approximately 1 hour after IMQ application. Skin evaluations were performed daily starting at Day 2, including evaluation of back skin thickness using an Engineering micrometer.

[0206] As shown in FIG. 12, administration of Anaerostipes rhamnosivorans P127-B2a as well as clobetasol led to a reduction in imiquimod-induced skin thickness compared to the vehicle control (at day 6), whereas administration of bacterial strain X did not.

[0207] In a second similar study, administration of Anaerostipes rhamnosivorans P127-B2a (AR) as well as dexamethasone (positive control) led to a significant reduction in imiquimod-induced skin thickness (FIG. 15A) and total psoriasis area and severity index (PAST) score based on erythema (0-4), edema (0-4) and desquamation (0-4) (FIG. 15B) compared to the vehicle control (at day 6). Skin samples were harvested at termination and assessed by Meso Scale Discovery (MSD) analysis for levels of pro-inflammatory cytokines and chemokines (normalized to homogenate protein concentration). As shown in FIG. 16, oral dosing of Anaerostipes rhamnosivorans P127-B2a (AR) led to significantly reduced skin levels of (A) IL-17A, (B) TNF-α, (C) IL-1β, (D) KC/GRO (keratinocyte chemoattractant (KC) chemokines CXCL1/2, mouse homologues of human growth-regulated oncogenes (GRO)), and (E) IL-4, in comparison to their skin levels in vehicle control-treated mice.

[0208] 5.2 Atopic Dermatitis Models

[0209] Atopic dermatitis, also known as atopic eczema, is a type of inflammation that results in itchy, red, swollen and cracked skin which thickens over time. Induction of atopic dermatitis in mice through the topical application of oxazolone in mice has been previously reported. See e.g. Hatano et al., 2009 Maintenance of an acidic stratum corneum prevents emergence of murine atopic dermatitis. J Invest Dermat 129: 1824-1835; and Ishii et al., 2013 Antipruritic effect of the topical phosphodiesterase 4 inhibitor E6005 ameliorates skin lesions in a mouse atopic dermatitis model. J Pharmacol Exp Ther 346:105-112.

[0210] In a first atopic dermatitis study, on Day 0, BALB/c mice were sensitized with a single topical application of 60 μL 0.3% oxazolone (Ox) on the back skin. Starting from Day 5, the animals were topically given Ox challenge (60 0.3%) on the back once every two days until termination. Test items were administered once daily from Days -7 to termination and included live purified individual bacterial strains or vehicle (bacteria freezing media) by oral gavage once daily. Animals receiving positive control were given topical application of 0.05% clobetasol cream (62.5 mg/day) on the back from Days 1 to 21. On days of challenges, test items and clobetasol were administered 1 to 2 hours after oxazolone application. Skin evaluations were performed every other day starting at Day 5, including evaluation of affected skin for erythema or redness, and back skin scaling, in accordance with the following scales:

[0211] Skin erythema or redness:

| | |
|---|---|
| None | =0 |
| Slightly Red | =1 |
| Moderately Red | =2 |
| Markedly Red | =3 |
| Very Markedly Red | =4 |

[0212] Skin Scales:

| | |
|---|---|
| None | =0 |
| Slightly Scaly | =1 |
| Moderately Scaly | =2 |
| Markedly Scaly | =3 |
| Very Markedly Scaly | =4 |

[0213] As shown in FIG. 13, administration of Anaerostipes rhamnosivorans P127-B2a as well as clobetasol led to a reduction in oxazolone-induced skin redness compared to the vehicle control, whereas administration of bacterial strain X did not. Similarly, as shown in FIG. 14, administration of Anaerostipes rhamnosivorans P127-B2a as well as clobetasol led to a reduction in oxazolone-induced back skin scaling compared to the vehicle control), whereas administration of bacterial strain X did not.

[0214] A second atopic dermatitis study was conducted in which 0.15% 2, 4-dinitrofluorobenzene (DNFB) was topically applied on days 1, 5, 8, 12 and 15 of a 15-day study to induce atopic dermatitis-like lesions in mice. Test items were administered once daily from Days 0 to 15 and included live purified individual bacterial strains or vehicle (bacteria freezing media) by oral gavage. Animals receiving positive control were given oral administration of Dexamethasone (10 mL/kg) from Days 0 to 15. On Days 5-8-12-15, skin clinical scores were recorded based on erythema (0-4), edema (0-4) and desquamation (0-4). As shown in FIG. 17, administration of Anaerostipes rhamnosivorans P127-B2a (AR) as well as dexamethasone (positive control) led to a significant reduction in DNFB-induced skin thickness at days 12-15 (FIG. 17A) and total skin clinical score at day 12 (FIG. 17B) compared to the vehicle control.

[0215] 5.3 Anaerostipes rhamnosivorans P127-B2a in combination with additional strains

[0216] In an additional DNFB-induced atopic dermatitis study, skin conditions were assessed in animals administered the combination of Anaerostipes rhamnosivorans P127-B2a (AR) plus a Christensenella strain, Christensenella sp. P152-H6d (ChA), plus a Faecalibacterium prausnitzii strain, Faecalibacterium prausnitzii P162-C10a (FP), in equal amounts (once daily) for the duration of the study. Single strain test groups were administered Christensenella sp. P152-H6d alone, once daily for the duration of the study. The negative control group received vehicle only once daily for the duration of the study, while the positive control group received Dexamethasone. As shown in FIG. 18, administration of ChA alone resulted in a reduction of erythema (redness) (FIG. 18A) as well as edema (thickness) (FIG. 18B) compared to administration of vehicle only. However, administration of the triple combination of ChA +FP +AR resulted in an enhanced reduction of both erythema and edema compared to administration of ChA only.

### INCORPORATION BY REFERENCE

[0217] The entire disclosure of each of the patent and scientific documents referred to herein is incorporated by reference for all purposes.

### EQUIVALENTS

[0218] The disclosure may be embodied in other specific forms without departing from the spirit or essential characteristics thereof. The foregoing embodiments are therefore to be considered in all respects illustrative rather than limiting on the disclosure described herein.

[0219] Scope of the disclosure is thus indicated by the appended claims rather than by the foregoing description, and all changes that come within the meaning and range of equivalency of the claims are intended to be embraced therein.

The application's sequence listing, which the Patent Office published only in electronic form, follows.

SEQUENCE LISTING (54 sequences)

SEQ ID NO: 1 - DNA, 1429 bp, Anaerostipes rhamnosivorans
cctccttgcggttgggtcactgacttcgggcgttactgactcccatggtgtgacgggcggtgtgtacaagacccgggaacgtattcaccgtgacattctgattcacgattactagcgattccagcttcatgtagtcgagttgcagactacaatccgaactgagacgttatttctgggatttgcttgccctcgcggggtcgcttccctttgtttacgccattgtagcacgtgtgtagccctggccataaggggcatgatgatttgacgtcgtccccaccttcctccaggttatccctggcagtctctctagagtgcccaccttatatgctggctactaaagataggggttgcgctcgttgcgggacttaacccaacatctcacgacacgagctgacgacaaccatgcaccacctgtcacttctgtcccgaaggaaaggtccggttaaaaaccagtcagaaggatgtcaagaccaggtaaggttcttcgcgttgcttcgaattaaaccacatgctccaccgcttgtgcgggtccccgtcaattcctttgagtttcattcttgcgaacgtactccccaggtggaatacttactgcgtttgctgcggcaccgaagcctctacggccccgacacctagtattcatcgtttacggcgtggactaccagggtatctaatcctgtttgctccccacgctttcgtgcctcagtgtcagtgacagtccagtaagccgccttcgccactggtgttcctcctaatatctacgcatttcaccgctacactaggaattccgcttacctctcctgcactctagcattacagtttcaaaagcagtcccggggttaagccccgggctttcacttctgacttatcatgccacctacgcaccctttacacccagtaattccggataacgcttgccccctacgtattaccgcggctgctggcacgtagttagccggggcttcttagtcaggtaccgtcttatttcttccctgctgatagagctttacataccgaaatacttcttcactcacgcggcgtcgctgcatcagggtttcccccattgtgcaatattccccactgctgcctcccgtaggagtttgggccgtgtctcagtcccaatgtggccgtctactctctcaagccggctactgatcgtcgccttggtgggccgttaccccgccaactagctaatcagacgcgggaccatcctatactgccagggcttttcacactgaatcatgcgattctgtgcgcttatgcggtattagcagccgtttccagctgttatccccctgtatagggcaggttccccacgcgttactcacccgtccgccactcagtcattaaggagatccatccgaaaacttcaatccaaaatgcttcgttcgacttgcatgtgttaagcacgccgccagcgttcatcctgagc

SEQ ID NO: 2 - DNA, 651589 bp, Anaerostipes rhamnosivorans
atataaatataacataaataatggaagatgtagtagaatatatgtaaaattattggaaaaaagaaggtttggttcattatataagatccccgtctgcagctggcttttgtctttaagaaataaacagtttaaagaaataaaaaaactgtgaaaggattcccttcattgaatcgtattaatgatagaacgttaaaacatttaagaaagagaaggtggatcaaatgaaagtttcagcagcaatcatcactacaggacttgtgtttttaggaggattttcttcattttccggaagcggggcagcaaaaaatatatcgatccagaaaccggcagtcaagacagtatgtactgtaaaatcatgcaagaaaacaactacgcacaagcatcattccaaagcaaaacatcataagaaaacaaagcattacaactgcggtcgttctaattgtacgattacaaagaaacatactcataaacgccactatgggcatcacagcaacagacacaaaagcagtcaccatggaaagcatcacgcatagaaacaaaagcttataagagaaatgcctgggagggcaagaatgagaagtgaagcagatctgaccaacacaatcgaaatgtattctgatatgctcagaaaaatatgttttatgcatctgaaaaactatagtgatgtggaagatgtgtttcaggacgtatttttaaagtatatgcagagtgacatcagctttgaaaacgaagaacataaaaaggcctggctgatcagggtcactgtgaacagatgcaaagatgtgctgaggaattttttcagaaaaaatgctgtctccattgactctgtcagtacagagccggtgtttttgaaagaaagagatctggatgtttttgatgcagtagcaaagctgccgactaaatttaaaaatgtagtgtatcttttttattatgaagagtatacggtgccggagatcgccctgattcttcataaaaaagaaaacacgatctatacctggcttggaagagcaagaaataagctgaaggaaaatttaggaggtgacttttttgaagaatgatatacacagatcttttgagaaaatcaaggcagaagaagagttaaaggaaaaaacaagagaagcggtgttaaagagattagacgaaaggcccagacaaaagagaggcatatacaggttctctgctgcattggcagcggccgcattcgtactttttttcggaattggctcatatcaaatatatttttcagagagcagttatatagatctggatgtaaatccctccatagaattatcggtcaaccgttttgaacgggtgatcagggtgtctgcctacaaccaggacgggaaagaggtgctttccggactggatcttaaacacaaaagctataaggatgcagtttctatccttttaaagaaaataaagaaaaagggatatttaaagaaagacggcatcatctctgtaacggtccaggggaaaaagtcagtaaaatcttctgagataaaggaactgcataccgagatcgaccaatgtgtcagcgggcatgaagttgaagtttatgctgtgtcaaaaacggtgaagaagaaatcccatcactggaatgtatcaccggctaagtatcttgccattaaggaacttcagagggtggaccagacggcaacagtagagacgtgcagggatcattcaatcagtgagatcaaagactacacaaagaaatgtgaggatgagcacgggaaagaccagcagcaggggcagcagggacatcacagacatggaagccaccacgaccattaatctttgagaagggtttcaagtgtgactgtaatatacaggacagatccgcggaccgaagcacagacgctgccctggagtttttcaagcaggatttttacaacggagagcccaaggcccgtactttctgtgctccgtgatgggtccccggtataaaaccgttcaaataaccggtccacgtccagtttttcgggatcatagacaggattggatatctgaaaaatggcacgcccatctggggatagtgtaaggcttatgtccactgtgtctgtcgtataacggactgcgtttgtgatcaagttttgcaggattctgtccagcatactgcggtctaccagtacaaaaacagaggtatcagggattttgatctgtggatgaacatgtctgttctcaaacagcggagcgttctccgccagaaagtcgatcaggaggttggaaatgttgatcttctcccagtgaggttcaatctgttctgtttccagcagcgacaagtcgtaaaagttgtcgatcagatctttcagtcggtaagatttccgaagggcagtttcaacccgcttaagctgatccggctgaagatctgaatccttaagcatttgaaggtggccgaggatcaccgtcagcggagtgcgcagatcatgggagatcccggctatggattccttcagctgttcttcgtgctgcagtatttttgcggtggcggtcctctgccctgcgaaaacagtgttgatctgtccggcaagtaattctaagtccgggtcaacaaaggatatatccagcattttttcggattcacgggtagtcacctgctctatctggcgggagatactgtggatctgtttttttatgactatgtactttatagataagattacggcgagaacaagaagaattaagattacaaagttcataaagcctcccttttagttatttcaaatcgcatcggcggaaaatatgccaggacgcataaatcagcacggcattccaggccacggctaccgccagactttctatagaaaagatgtctgttccggttaccattttgcggatctgaaaggccggaagaaagcggaccggcagtttcagcatcatgccgtatcccagatacaggctggaaacaaaggtgaccagagcggtgacagagagtgcttttgtcatactttttaggccaaaacagcagagtacggggatcagaaaaacagagctgttgagcaggaaggagttgaaggctgcctttgccagcgcatagaaaaagctgcctggatctgacagaccgaagcgtgaaaattctctgatacatccggcagtgggatagaccagcgccagaagattaaacgcagaaagatatacagtagtcttgcttataaaaaccataagccttgaatgaccagcactgatttcctgatggatggtcctgaaggaaaactcttgtccaaggattaatgccaatacgcaggaaatgataatgagcaaaaatgtgctgtcgtataccatgccgttaaatacatcgccgagggagctggcgatacgttcttccgggccgaacagctctgaaacataagtgtccgctgttataaaaccaagcataaaaataagaaaggcactcagccaataagtccggttgtggaacagatgaaaacgctccatttttaacagattaatcaaaatattcacctcatttcaaatccgaacgggaaaagttccagtatgccaacgagtaacagacgaggatccagatacagtcagtaaagaaagcagatatataaaatcccgacagctgattcagagacagaagtctaagctgtcccatgggaagacagaaagccatgaggcgataatgccggccgtttaaaagaaaaagcatgataaaataaagaatcaatagcagagttagtgtcttccccacatccttaaaaagaaacgcaaaaatacagggcagcatgcccatggcacagatgatccagaaagtcatggcagatttcattaaaatcggtgttatgccgctgccgggtattccatacaggatgtatccggtgactgtgtgaagaatcagcggcgaaaaaaggatggcagcactgcccacaagatggactgtggccttagccagcaggatgtttcctcttttgtggccggcgcagacataagcttgtatcgtccggatgtcaaaatcctttcccacaaacaaagcgccgaagaccatgatcaatacatagagaaggggcagggcgtaaagtgcgtgatcaaaaaaagcctgtgcatctgtggggaaagatccgtccagcaggaggatgctgctcagaaggcaggaaaatacagtcagaccccagaaacttttctgccttatcagtttatagaattcagacttgaacagttgattcatgggaagccttacctacctttcttaagaaataatcttctaaagtatcgccggacaggtttaaaccggtcacaaggatgccggactctgacaaaagccgggccaccgtctctacatcatccagagattcatacaggcgtatcgttccgtcgggcataaggcggagctgttctgtgtgcagtttcttctccagtgccaggagagcactttggggattcgttgtttttatagcgatatgtcttttgcactgttcatttaactggctgtctgagagctcttcaatgatacgtcctttgtggatcaggataaattgtgatgctgtctggtacagctcctccagaatgtggctggataccaggatggtcattccatattctttgttcagatgtctgagaagactgcgtatttcaacgataccagcgggatcgagtccgttgataggttcgtccaggattaaaaattccggggtatttaacagtgcaattccgatgcccaggcgttggcgcattccaagggagaagtttctcaccggtttttttgcggtgtcctcaaggcccaccagacgcagacaatctgcgattatagatttgccggggataccgcgggaaaggcgttgtacctccatgttttgaaaagcggtcagattaggatacagagccggtgtctcgatcatgcagcccattcttttacgctgttcctgcagatccgccctgctctgcctgccccagagagaaagcgtgcccttagaggcaaaggaaaggccggctgtaatgcggagaaatgtagtctttcctgctccgttttgccctatgaaaccgtatattttgcctttttccaccgtcagatctacgtggtccagaactggagtatgtctaaaaatttttgtaaggccgtgtgcctctaaaactgtagaacccatatgttgtgctcctttctttagaatacaagtataagtctcaaccttaaagattttcttaaatcagggcacaaaatcataaaataaatcttaagtgcagcgttcagcccttgtgcaggcggtatccgatgccccagacggtatcaatatattcaaagtctggtgacagagtcctcatcttatttctcaaattgctgatatggacgtttaacgtattatcttcactgaaatattcgctgttccaaacactttgaaacagattggattttgaaaatattttgtccggatatctcatgagcagttccagaatcttatattccttggcggtcagtgtaagctcccggcctttcacttgtaccgtatgggcctctacatccaaggtcagttcctgaaattcaagagcatgttctggagctatctgaagctttgccctgcgcagactgctctcgattcttgccagggtttcttccaggtcaaagggttttgtgatatagtcatcagcgcccaggcggagcagatcaattttattttgagtggtaccttttgcggaaatgacgatcaccggaacatcagagcaggaacgtatttctggcaggatctgatcaccacttttatatgggagcataagatccaaaagtaccaggtcgatcttttgttgttctagggtttccccaatatggcgcccctcctgcttgcagattgtcctatatccatgttcacttaaaaaatcagacagaagaagacggatttccttatcatcttcaatgatcaatatcttaggcatatgcgctaccttgcctttctgtaattttgattatagtataacatgggtaaataaatcgtgggatgagatttaaagaaatatccgcttctggatttttaggttgcatatcttgtgttgtttatttaaaatattgataagaagcgaattcccgggaggataaagaatatgatgaaaagaagaaaacaactgatctccctgctgctttccctgatgcttgcggtttctctggcaggatgcagtcttccatccggacagggtggtacagatcaggctgagactgcatcagagcagcaggcaaagaccaatgtacaaaaagagtttgacaagtttttaagccgccaggtaaaagagagcctttcggacaacacactgaatcttcactatcagttgaagaatccggaaaagtatggaataaaaaaggacaaggtttccattgggcatattgtcccgggtactgacgaaaaggcactgaaggaaaacaaaaagacggcctctgaacttgctgagtttgacaggagcagcctgacagaggatcagaagctgacttatgatatattaaaggattatctggatatgctgattgaggacgaaaagtatcctctgtactccaatatcatcggggatgtatccgggcttcagtccaatcttccggtgacgctggctgaatatcagttttatagaaagaaggatatcgaggattatttggagctgttaagccagatccctgattattttacagaggcaggggaatatctgaaagcacagtccaaagccggcctttatgtgacagatcaaacggcagacaatgcggtaaaacagatcaatgattttttgaaggagagcgggaaaaagaatattttaaacgccacctttaaggagcgtatctcttcgttttccgggctgagtaaaaagcagaaggccgaatatagcaaaaagaataaaaagctgctcaccggttctgtttatcctgcattccggaatttaaaaaagaccatactttccctaaaaggtacgggaaaaaacagcgggggcatatgcaagcttaaaaacggcaaggactattatcaactggtgctgcggcagaggacagggacagctaagtccatcaaggagctggaactgaagttgatccagcggatgcaaagctgtataaaacagatgatgcggctcatggagaatgacaagagcctccagaaaaagttttataactttgaccctgtgatgacaaatcctaaaaagattttagcagacttggagaagcaggcgaaaaaggattatccgccgcttaaaaaagtcaattataagatcaaatatgtgccggaagcactggaggataccttaagccctgccttttatatggttccgcctattgatgatgagacggaaaatactatttatatcaacaaaggttccacagataacagcagcctctacactacgttagcccatgaaggctatccggggcatctctatgagaataattatttcctcagcacagatccggatgatatacggctgatcttagatttccccggttattccgagggatgggccacctatgtggaaatgcatgcatacgattacgtgccctacgataaatctgtcggaaagttaaagcgggtgaacgatgagatgaacatgtgcctgggaagttatctggacatcaaagtcaactacagtggctggagtcttagcaaggcgaaggattttatgaagaatatggggtacggtacctctggtgttgaaaatctatatcgtcttgtggcggcagaacccggttattaccttaagtattatgcaggagccctggagttccaggaactacggagcaaagcttccaaggaactcggcaagaagtttaaaataaaagagtttcacaaagccatccttgaaaatggcccgagtaattttgcaactgtgagaaaagctgttgaggcatacatcaaagaaaataagtaggaaggaagtttataagatatatggaagatatgtttcaggtgggggccattgcctcgacccatggtgtccgcggagaggttaagatctaccccatgactgacgatgtagaacggtttaaagacctaaaagaagttttgctggatactggaaaggaaatgcgtttgctgcatgtgcagtcctgcaaattctttaagaaccagccgattttaaaatttcaagagtttgatgatatcaatgacatcgagcagtataaacgctgcggactgtttgtcaccagggagaatgcggtcaaactcgatgagaatgagttttttatcgcagatatcctgggatttgatgtctacagggaaactggagaaaaactggggatattggacgatgtactccaaactggtgccaatgacgtgtatgtagtaaaaatggaagacgggaaagaagtattgcttccggctatcaaggactgtataaagaaggtttctctggaagaaaagaggatcgacgtttttgtaatgaaaggattgttggatgaataagtttcatgtcttgaccctgtttccggaaatgattgaaaacggatgcaatacaagtattttaggccgtgcggcagaggcagggcatatcagcgtggaagcggtcaatatccgtgattttaccagggacaagcataaaaaggtggatgattacccatatggagggggagctggcatggtcatgcaggcagaaccgatttacctggcttatcagcatatagaagaaaagatggaaaagaaaccaagggtcatttatgtgacccctcaggggaaagtcttccaccaggagatggcaaaagaatttgcaaaggaagaagaacttgtctttttatgcggccactatgaaggcgtggatgagcgggtgttagaggaaatcgtcacagattatgtctccatcggggactatgtcttgactggcggggaacttccggccatggtgatgattgatgcgatttcaaggctggtcccgggagtgctcaacaacggtgagtcggcagagtatgagtcctttgaaaacgggatgctggaatatccccagtataccaggccaccggagttcctcggcagaaaagtacctgaggtgttgctttccgggcaccatgcaaagattgaagaatggagaaaagaacagtcttatcggaggacgaaggagagaaggccggatctgctcataaaatagaaaaaaatccttgcaaagaaaacgctgatatgctatcatatagcagttgttataaataggatggtcctctgttacggaaggtattaagaacatctaaaatgatttgaggaggaacaacatgaacgatatcattaaaagcatcgaagatgcacagttaaaagaagttgcagatttcagaacaggtgatactgtaaaagtatacggaaaagtaaaagaaggaaaccgtgagagaatccaggtatttgagggaactgtcatcaaaagacagaacggcggagcccgtgagacatttactgtccgcaagaattccagcggtatcggcgtagaaaaaacatggcctgtacattctccgatcatcgaaaagatcgaagtagtgcgcaaaggtaaggttagacgcgcgaagttatactacttacgtgaccgtgtaggtaaagctgcgaaagtaaaagaaagagtatagtctgtccgattcagggaaaagacaaacagggacgagccggagcttgtccctattttattccataggaaagttctgcgaacctccctatggaataaaatagacctgcgggcattatgcacacaaatgcgtatagaaaggatgtgaggtctgtgagtggttatacggtaacgtatcagatgagaaagaaaaaaagacagagacgggataagatcgtggcctatctgctggcttttgtggccgttatttttgccgcatttttaattgttcgatttctctgtgccagctatacggtccagggagattccatgcttcccacatatcagagcggggaaaaaaggcttgtgaaccgcctgatttataaagtgaaaagtccgtcgcgatatgatataatattgttcgaatccgaagatgaaaataaccggcagtattatgtaaagagagtcatcgggcttcctggtgagacggtaacgatcaagaatggagacgtttacgtggacggcagaaaagccagaagcttcggaacagaaaagatcctgtccccgggactggcggccgacggtgtgaaactttccaagaatcaatattttgttataggagataattacaataacagcgaagattccagaagtgctgttgtgggaaatgtaaagaagacacagattataggtaaggtcggcatgaagtattggccttttggataaagaaggaggatctatgcagtttcaatggtacccaggtcatatgaccaaggcaaagagaatgatgcaggaaaatatcaagctgatcgatattgtgatcgaattggtagatgccaggatcccatttggcagcagaaatcctgatattgaccagctggcccagaacaagtccaggctgatactgctgaacaagacagatcttgcagacagcagaaaaacagaactgtgggagcagtacttcaaagagaagggctttttcgttggaaaagtcaattctcagaaaggaacaggcgtcaaggcggtccaggggattgttatggaagcctgcaaggataagattgagagggaccggaaaagaggaatcaagaaccgccccatccgtgcgatgatcgcagggatccctaatgttggaaagtctacttttatcaacagtctggtgggaaaagcctgcactaagacgggaaataaaccgggagtgaccaaaggaaagcagtggatcaagctgaacaagaacattgaacttttggacacgccgggaatcttatggcccaagtttgaagaccagaccgtaggccttcatctggcactgatcggttccatcaaggaagagattttgaacagggaagagatggccatggaactgattccgtttttggtgaaagaatatccggggattttagccggccgctaccaagtggacgaggagagcaatacattaaagattttagaacagatcgcagagaaccgtcactgcaaagaaaaagggaatcagctggactatgagaaggctgcacatattctgctggaagagtacaggaatggaaagcttggtaagatctcgctggaagttcccgctgactatgaggagtaatcaatcacatgccgtttcgaacaaggcgcagggcgcaccgtttttattctgaattatttttttgggcctccactgtggtgatcgcagtttttgtatcttttgtggtcattacttttgtgggggaaagaactggggtttctggttattccatggagcctactttgaaggataaagacagcgtgctggtggataagatcacgtaccgttttcgggatccggagcggtttgaggtggtggtgttccccaatcctgccgacagaaaagaaacgctggtaaagagagtgatcgggctgccgggggagacggtggagatccgaagtgaacaagtgtatgtcaacggacagaaggtctcccatgattactccaaagaccatatgacacttcctatcaacgtagaggggagtatcacattaaaagacgatgaatattttgttcttggagataacagaaacaacagcatggacagcagagatatccgtgtggggcccatatacaggaaagagattaaggggagagttatcttccgtctgtttccaatcgggcatgcgggaagaatccgctagacgaggtacttatgacgaaacaggaagaaaaacgattagaaaagttaaacgcagagaaggaacgtatgcatgggatgtttttctatgaaagggaatacggaagcttctcccatatatgcggtattgacgaagtgggccgggggccgtttgcagggccggtggttgccgcggcggtcatccttccgaaggactgtgatattttatatttgaatgattccaagaaagtttctgcaaaaaagagagaagctttgtatgatgagatatacgaaaaagctgttgcggtggggatcggtatggtatcggaaaaggtgatcgatgagatcaacatcttaaatgcaacctatgaagctatgatgatggctgtgtcaaagctttctgttgtaccggatcttttattgaatgacgcagtcacaattccgggaattgacatagaacaggtgccgatcatcaagggagacgcaaagagcgcttccatcgctgcggcaagtattgtggcaaaggtgaccagagaccggatgatggaagagtacgaccagatctatccccagtaccagtttgcgaaaaataaagggtatggaacaaaagcccacattgaggcaatcaaggaatccgggatctgtgaccttcaccggaggacatttgttaggaagtacatatgagaaatcagagaaaaaccgggatggagaaggaagaaactgcgtgccggtttttggtgtcccagggttacgaagtactggagaggaatttttattcccattttggggagattgacattgtcgccagagacggggaatatctcgtgtttgtagaagtgaagtacaggaaaaatgcggcatacggatatcctttggaggcagtcaatggtgcaaaacagcagaagatccgcaaaaccgcggagtattatctataccggcacaacttgttttcggtgccggcaaggtttgatgtggtagaaatcttaggaaagaagatcagggtgataaaaaatgcattttaagaagtcaaacgaaaatcattccacaaaactgaacgaagggaaggttccatatctgacattcagtaagctcagccgggcaggagtcgtccatggcttttccaccagagagggcggagtcagcgaagggatgttctcatccatgaatttgagctatacaagaggagacgatgaggcggcagtagatgaaaatttccgcaggatcggagaggctgtcggcttcgaccacacaaagcttgtgttttcaaaccaggttcatgatacccggatcaaaagagtcggaaaggatgactgcggtaagatcatgacgggcatggacgggctggtgacaaatgtacctggtgttcctttgtataccgggtatgcggactgtgtgccgttgtttttctttgatccagagaaaaaggtggcagccctggcccattccggatggaagggaacggttggaaggatcggcgctaagatggtcaaaaatatgcagggcggatatggatgccgtccggaggatatcgtagcagctgtgggaccgtccatctgtagagactgttatgaggtcagtgaggacgtggcggaacagtttataaaagagttttccgggcatccaaaagaggaattcatggatgaaaagggaaacggaaagtatcagctggatctctggaaagcgaatgagatcattttaacagaagcaggaatcttaaaggaacatctggatatcactgacctgtgtacctgctgtaacagtgagtatttgttttcacaccgggcgaccaaaggacggcgtggaaatttaggggcattcattgtgctttgaatatgatataatgggcacagagtagtgatcatattatctttacaactggggaagattattttataatcaaacggaagttttaggaagaaagattccatacagagaggaaataaatatgagtaaaccgatagtagcaattgtgggaaggccgaacgtgggaaaatccacgctgttcaacgcacttgcgggcgagaatatctctatagtaaaggatacgcccggagtgaccagagacaggatttatgcggacatttcctggctgaattataattttacactgattgataccggagggatcgagccggactcaggagatgtgatcctttccagaatgcgggagcaggcacagatcgccattgagacggccgatgtcatcgttttcctggtggatgtcagacagggcttggtggatgctgacttccaagtggcagacatgctgagacgttccagaaagccggtcgtcctggcagtcaacaaggtggacaactatgataagttcctggcggatacctatgagttttataatctggggctgggagaccctcatccggtttctgcaaactccaagttagggttcggtgacctgctggatgaagtggtagagaactgtgatcctgaggcgttggaggaagaagaggatgaacggccgaagattgccatcatcggaaaaccaaatgcaggaaagtcttcgatcatcaataagatgcttggtgaggagagagtcatagtctctgacgttgcgggcaccacaagagatgccatcgacaccgtcattgagaaaaacggcaaagaatacgtgtttatcgacactgccgggctgcgcagaaagaataagatcaaagaggaactggagcgctacagcgtgatccgtactgtatctgccgtggagaggtgtgatgtggcagtcctggtcatcgacgccacggaaggcatcacagaacaggacgcaaagatcgcggggattgcccatgagagaggcaagggaatgatcatagcggtcaataaatgggatcttgtggagaaggatgacaagacgatttataagtttaccaacaagattcgtgaagtcctggcttacatgtcctatgcggagttagtttttatctcagcgaagacaggacagcgctttccgaagatttttgatatgcttgacgctgtcatcgagaaccacgcaatgcgtgtgcagaccggagtgctgaacgagattctgacagaggcagtggccatgaagcagccgccgtccgacaagggaaaacgcctgaaactctactatatgacacaggtatcggtaaaaccgccgactttcgttgtgtttatcaatgacaagcagctgatgcatttttcatatacccgttatattgaaaaccagatccggaatacttttggattccggggtacgccgattcatatcattgcgcgggaaaggaaggaaaagtaatggtcctttgtgtttttctctgcctggctatgggatatctgctgggctgcattcagacaggatacatcatcggaaaaatcaatcatattgatataagaaactacggaagcggaaattcaggaactacaaataccttgagaactctgggaaagacagcggcgctgctgactttcctcggagattccctaaagggactcatcgcagtaaacgctgcgagatacatactgatcccccaattcggcgggatggctcatgaagctacactttggctggtgactggttttgcagtggtcatcggacataattttcccttttacctgcactttaagggagggaagggaatcgctactacaggcggagtgatctttgcatttgactggaggctggggcttctctgtctgctgatcttctccgtagttacggggatcagcagatatgtatcattgggttccatttgtatggtgcttgtgatcccttttattttatatttcagcagtcccaacgattggcagctggtggcagttggatgtatattcacagcgatggcggtctggagacatagggcaaacattgaccggctgattcacgggacggaaaacaagcttgggcagaaggtaaaacgttaggaggaaactatgaagaaggtaagtgtgattggtgcaggaagctggggaagtgctttggcagttctgttggcgaataacggtaatgaagtgaccctgtggtctcatgacaaacaggaagtagacatgcttatgaaggaaagagagcagaaggataaactgccgggagtgaagctgcccgacaacgtaaaagtcagcggcgatctagaggaaactctttctggaaaagatgtcattgtgatggctgtgccgtctccggtggtccgttccatggcagagcgcatggctccttttatcaaagaaggacaggtaatcgtcaacgtagcgaagggaatcgaagacgagactttcaaaactctcactgagatcatcgaggaagagattcctggcgctgtagtctgcgtactttccggaccaagccatgcagaggaagtcggaagaaagcttcctaccacctgtgtagttggcgcaaaaaaagagagtgtagccgttatgctgcaggatctattcatgaatgaagtattccgtgtctatacaagcccggatattatgggaatcgagcttgggggagcgttaaaaaatgtcattgctcttgcagcaggtgtcacagacggtcttggatatggcgataacacaaaggctgcattgatgaccagagggatcgcagagcttaccagacttggtgtggcacttggaggacagattgagacctttaccgggcttaccggcattggtgacctgatcgttacctgtacgagcgtccacagccggaacagaaaagcgggtctcttaatgggacagggatactctccgaaagaggctatggatgaggtaaagatggtggtggaaggtgtttactccgccaaggcagcccttggccttgcaaagaggaagcatgtcaatgttccgatcatcgaggaagtcaaccgggtgttgtttgaagagaaggatccaagggaggccgttgcagaccttcttttaagggaacgtaaaaaagaacatacaaatcttacatgggaagaagaataggaaggataacgttatggcagaattcgcggaaatgtcaaaggaagaattggaacaagcaaaggaagcagcagacaatgagtatgaggaattaaaaagcaggaatctaagtctggacatgtcaagaggaaaacctgcgccttcccaggtcgatcacgccaacggcatgctgaaagagatgaccgaatatcacacaaaggcgggaatggatgtgagaaactacggtgttctggacggaataccggagatgaaggaacttttcagtgaattgcttgatatcaatgctgacaatctgatcgttgggggaaatgccagcctgaacctaatgtttgacgcgatgatgcgtctgtttgtgtttggtgctatgggagaaaaaccatggggacagctcgaaaaagtgaagttcctctgtccgagtccgggatatgaccgtcattttaccatctgcgagacactgggtgtggagatgatcccggttcctatgacaaaagaaggcccggatatggatgtggtagaagaactttccggaagcgatgagtccatcaagggaatctggtgtgttccgaagtattccaatcctcagggtatctgctacagtgacaagacagtagaccgactggcttccatgaagactgccgcgaatgacttcaggatattttgggacaatgcctacggtgtgcatccggtatttgaggatgtgaaagtaaagaacattttagatgcctgtgaagaggccggtaccaaaaaccgtgcttattatttcttctctacatccaagatcacttttcctggcgcaggtgtcagcctgatcgcctccagtcacgagaatatcaaggagattaaaaagatcatgggtgcccagaccattggctatgacaaagtgaatcagctgcgccatgtgcagttctttaaaaatgctgaggggctcagggcccacatgcaggttttagccggctgcatgaagccaaagtttgagacggttcttaaatatctggagaaagaacttacaggaactggacttgctgtatgggaggagccaaagggcggatactttgtttcagtggatgtatatcctggttgtgcaaaggaagtggtccgtctggcaaaggaagcgggagttgtactcaccggcgccggagctacctatccgtataaaaaggatcctaaggacagcaacttaaggatcgcacctacctaccctacagtagaagaattggagcaggctatggaattattctgtgtctgtgtaaaaaaggccgggatccagaagcttctggaacaaaccgacttatagtacataaggaaaagaaggctttacctggggatggtagagccttcttttaatttcagaggcaagatatgtcctcacccgatatgtttttatttgtttactttagttttcgataaacggtgatcagcatggttacataacaggcggttcctccgataaagtttgagataggctctgctataaaaacaccgttgacgcccaaaccgaacagcatcggaaggcagacagttaaaggaagcacaatgacaacctttcggaagattgaaaagaagatggcctgtttggatctgttcagggcaatataggtggactggcctgaaaactgtagggacatcataaagatcccaaagaaatacagcttcagggcaggcacgcccttagcgatgatggaggggtcgctgttaaatatatggataaaaaagtggggagccaaaagcaggatgccccagactgcggatgtatagacaatgcaggcaagggtcataaactttatagcctgttttacccgttggtactgttcagccccgtaattataacccagcaccggctgtgcgccgttggtaatgccggtcactggcatagtgatcacttcccggatagagtttaagatcgtcatgatcgtcacgtagagatcccctccgtaaatctgtaaggttgcattgcaggcgatctggacgatgctgttggtgatggacatggtaaacccggagagacccagagcgatgatctgtctgacaagagtcaacttcagactgaaatattctatcttcagttttaagatggtcttttttccggccaggaacacaaggacccatacagaagaaataaactgggagatgactgttgccagagcggcgcctctgacacccagatgcagcacaaagataaagacagggtctaggacaatattcaagattgcaccgattaaaaccgtcaacatgcctgtcctggcaaatccctgtgagttaataaaactgttcattccaagaccgatcatcacaaaaacagatcccagcagatagattgtgatatagctgtctgcatatggaaatgtagcctggctggccccaaacgcatagatgaccggttttttaaatataaggatcacggcagtgagcagaaggcccaggacgatcagaaggaaaaaagaattccccatgatctcctcggcctttttttgattcccctttccccgctcaatagaacataagggggcaccgcccataccgattaaattggcaaaagccatgatgatcgtgatgataggaaaggtgattcccacgccgccaagggcgagagcagcatccgtccccatccttccaatgtagatacggtcaacaatgctgtacagaacattgatcagctgagccagtgtcataggaacagccaggtttataatatttctcgttacacttccctttgtaaaatcatttgtcttattttccataataaacgccgccttaatgtctaggaacttacttagtgatatatactttttatagtaaaattgagtagatgatctcttctttcccactttgttccttagattggtgcttctattttataatagggagctccaaaacacaactaggagcggcagaaaacactttgtgtttctatattgattatggtagaataaaaaaatattaatgacaataagaaaataaggagtgattccatgaaatttacaaaaatgcacggctgcggcaatgattatgtatatgtgaactgttttgaagaaaccatcgagaacccaaatgcggcagctaaatttgtcagtgaccgccactttggcatcggttcggacggcatgatctgtattcacccttccgataaagcggatttccgcatggcaatgtacaattctgatggttccgagggagccatgtgcggcaatggagtacgctgcatagcaaaatatgtctacgactatggattgacagataaaacaaggattaccatagagacaaagggcgggatcaaggaactggatcttacggtagaggacggaaaggtcacctgggtcaatgttgatatggatgcaccggtgctggacgctgagaagattcctgtgaactatgacgaagaaaaacaagtcattgataagcctgtcatcgtggacggcagagagtacaggatcacctgcatatccatggggaatcctcatggtgtcgtgtttgtggactctgttgacgatcttgagatcgaaaggcttgggccaatgtttgagaaccatccaatgtttccggaccgggtcaacacagaattcattgaagtcatcgatgaccatacggtcaaaatgcgggtatgggaacgcgggtcaggagagacactggcatgcggaaccggagcatgtgcgagcgcctacgcatgttatttaaataagaagaccggcaaaaatgttctggtccacctgctgggcggagatcttcagattaattacgatgaagagaaacataccatctttatgaaggggccggccacaaaggtatttgacggggagattgaccttacggaagttttggcttaggaggaatctatgaaattatcaaaattattggaacgatcagaatatagactcgtacaggggcaggaagatacagagatcagcactcttgtctatgattcaagaaaagtggaagaaggaagcgtttttgtctgcatctcaggagcagcatttgacggacataagtttgtcggccaggtggcagaacaaggtgccaaagccgttgtcgttgaacgggatgtggaggtgccggaaggtgtgactgtgatccggtttgacgacacaaggagagcgcttgcggaaatgtccgcggcttacttcggataccccgcagaggagcttacgactattgggattaccggaaccaagggaaagacaacgatcacttacatgatccagtctgttcttgagcatgcggggcagaagaccggactgattggaaccatcgagactgtcatcggagaggagcggattccttcggtcaatacaactccggagtcttatgtgatccaggaatcattccgcaggatggccgatgagggctgtaaaaacgtggtgatggaggtgtcctcacagggattgatgctgcaccgggtcagcggattcactttcgactacggaatctttaccaatcttgccgaagaccatatcggggaaaatgagcacaaggatatggatgattatattcactgcaagtctctgctgtttcagcagtgcaggcagggaatcgttaacggcgatgacgcttatgtggagaggatcatcaaaggacatacctgctccctggagacgtttggcatggatgaggctaacgatgtgtatgcccaaaatataaagaggatccaggaacccggctatctgggtgtttcttatgatctgaagggaaaggaagagtacaatgtccatgtggatatccctggagattttacggtttacaattcattggccgctatctctctgtgccgccatatggggatccagaagtccgatgtgctggatgcgttaaatacgattcaggtaaaaggacgtctggagattataaaaacaccgggagaatatacactgatgatcgattatgcccacaatgccatgagtcttgagagtcttctcacgacaatccgcaaatacgaaccaaaaaagatctactgtctgttcggctgcggaggcaaccgggcaaaggcaagaaggtatgagatgggagaagtgtcctcaaagcttgcagacttaacggtggtgacttctgataatccaagaaatgaagaacctatggatattattgatgacattttagttggcgtccacaagggtccgggcaaatatgtcacgatcccggacaggaaagaagccatccgctattgtatggaacatgccggcaagggagatatcgttattcttgctggaaaagggcatgaggattaccaggagatcagaggggtcaaacatcatatggatgaaagagacctgatccgtgagattatagaggaagcataactgaatggaaagctgaagacggatggcacataagtgcttgaggcctttaagataaaagaaatcaaggaaaaacggcagctttgtaagtctgtcagagaagagattaggaggaactatggatagcagaatcaaaggaacaacaaaattacttggactgatcgggtcaccggtgggacattcaggctcaccggcaatgcacaattatggctttcaggcattggatattgatgcggcctaccttgcatttgacattaaagaagagcaggtaaaagacgccatcagcgcagtccgcactctgaatatgaaggggatcaatgtgacaatgccgtgtaagacagaagcggcaaaatacatggatgagttatctccagcggccaggctgatcggtgcagtcaatactgtcgtgaacagggatggaaaactttacggtcatatcactgacggcgaaggtttcgtggcaaacttaaatgaccacggtgttacagtgcaggaaaaggatattgtaatcttcggcgcaggaggcgcggcaactgcgattttagtgcagtgtgccctggacgatgcaaaagaaatcacggtgatcaatccaagagatgatttttttgaccgtgctgaggagatgcacaaaaagctccgcgtggaagctccggactgcaagatttcactgatcgatctggcagacgaagaggctgtaaaaaaggcagttttaaagactgatatccttataaacggaactctgcttggaatgaagccaaaagaagatacttctgtgatacaggacacaagcctgttccatgaggatatggttgttgcggacgttgtatataatccaaaagagacgaaactcttgaaagatgccaaggcagcaggctgcaaaacggtacagggagacggaatgctcttatggcagggagttgcagcgtttaaactgttcacaggacaggatatgccggtaaaagaagtaaaagaaaagttcttttcataacattttcaccagttctccggcttgctgtctcagggacgtaagattttctaactttcagcaaagtctctccggcggcccgttcggaactcgctgacgctcagacagcctcactgcgcgatgcgcaccgcctccgagtctttgcttcaagaagaaaaactaacgtcccttcgaatgcaaggcctccgaactggtgaaaatggacgtaatgtctgctggagcaggctgctacaagacaaaaggcgccacctctaagagtttttcttcattgttggaaggaggcctttccagagccgactggaaacaatggagaaaaactcataagataatacatagtaagataagagataaaaggattgcgcaggcagtcctttttttctttgtttcagtcataacttgcgaagagcctgcatatactttaacagtctatcgtaggaggatattatggattactttaatgtatataaggatattatggccaggaccaatggagaaatctacattggtgtggtaggtcccgtgaggactggaaagagtacatttatcaagcggtttatgaatctgatggttctgccgaatatggaaaatgagaatgaaagaaaccgtgccaacgatgagcttccccagtcatccagcggaaagaccatcatgacaacggaaccgaaattcgtgcccaatgaagcggtggagatcaatgtggatgacggcatcagcatgaaggtgcggctgattgactgtgtcggctatatggtaaacggggcagtgggccatattgaaggggaagaggaacggcttgtaaagacgccgtggtttgattatgagattccctttacaaaggctgccagcatcggaactaaaaaggttatcacagaacattctaccatcgggattgtggtgacaacggacggttctttcggggatattgaagccgcaaattaccaggagccggaagaagagacgatcaaacagctgaaagcattacataaaccatttgtggttctgttgaataccagccgtccatattccgaggagacagtgaaacttgccaaggaaaaagaggcaaagtatggagcaaaagtactcccgatgaactgtgagcagctgaagaaggatgatatttattttatattgaaaagtgttctgatggaattcccgatctcatccatcggatttttcgtgccgaaatgggtggaggtgctcccgaaggaccataagatcaagcaggagatcatggatacggcccgcaggatgctcatggagaaggataccatgaaagacatctatgaggaggaagattatgaaaatcaatacataaaacagtggaaactggattctgtagccatggatactggggtgatacggatcgcggttgatatggatgattcttattattatgaatttttaagcgataccattgggctgccgatcaaaaatgagtacgaatttatttctattatgcaggatctggcaaggcagaagaaagaatacgaagaggtggcagatgcactcaacgcggtgaaacaacgtgggtatggagtcgtgacgccgaccaagggagacattgtgctggaagaacctaaaatcgttaaacacggcaataagtacggtgtaaagatcaaagccagtgctccgtcgatccatatgatccgagccaatatctccacagagatcgcaccgatcgtaggagaagagtatcaggcgaaggatctgatggaatattttgacaaggggaagagtgatccacaggagagtatctgggatatcaatatctttggcaagacattggaacagctggttggagagggcatgcagtcaaaagcccagaagatgacagaggaaagccagcaaaaactccaggatactatggagaaaatcgtcaacgaaagcaatggtggacttgtctgcatcatcatttgagaatagctgggcaccattgacaaatggggaaaaaaagaatatactttggtaaacaaaatattaggaaagcgcaggataaatgataagatatgtcgattagaatattaggtacaggaagttatcttccggagacgattgttacaaatgatgatttagcaaaagtgatggataccagtgacgagtggatcgccagcaggaccggtatccgggcgcgtcatatttctgtggacgatacaacatccggcatggcagtgaaagctgccaaagaggccttgaaggaaagcggagtagctccggaggagttggactgtatctttttcgcgacattgtccggcgaccgggctactcccaacggtgcatgtgatgtgcagaaggctatcaaggctacaaatgcagtctgcatggacttaaatgcggcctgttccgggtttgtctatgcgctgaccacggccatcgcatatgcaaagtcaggcctggctaagaaaatgctggtgatcggtgtggagaccctgtctaagatcgttgactggaaggaccggagcagctgtgttttgttcggggatggggcaggatgcgcagttgtggaagcggatgattccagagaagtctttatcgactatggatctaacggagacctgggagaagcactgacctgcggtgagagaaaattaaataatttattggtagagaatcatgagcctttagaaccggtctttatggacggacaggaagtataccgctttgcggtaaaaacggttccaaagacgattgaaaatgtacttgagaaagcaggagcttcaaaagatgagatcaaatactacgtcctgcatcaggcaaataaacggatcattgattcggcggcaaaacgtctgaagctggatatcgaaaagtttccgatgaatctggaccgatgcagcaacacatcttcggcgagcgttccgatcttgctagacgagatcaacaaaaagggaatgctggaaagaggagataagcttgtgctgtgcggattcggcggcgggctgacctggggaacgatttatttagaatggtaagaaacggccggaggatcttccggcatcatctgagaaaaaagtagggctttcctgctttttttgtttattggggaggtgttcgtttttctccattgccttccgtctgctctggaaaggcttcctccaggcaatggagaaaaacgaacaacccttttagatcctttggatgggcatgctttgcacgacaaggtatacccacagggcatcccgtattctggatccttcggatgggcgtgcttcgcacgtcaaagtatggtataatatattaatatagattaagggaggtgttggcaatggaattacagatgtggagagagatcctttgcccttacgacttggctgtggaggagttaaagctgaagttcgtgcacatcatgaatgaatatagaaccgcaggccgttattcaccgatcgaacaggtggacggcagagtaaaaagcatttctagtattcttgataagatgcagagaaagaaaataaacattaatgaaatagagacagatctggaagatattgcaggcatccgggtcatctgtcaattcgtcgaagatattgaccgtgtggttgagatcattgaacagcgttctgatatggagatcaagacgaaaaaggactatatcacaaaagcaaaagacagcggataccggagtttccatgtgatcatttattatgacgtggataccatctacggcaagaaaaagattcaggcagagatacagatccgtactcttgctatgaatttctgggccacagtagagcattccctgcagtataagtataaagagaacataccggagcacataacggagaagctgatgaatgcagcagacgccattgtggtcctggataaagagatgtccattgtcagagatgagatcatggatgcccagaattctttccgaaaaaaggcaaatattgtttccgagattctgtcaaccatgcagaatttatataaagtagcaaacaaacaggaagtcatcaagatacaggacgagttttacaaaatatatgagacaggagatatggagcagctgatccattttaataagcagctggatatcattgcggagggctaccgtgcacagagcctgtcataggagaaattatggaattaccacagttattcgttgagaagatgaaatcccttctgggggaagaatacagcgattatgaggcgtgcctccaaaggccaaagcagagcggcatccgcgtcaatacctccaagatttccgtggaggagttccgaaagatcgcaccgtttgagatagaacctgtgccatggaccgaaaatggattttttgtcgaagccaaagaccagccggcaaaacacccgttttatcatgctggcctgtactatatccaggagcccagcgccatggctccggctgcatttctgccggtagagccgggagacaaggtactggacctgtgtgcagcgcctggaggcaagtccacggaactgggagcgaggcttaagggcgagggccttctagtatccaatgatatcagtattaccaggacaaaagctttgcttaagaacctggaaatgttcggtatcagcaacagcgtgatcgcaagcgaggaaccaaagaatcttgtgccggtatgctatgagtattttgataaggtgttagtggatgccccttgttctggagaaggaatgtttagaaagggcagcaatgagatcaaaaactgggcggaatatgggatcgaaccctatgtgaagattcagcgagagattatactggatgcggttaagatgctcaaacccgggggatatcttttgtactccacctgtaccttttcaccggaggaagatgagcagctgatcgagtacctgcttcatcaggtgccggagctttctctggttgatatgcctgaggctgatggatttgaccggggacaccctgagtggaccgtgtcgggacttcaggatgtcaaaaagtgtatcaggctctggccacataagatcaaaggggaagggcattttcttgcgcttctgaaaaaagagggagaaccggcagccggcgcagaaggacaaaagcgtgaccgtgcaaagatttcccaggaggcagaggccttcctctctgaatgcaggatggatttggacccaaaccggataaaagaacataaggggagactgatcctcacgcccaaagatctgcctgatcttggaaggctcagggtgttaaggcatggccttttacttggagagatgaaaaaacggagatttgagccaagccaggtgctggccatggcattgtccggagatggatatgcgagaacgctggacttaagcctgtccgatgagagacttatgaagtatttaaaatgtgaaaccatacttgcagatgaaaaggaagacggtatgtatcttgtcacagtccagggatatcctcttggatgggggaaattatccaaaggccggatgaagaataaatatgcgccttcatggagatggatgtgatgaaggcaatgcgtttggacaagtttctgtgcgcggtctgtggctgtaccagaagtgaagcaaaaaaaatggtccgtcaggggagggtcctggcggcaggagaaacagtaaagaaaccggaacaaaaggtagtgcctggacaggacgaggtcacactggacgggaaggaacttaaatacagggaatatgaatatttgatgctgaacaaacctaagggagtggtcacggcgaccagggattccagggaacaaacggtcatggatctgatcccagaagtccataaaaagggtatgtttccggtgggaaggctggataaggatacagaagggcttctgctgataacaaatgacggagagctggggcaccgtctgctgtcaccgaagcatcatgtcacgaagcggtactctgtcactgtaacagggcaaattggaagagcacagcaggaggtttttgagtcgggtatggacattggtgatgagaaaccgttaaagcccgccaggctgaagattttgaagtcaggggaagtttctgaggctgaggtgttcatcacagagggcagatttcatcagatcaagcgcatgtttgaagcggtggggagtcaggtgcttaaattaaagcgtctttccatgggaccgcttttgttggatccggagctcctgccagggcagtccagggaacttacagaggaagagatcagatgtttaaaggagaaccaatgctaaaggataaaaaagcggtaatttttgatttggacggaactttggtggattctatgtggatctggaaagagattgacgaacgttttcttgggcatttcggccttcaggttccagaagggctgaacgatctgctggaaggctacagctttaatgagacggcggagtactttaaaaaccattttccgcttccgctcactgttcaagagattaaagatacatggaaccgtatggcttacgagatgtatacgaatgagatccccctgaaagaaggggtaatcgaatttttggatgtattaaaggacaaaaagctccctattgggatcgccaccagcaattccagagaattgacaaaggcatgtttaaatgcccacgggatcgggcagtattttcagtacatctgtacttccaatgaggtgccaaaggggaaacctgccccggacgtatatttaaagacagcacaggagctgtcggttgagccggaacatattctggtgtttgaggatatcccatatgggatcatggctggaaacagcgccaatatgacgacctgtgccgtcagggatgcttattcccaggcggtggctgacaagaagagggaactggctgattactatattgacacttactttgatatcataaatggaacctatcaatcagtataaccgatacgagaggtgataacatgaagaaagtagcaatcgttacaggagcttcctcaggacttggaagacagttcgttctccagatagctaaaagccatggatttctagatgagatctgggtagtggccagaagagcggaccgccttttagaactgggagtgctggtttccaacattgtaatccggccgattccgctggatctttcaaagaaggacagtatcgtaagaatcaggagtatcctcgcaaaagaaaaaccgaaggtttatgtgctggtgaactgttccggacttgggctggccggcttgtttgacagacaggacgaagaactgctggaccagatgctgaaggtgaactgtctggcactcacaagggtaaccagagctgtcctgccgtacatgccgaagaagtcccgtattgtccaggtggcctcatccgcagcctttgcgccgcagcctggctttgcagtgtatgccgccaccaaatcctatgtattaaattacagcctggcattaagacaggaactgaagaaaagaagaatttatgtcacaaccgtatgcccgggaccggtcaacactgaatttttcgatacagcctaccagaaaaaagaaatgaaactatacaaaaagcttgtgatggcgaagccggaaagggttgtgaagaaagccctgaaagatgtgaagaagggcagggcagtctctgtatacggaatcttaatgaaggccgtgagagttctctgcaagctgcttccaagcagtctgatcgtcaggctgatccattagagggaaacgatatgaaagaaatcaggatttcagacagggaagaagaacagcggctagacaagcttctggcaaaatatttgaacaaggcgcccaagagcttcctttataaaatgctccggaaaaagaacatcaagctgaacggaaaaaaggcttccggaaatgaaaagctgaaatctggcgatgtggtatgtatttacctggcagacgagaccatcgcaacgtttcgggaggagccgaaggcggagaagacaagagcggatctttctgtggcctatcaggattccaatgtattgatcatcaataaaccttacgggatgctgtcacagaagtcaaagccgtcggatgtgtcggtcaatgaactgatcgtcccgtactgtctgcagcttgggatcttaaaggaatccaatctggaactgttccggccgtctatatgcaaccgtctggacagaaatacaacgggactgctgatcgcggggatatccctggaaggtctgcagaccatggctgaaatgttgaaggaacgtacagtgaaaaagtattactactgtattgtcaaaggcacattaaaaaacagcagcagagtgtccggatatattaagaaagaccggaaggaaaataaagtatcattttcagagaaggcagatgggagtggcagccgcattgagacggcctatgagcctgtggcctgcggaggcggttttacgcttcttagagtggaattgatcaccggaaagacccatcagatccgtgcccatttggctggaatgggatttcctctcgtaggggataccaagtatggagaccgggaagcaaacctttggctgaaaagaaagtttggagtgaagcaccagctgctgcactgcggttgtcttgtttttccaaaagagatgaagcgatgtacagaactgtccggcaggacggtcaccgcacaggtgccggaattatttttaaagacggcagaagaattatttgggagcatatcatgggaacttggaatttaaaaggactgcggggatcggttctggaggaactagtcaaccataccaatgaaaaatacaaggagcaggggctggcactggtccagaagatacctacctccataaagccggtcagatttgacaagaacagccggcagatcactctggcatactttgaccagaaaagtactgtcgattatataggtgctgtccaggggtatccgatctgttttgacgccaaagaatgtgcaactgacgtatttccattacataatatccatgaacatcaaatagaatttatggagaggtttgaaaaacaggggggcatcagttttcttctgatttattttacccacaggcaggcctgttactttatgtcttttgaggaaacgatgaagttttggaatcgacagacagacggcgggccgaagcattttaaatttggtgagctggatgcagggttctttgtcccgatgaagaaagggatgatcctgcattatctggaatgtctcaacaaactattggccgggaggcgttgacttggcggacggtttttcgtataataaaatattgaaacagccgttacgtccggcaaatgaatacacagaaagaagatagaccaatgattagaagcatgacaggatttgggcgcagcgtcgtatccaatgacaacaatcagacgatcaccgttgaggtgaaatcagtcaatcacagatactgtgatatatcattaaagataccaaaaaagtttactatgtttgaggcggatgtccgcagcctgttcaagcagttcgcaaacagggggaagattgatctgtccatatcatatgaagatttatcagagaccagcgtgggtctccactataaccgcgccatggcaaaagaatacatggatgcttttcatcagatgggggaagagttcggtattcctgtgtcgatcacggcagagcgtctgtcccagtttccagaggtgctttccctgacggaagaggttttcgatgagagccagtggtggagccttattaagaaggctgtaacggaagccggggagaagtttgtggagtccagaaccgtagaaggcaaaaggcttttggaagatatgcaaggaaagcttgcccagatggaaaaggacattgagtttattgcagagcgttctccgtccatcatcaaagaataccgcaccaagcttgaagataaggtcaaggaatttttagataatgcaggcatggatgagagccgtattgccgcagaagtaaccttatatgcagataagatatccgtggatgaggagatcgtccgttttaagagccatatcaaggctatggaggaagaactttacgagaaagacagtgtaggaagaaagctggatttccttgcccaggagatgaaccgggaggccaacacgatcttgtccaagtccagtgacgtggaactttccaatcacgccattgagcttaagacaaatgtggaaaaggtcagggaacaggttcagaatattgagtagggaggaacaaaacgatgaaaaaaggtgcattggtcatcttatccggattttccggcgttggaaaagggacagtggcaaaacgcctggtggagaagtacggctacagcctgtccgtctctgccaccacaaggaagcccagagaaggagaagtggacggaagggactatttctttaagtccgaggaagatttccgaaacctgattgactacaacggatttatagaatatgctagatacgtagaaaatttttacggcaccccgcgcaagttcgtggaagaagaactggatgcagggcacaatgtgatcctggagattgaagtccagggggcgtttgccatcagggaacagtacgaagacgctcttttggtctttatcacggcacccagtgcccaggagatcaaaaaccgcctgatcggaagagggacggagtccgaggaagtgatcaacaagagactttcaagggctgtggaggagtctgaggacatgtgccagtatgattatattatcgtcaacgacgatctggaagtgtgtgtggatcaggtgcatgcggttgtcaccgcacaggcatgtgagcgcaggcacaacatggaattagtgaaagagacaatggaaggtttaaaaaccctataggaggaatcatatttatgctacacccatcatattcagaattaatgcaggttatcaacggagatgacgaagataagaatatcatcacaagccgatactcactggtcattgccagtgccaagagagcaagacagctgatcgggggagatatgccgctcagtgaagatgcggatgaacagaagcctctttccactgcagtggaggagataaggagcagtaaagtaaagattcttcaggatggagaagacgaagaatagagaaagcaggaagggtgaataggatattttctaatcacccttttcaaatatcatcttgaaaggaactaggcatggatcttatattaatcttaaaaactgttattcttggaattgtggagggcatcacggagtggctgccgatcagcagcactggacatttgatcttagtagatgagttcataaacttaaatgtctcaggggcatttaaggagatgtttgacgtggtgatccagctgggtgctatcatggcggtggtagtgctgtattttcataagctgaaccctctctcaccgaagaagaaccgggcgcagaaacatgatacgatggttctctggtataaagtgatcattgcggttcttccggccgctgtcatcggcattttgttcgacgatgctattcatgaccggttttttaatccgatcgttgtcgcagccactcttatcatttacggtatcttatttatcgtcattgaaaatcataatgagagaagccgcagaagagagatgaattccctgaaaggccttacataccggatggcctttatcataggtgtcttccaggtactgtcgctgattccgggaacgtcccgttccggcgccacgattgtcggcgggatcttgattgggtgttccaggactgtggcggctgagttttcattttttctcggaatcccggtcatgtttggagccagtcttttaaagatcgtaaagttcggctttgcgtttaccggcacggagcttttagtgctggctgtggggatgatcgtttcgttccttgtttccatcgttgctatcaagtttttgatgggatatgtgaaacggcatgactttaaggcgtttggtgtataccggatcatactcggtgttttggtcatcggatattttacatttgttaattaggagaattacatggagaaagaattatttttaaaaggaatgcaggagcttctggaggtggcaaaggccgggggcggaaaaatccggaaggaagatattttatcgtatttcggaggacttgacataacagatgagatcgagaccatgctctgcgattattttgtggaagcaggagtccaggtggaaggatatgaccgaagtccaaaaaaagagcagcaagaggagacagaaccgggtgtcatccggttttatgaagaggaactggcagaacggggtggatctgacccggaggaggtcaggggactgatcgtccggctcggaaatggggaagatgtgaaaaatgagctggtcgagagcctgctatctgaagtggctctgaccgccaaaaagtatacgggccgcggagttcacttaggagaccttgtgcaggaagggaatatggggcttattgaagctgtgtacagcctcaacgaaaaggatccccagacagcggaagaattcttgatggcgtctgcggaggaggccataaaggcagcggtcgcagaacagactcatgcggattctatgggagagcagatggcgggaaaggcaaaccgtcttgacgaggcagccagattcctggcaaaggatttaggaagggaagctactgcgaaggagcttgcccatgagctttccatgacggaggaggaagtaaaagagatcatgaagatgtcactggatgcgatttctgtggtagagacggacattacccagaaataggccgggatctcccggccgcccataggtacaggaagaggtggggcaatgaacatcagagaaaagcaggaacagacagaacaagagatgctcagtccttatgcgacgctgagcagccagacaagagggagagaaaagcctgaagtggagtgcgagcttcggacctgtttccagagggacagggaccgaatcgtccactgcaaggcttttcggcgtttaaaagacaagacacaggtgtttttatcgccaaaaggggaccattatcggaccaggcttacccatactctggaggtggcccagaatgccaggaccatagccagagcactgaacctgaacgaactgctcactgaggccattgctctgggccacgatctggggcacacaccgttcggccatgcgggggaaagagccttaaacgagctaaatccggaaggattccgccataatctccagagtgtcagagtagtggaatgcctggaaaagaacgggaaggggctgaatcttacctgggaggtccgggagggaatgaaaaaccattctacccacagcatttctgccacactggagggtaaaatcgttcgtctggccgataagatcgcctacattaaccatgacatcgacgattccatacgtgcgggggtcatgaaagaatccgatcttccgtcagagtacacggatgtgctcgggcatacagtaagggagcggattaataatattatctgtgatattgtaaaacacagtgaggaaaaggatgatattctcatgtctgaggaagtgtatacggcgatgttcggactccggagatttatgtttgaccacgtctattttaatccacagacaaaaaaagaagaaaagaaggtgcaccacatcattgagccgctgttttcgcattatctgcatcatatcgaccttcttcctgatgtttccagagggcggattggccagacagagtcgaaagaacaggctgtatgtgactatattgccgggatgacggaccattttgccattgagacatacaaggaaatcttcattccgaaattctggctggaaaagtgagaaaaataaaaaggaatgaatcaatttatgtagaataatatatatagaggacatttatcacttagattaggaggacaggctgttgttatacggagatgacattattgaagaggtcagaagccgcaatgacatcgtggatttaatctcttcatatgtaccactgaagcggaaaggcagttcatattttggcctttgccctttccataatgaaaaatcaccgtcgttttctgtcagcagggacaagcagatgtattactgttttggatgcggggcagggggcaatgtgttcacttttattatggaatatgaaaacttcacatttccggaagccgtgaggtatcttgcagagcgggccgggatggagctgcccgaacaggaactcagtacagaggcaaagcagcaggcagatgccaaagcaaaattaaaagagatgaataagatggcggccaactatttttatatcctcttgcacagcaaaagaggagaaaaagggcttgcatatcttaaaaagcggggcatcaccgaggagacaattaaaaagtttggccttggatatgcggatatttatcaagatgacctctaccgctttttaaagagcaaaggatttacagatgaagacttgaaggattctgcactggtttccatcgatgaggccagaggaggcagcgacaagttctggaaccgggtcatgtttccgatccaggatgtgaacaaccgtgtcatcggattcgggggacgtgtcatgggggacggaaatcccaagtatctgaactccagggagacaaagctgtttgacaagagcaggaatctttacggtctgaactttgcacggagctcaagagagaaatttatcattctatgcgaaggatatatggatgttatcacaatgcaccaggccggattcaccaatgcggtggcagcacttgggaccgcgtttacagaagggcacgggatgcttttaaaacgttatactgatgaagtcatcctctccttcgacagcgatgaggcaggacagagggctattttaagagcgattccgatcttaaaaggagctgggcttacggtcagggtcctgaacttaaatccacataaagatccggatgagtttattaaggcattgggaagtgaagaactcaccaagcgtatcgagaaggcccggagcagttttatgtttcaggtttctgtggcggctgggaagtacaaccaggacgacccagaagaaaagacaaagttccagcacgaggcggccaagcttttgtcttccataagggagccgctggagcgcagcaattactgtgaggctgtatccagggaatattttatgggagtaaaagagcttacggatctggtggattattacgggaccagcggatatgtccaggaaaagccaaaggaacaggaacgaaagccgatcgaagttaaaaaagaagaaaaaaaactagagccgcagaagcttttgctcacatggctggtcaacgagccggtgctgtttgacaagcttagagggattatcgggcccgatgactttatcgagccgatctaccacggtgttgctgtgttactgtttaaagaatacgagcaggacgggaaggtgacgccggcaaagatcctgaatcagtatgtggacatggaggatcagaagaagatcgcggaactgtttaacaccacgctgaaactaaagccgctgccggaggacaacgacaaggcactgaccgatattgtccgcaaggtgaaagaagacagcattgaacacaagatgaatgaatccaacgacattatgaaatggcaggagctgatccaggaaaagggcagccttgcaaagctgcatatttcgatttaggttggttaaaataggtatgagaggaaggaaatcaatggacgacacaatgttacaattcagcgagaagctggcaggtttagtagaactggggaagaaaaataaaaactttttggagtatgctcagattgagacatatttcaaagattttaagctgacatcggatatgatggaggcgatttttgattacctggaacaaaatgggattgacgtgctcacgattccagagggagacgaggacgaagatctggagatcaaagaagagattgaggaagaagcggatctgaccatcccggatggagtcagtatcgaagatcctgtgcgcatgtacttaaaagaaataggaaaagtaccgctgctcagcgccgatgaggaaatccgcctggcacaaaggatggaagaaggggacgaggaagcgaagaagaaactggcggaagccaacttgcgtctcgttgtcagtatcgcaaaacgctatgtggggcgggggatgctgttccttgacctgatccaggagggaaatctcggactgatcaaagcagtggagaagtttgattacagaaaaggatataagttcagcacctatgccacatggtggatccgtcaggccattaccagagctattgctgaccaggcgagaacgatccgtattcctgtgcatatggtggagaccatcaataaactgatccgtgtatccagacagttgttacaggagcttggccgggaaccacttcctgaggagattgcggaggagatggatattccggtggaccgtgtccgggagattttaaagatttcccaggagccggtttctttggagaccccgatcggcgaggaagaggacagccatctgggagactttatacaggatgacaatgtaccggtgccggcggatgccgcggcatttacactgctcaaggagcagctgagtgaagttctgggaactctcactgagcgggagcagaaggtgttaagactgcgcttcggtctggatgacagccgcgccaggactttagaggaagtaggaaaagagtttaacgtcacaagagagagaatccgtcagatcgaagctaaggctttgagaaagctgagacatccgagccgcagcagaaaactgaaagattatctggattaattgggtggattatggagctgtcaacacggttaaaaacaattgcttcttttgtatccgaagggatgtgtgtcgccgatatagggacagatcatggatacataccgatttatctgacatccgaaggactttctggaaaggcatttgccatggatgtcaaccgggggcccctcgagcgggccagacagaatataaaaaaagagggactggacggacagatcgagtgcatcttatctgacggcatggaaggacttccggaagatgccgacagtgcagtgatcgccggtatgggcggagatttgatggaacagatccttacgcggggggaagacaagctctgccatgttgccgagcttgttctttctccccagtcccattgggaaaaagtgcggaagtttcttcacagccatggatatgccatcaagaaagaggcattggtcagggaggacgggaaatattacattgtaattaaagcagtccaaggccgggagtcatatccgtcttcctggcagtattcttacgggacatatcttcctgggtcaaaggatcctttgatgaaagaataccttttgaaagaaaaagaagatatacaaaagatcctcacatcttttcaggggaaagactcagaaaccctgaaaaacagggcaaatgaattatcctctgccctggaggaaataaaggaggcactgaaacattatgaaatgtagtgaactgatgagagtattagagacgtatgtgccgtcaggttatgccatggactgggataacgtgggccttcttgcgggacggcaggatagagagatccagaagatcatggtcgcattggatgcggacaaaggggtggtggaagatgcagtgagccaaaatgtggactttctgctgacccaccaccctctcattttctctcccttaaagagcattacggacgatgcgggaacaccttccaagatccttactctattggaaaacggcatcaactgttacgctatgcacacaaattttgatgtcgtccatatgggaaggatcgtctgcgaagcgctgggccttaaaagtgacggtccggtagagaccacatgtacagaaaacggcattcccatggggattggaacagtgtcggactttcgccggcccgtgtctgttgacgactttgtggagaagatcaaaaagacctttgacatcaagcaggtgtttgtgttcggggacggaacaaaggagatccgcagggtggccattgtgccaggctccggaaggcatatggaaaaagaggtatcctctgtcggggcagatgtatttttaaccggggatatcgggcaccacgagggactggatgcggtggatatgggcatcacagtcatcgatgccggccatcacggactggaaaaaatctttgttgattttatgggacattttcttcagaagaatataccagaatgtgacgtaatcttaagacatacaaaatgcccgtttgacgtaaaatagaccagagaggagatgatgcagggaatgttacatgtaacagtagaaggagccaggatcagtataaaagagggcacgacactggaggatatcgcaaaacgcttccagcgcccggggactcctgtgattttgcttgcctatacgggagagaaattgagggaattataccacaccattgatgaggactgtgagatccgttttgttaccaacgaggaacagagcggatatatgacgtataaaagaactgtaaattttgtgttcttaaaagcgtgtgaggaagtactcggagaaggctgcaccaaccgcataaccatgaattattctattgggaacagtacattctgcgaattctcattggatgacctggaggttgatgatcagcttgctaagaaaatccaggcaaagatgagggaactggtcaaccatgatctaaagatagaaaagatctcctacaatacgtttgaggccaggaaaagatttgcacaacagggcatgaaggaaaaggtgaggcttttcagattcagaagagtctcaaggaccaacgtctattctctggatggctatgagaactatttctatgggtatatggcaccgagcaccggctatataaaggacttttttgtggatgcatatcagggaggcattgtgctccagatccccaggagggaccatctttacgcagtttcccggtttacgccgcagccaaagcttttccatgtgatgcagcggtccagatcctggagtaaactgatgcgtgtggataccgtcggaaagctcaatgaggagatcacaaacggggacatcaataatctgattttggtccaggaggcgctgcaggaaaaacttcttgcagacatcgctacaaagatcgtagacgatggaaaaaaggtggttttgatcgccggtccgtcttcctcaggaaagactacattttcccacaggcttgccatacagctgcagatcgatgggctgacgccgcatccgatttctttggatgactatttcttagacagggagttatcaccaagggatgaggaaggcaattataactttgagaccattgcgtccctggatctggaattgtttaatgaagatatcaactgcctcctggcgggaaaaggggtgcagctgcccacgtataattttgtgtccggcaagcgggagtataaaggcaattataaaaagatcggaccggatgatgtgctggtcatcgagggaatccacggtctgaatggaatgctgtccagtgagatctcggaacaggataaatataagatctatgtcagtgcgttgagccagatcaacattgatgaacacaaccggataccaagctccgacgggcgtctgctgcgaaggatcgtaagggatgcaagacacaggggaatggatgccaaaacaaccatagggcgctgggaatctgtcaggagaggggaagaactgaatatctttccttatcaggaggaggcggatatcatgtttaactctgcccagatctatgagctggccgtgttaaagcagtatgcggaacctcttttatttcagatcagtccaggatgtccggagtaccaggaatccaaacgtctgctgaagtttttggattactttttgagcgttaagagcgaagatataccgaaaacttcacttctcagagaatttattgggggaagctgttttgaaacttaatcacaacctgaagacaaacctctaactatcaatgaagatttttcctcatatatagtataaaagaatggttttaatatctataataaaggggagaagaatttgagaaagataaaaaggggagttagtgccgcttttgcgctttgcctttgttttagcctgatatttcagacatcaatggtcaaagcagagacagcgcctgaactgactgcagaaacgaatgaacattttggagaagaagattcaaagtatggatatcggcagccgccggccaaggtagaggttccggccaccgtatccattcctggaaagaagagaagcggtgccatcccttccagatatgatggaaggacagcaggacatatgacatctgtcaaagaccaggaagatgtaggagcctgctgggctttttcaggttcaggattgtttgaatcaaaagtaaagacaagtacgggactaagcacggacttgtcagaacagcatatgctctggaccatgaacggactgacaggaagcggctacatgtgcaatacaactaacgacaatggaggcaacgagtggatgtcttccggatattatgcatccgggtttgggccgaaatcagagcaggatatttcttttattaatgagatatttgaattcgccaatgtagtaaggccgaagaatcttaacagtgcgcccaagttatatcaggcaaccgatatccagttccttaatccggagaacggcaaagagatcaaacaggcagtgatgaataacggtgctgtggggacaggaatatattgggacttttcttctaagtaccacaaaggagattcttattactattcgggcgaattgacagataggaataatcaagaattagttcaaaatcatgaggtcattattgttggatgggatgatacatatagcaaaacgaatttcagcaaagctccgtcagaaaacggcgcatggctgattaagaatagttggggaaccaacgccagctacagtgacggagggtattattgggtttcttatgaagatcctcttttactgcctgattatacaatcaagagttttaaggcatatgattcagatgaaaagctttatcagttggatgaatttggagcagtgacctcaatcaatgtatccgaaaacatctctgcagatttctgttattttgcgaatgtttttgattttggtaaaaatgagaaattagaatcagtgacattttttacagattccattggcagtaagtatcagttatatatggctcctgtaaactcttcgggtgtaccggagctatcaaaaaaggaacaactgacgtcggagcagacagttttgcatgcaggatatatcactgcaaagacctctgcgaagaaagtatccggaaagtatgcagttgttttgatgttaaggaaagccaaagcggatcaaagactcaatatcggactggaatgttcagactactatggtgatggggactgttattataaggggacgattgagccaggccaaagctttgtcaaggccggagagcaggccatcaatgatatttatacgccagaaaatggtcaaaatcggttgtgtaatttttcaataaaagcaactacaaggtcctatactcagtcaatggatgcaaatggttctaatacgagtggatcaccaaagcctcagacaaaaccaacaacgacaaggccggcggtggtatataaaaaaccgtatttgtcaaagagttctttcagcatttacaagggaaataaaacgacagttggtataaagaataaagttagcggagcaaaagtttcctattccagttccaacaaatctgtggcagccgtaagctctgccggtgctgtgacagggaagaaggccggaactgcaacaattacagctaaggtgactcagcagggcaagagctacagcctgaagtgcaaagtgaaagtaagcaataagcgtttggcattgacaaagaagaagtcaaagataaagagaaagaagtcttatctgttcaaggcgaaaaagtatggcgtcacaggtacagtgaaatggaaagtcaataataaaaaactggcgtccattggaaagaccagcggtaagctgaaggctaaaaagaaaaagggcagagtaaaagtaaccgcttattgcgggaagtttaaagtatcttataccgtgaaaatctattaagatgtatagatattgcattagaaagaagaaaaggaatctttaaattgtttgacgggacctatgagaacatggtataattccactcggaatttagttaaccgaatgatcgcgccaaagtaatttggtgaggaaagtccgggcttcgcagggcaggatgccggataacgtccggtaggggagaccctcaggccagtgcaacagaaataaaccgccggtttttgccggtaagggtggaaaggcggggtaagagcccaccgcttggctggtaacagacaaggcacatgtaaaccccatccgaagcaaggcaggagaaaagctatgggcttgcccggtccacttttcggtgtgccgctggagcttgctggcaacagcaggtcgagatagatgatcatttaagacagaacccggcttacagattaactaaattccgttttgaaagattgtttacactgcttgtcccgttattacaactgctggacaggcagtttttattttaaatcatgtagaaaaataacgatttgcttgttttaggacataaattttacaaaagtgtgaataatgtttcaaatttgtcatacactatatcaaaggagtgtagtatgacattgaagaaaaaatggaaagtagcagccatatcttgcgcgattggcttatgcagtgtagggcagcaggtctttgccagcgatacattattccagccgccgaaaagcgacaatggtgcagaccagctcatccaaaggaaactgttggaggaacaagagcagttcaaagaacgtaaagcactggtgaaaaagttgaatattgaacgtcagatcgaaaaggtgcagcaagccaaaggtctgaagggaaaaatatctacaagagataaagcgatcctcacacggattgtggaagcagaagctactgacaaagacataaagagtaaaatcttagtcgcaaatgtgatattaaacagagtgcgttccaaggaatttccaaatacggtggaaaaggttgtattccagagaaccaacggaagtgtccagttttctcctacagccgatggacgatacaattctgtgaccatcaaagcatccacaagggaaagcgtggagagggccctttccggagaagactattcagaaggtgctttgtactttgtagaaaagacaatggcaaatcctcgaaacgtatcttggtttgaccgggctttgacgaaactgttcacttatcagggacattcattttataaataagatagtaaaaattcggggttgacacgaaaacagaaaagtattatcattctatcatatagtgataaaccgatgagaaagagtagtagtcaggagcagaaggatttaaagagagctgcaggtggtgggattgtagcatgaattccctgatgaatggactttcgagggcagttctgaacttatagtaggagttgccgggcacccgacccgttacctaacagggcatatatgatagtatatgagaaaagtgggcattttttatgatgccaatttgagtggtaccgcggatatccgcctcaagcgtgagcttggggcgttttttattccataggatagttcttcgaacctccctatgaattaaaaagccctgcgggtattatgcacacaaatgcgtgaggaaattatttgactgggtcaaatcgcatttggcgctcaatgaattgtttatctctatagtgcagttaatcaattgtagagaaaaggagagaaagttatgagaaagaagttattagcagcaggctgcagtatggtattggcagcatctttattactcgcaggatgttcaaaaaaaagtgaggaccagacgtatcagatcggaattcagcagtttgcggagcacgaatccttaaacaactgccgtaagggatttatccagggtctggaaaaggaagggatcaaagagggcaagaacttaaagatcacttttaaaaatgcacaggcagatacagcggcggacaatcagatcgcatccaatttcgcatccaaaaaatttgacctgatctgcgcgattgccactcctagtgcacagagcgcatacaatgcggcttctgattctaagacaccggttatctacactgcagtcacttcaccggaactggcgggatttgtagataaagacggaaagaatgtgggagaagtcaccggtacttcggatctgatccttgcagacaaacagctgaagctgatccgaaaagtacttccaaaggcaaagaacgtaggtattttatacagcaccaacgaagtaaattccaaggcgggaattgaagcatatgagaaggtggccaagaaaaatggtttcaagatcgtaacacagggaatcagtgcagcggctgatatgcctatggcagcagacagtctgatcaaaaaagtcgactgtatcacaaacctgacagacaacctagttgtcagctgtatgccaacctacctggaaaaagctaacaaagcaaagattcctgtatttggatcagagatcgaacaggtaaaactgggatgtatcggctgtgtgggtatcgattttgtgaaactcggggaacagaccggaaagatggctgccaaagtgttaaagggagaaaagaaagcatctgagattccgtttgaaacattcaatcagggagatatttatctgaatgaaaaggcagcgaaggatctgggtatcaaacttccatctgatatacagaaaacagccgtagagacatttacagaaattaaagcaagcaaataataggagcaaaaaatggaacaattgatcattggggtctttgagcagggatttatctatgcggtcatggctctgggcgtatacattacttataaaatactggactttccggatctgtctgtggacagtacctttccgttaggcgcggctatcacaaccgtactgctgatgaatggattcaatccaatcctgtcgctgatcctttccacagcggcaggggcggcagcgggagcgctgaccggcattatccatgtgaagtttaaggtccgggatcttctgtctggtatcatcatgatgacagggctttatacgatcaatctgcggatcacaggcggaagtgccaatgttccactgttcaattacaatacgatatttaataataatgggatcaacggattattcccggaagcacttgctccatataagacgctggtcatcatcactgttattatgttgatcgcaaagctccttctggatctgtacttaaagacaaaatccggctatctattaagggcggtgggggacaatgaaaaaattgtcacctctctggcaaaagacagcggatttgtaaagatcgttggtctttccatcgcaaatgggctggtagctctggcgggtagtgtcatgtgtcagcagcagagattttttgaaatttcaatgggtaccggtacaatcgtcatcggtctggccagcgtgatcatcgggaccaacatttttaaaggaaatcgattgaaagcgactacagctgtcatcatcggatctgttatttataaggcctgtgtggcggctgccattgagatcggcctggattcacaggatcttaaactgatcacggcgattctgttccttgtgatcctgatcgtcagcatggaccgtaagaagaaggtgaaagcatgattgaacttaagaatatcgacaaatattataatatcggaacagtaaatgaggtatgtctgtttcaggatttcagcctgaaggttcagaatggagactttatctccgtgatcggaagcaatggttccggaaagacctcgatgctgaatctgatctgcggaagccttcagccggagagcggatcgatctttttaaacaatgaagatattacaaagcaaaaggagtttgtccgccagcgtaagatcgggcgtgtgtatcaggacccctctatgggaacctgtccttccatgacaatccttgagaatatgtctttagctgacaacaagggcaagtcatacggccttgggctgggaaccaataaaaagaggatccgccattaccaggaaatgctctcccagctgggattgggacttgaggatatgatgggaaccaaagtaggctccctgtccggaggacagcggcaagccatggcacttttgatgactaccatgacccccatagaattcttgattctggatgagcatacggcagcactggatccaaagactgcggagctgattatggagctgacggataagattgtcacggagaagaatctgaccacgatcatggtcacgcataacttgagattcgcggtggaatatggaaaccgcctgattatgatgcatcagggaaaggcgatcatagacaaggcaggagaagaaaaagaggctcttgcaattgaagatctgctggatcagtttaatgagatcagcatagagacaggaaattagcacaccagccataggatcattgattcctatggctttttttcttgcccataagttctccgtacatggcccctccgatgatcaagacggcaccgagcagttgtatgccagttaagtgttccctgagaaagaaagccgagaatatcagggcggacagtggctctaaatatccgcagatggccacggaacctgcgggcagttttgtgatggatgaaaaatagaaataacagccgatacctgtgttgacgatccctaaaattaatacagggaacagattctgccatacggacggaaggctgaggctctgcttggtctgcataaaggctgccacagtaagaaaacttatgatcagctgatacatagagtttttaagacctgtaatactgtgtgcttttttgttaaagatcaccatgagagcatacatgacggctgacaggaggccgcagagcagccctgtggagataccggtgtgaaacaggctgtttccattgaccgttatcatacctgctgcaacggccgtaaatcccaggaatttatgtattgtcattcgctccttaaacagcaggggagagacagccataacaatgacagggccgcagtagtaagccaatgtggcgatactgacaccgatggtcttatacgcctcatagagaagcatccagctgatccccatggcggtcccggagatcagaatatagagtaaatgttttttatccttatatttatgcggccttttttcagtgaaaaagaaaactagaaggagaaacaggctcccgatcagagttcttaaaaatacaatctcataactgttcagttcaatatagcttgcaacaatgccgttggatccaaacagcagcagtgccgtaaaatatttaaaataatgtttttccataactcacctcgatgacagcatattgcttgctttttcttgaacagcttatacttatactgtatcatgaaaccataaataacaaaaacgaatatttgtcatataaaagatgacaaattcagataaatagggaggtgtgggtatacagatggatatgaatcttcaaaaatacatgtcttttgtgaaagctgtggaatatgggagttttacaaaagccggggagatgcttagttattcccagtcgggaatcagccgcatgatccatgacctggaggcagaatggggggtatctcttcttgagcgggaccggtcaggcgtgcgtctgacttcagatgggatgaagcttttgccgtatgcaaaaagcgtctgcagagagtttgagaagctgcaagtacaggtggacgaattaaaaggtctgacatcaggcctgatacggatcggaacattttcaagtgcagccacgcattggcttccgaatatcatcaaaaaatttcaggaggattatccccacattgactatgaactgttgcttggtgactatacggaaatagaaaactggattttaaatggacgtgtggactgcggttttctaaggcttcccacgcttccggagctggagacagtttttctggagcaggaccagctattggcagtccttccggaacaacatccattggcagaatgcagccgttttcctatggaggcactgtgtgatgcaccctttatgctgttgaaaagagatggcaattcagatgtctcagagattcttgaacagtgccgcatttcacgaaaagttcaatttactacctgggatgattatgccatcatgtccatggtggagagcggtctgggaatcagcattctcccgcagcttattttgcagcgcatcccgtaccgtattgtcacaaaggaactggaggtgccggcttatcgaaagatcgggcttgcattccgggacagaaaagggatgtcactagcagtaaaaagattcctggattatttaccttatcgtgcgtagcacgcgtacccggagggtatagaatacgggatgccctgtgggtatgagttatttaccactatttccgtcgtgcttttgaaatgcgctcctccaatagtggtaaataacttttgaaaagtgacacccttcttttgacagaagcccttctccagtagacattacgtccattttctacatgattggagggaggcattctaagagccgaacggaaatcatgtggaaaatgtcataccttatcgtgcgtagcacgcgcacccgagggtataaaacacgggatgccctgtgggtataccttgtcgtgcgtagcacgcgcacctgagagggtgtaaaaaggacgatgttaagtttggttgacagatttccaacggcatttggtggtgaaaaacacccggttttcttataataaacaaaaatatataccacagggaatacccttcgggcgtgcgtgcttcgcacgattaggaataggagaaaagttatggaattttatgaaaatctaaaccgggtaagaaaagaaaaaggatggtcccaggaggaattggggaaccggctgaatgtatccaggcagacggtctctaaatgggagcttgggacgacaacgccggagatgaacaagctgatagaattaagccgtatttttggagtcagtatagatgaactgactgggaatgaattgtataaaaaagaaaaggaagttgtctatgtcgctgtaaaacagcactatgaatataagagcaaaatgacaatctgcgggattcctttggtgcatatcaactttgggagaggaatttataaagcaaaagggatcatagcagcgggaaatatcgctgtgggactggtctctatgggaatgatttctaccggtttactttccattgggatgctttcccttggcctgctggcctttggcgggcttgccattggaggtctggcagtagggggcgccgccattggtatctttgcagtgggggggctcgctgtgggaatctatgccataggagggtgtgcgctggcatcccatattgctgtgggcggatatgcaaatgcccatatagctatagggggagttgctgacggggcatatacatttacagagaaaggaaaggccgtcagcgatgagatcaggagaacgattttaaaagaatatccccatatatggagatttctcatccggctgttttcttcaggcatgaattctatctgaactatatgttattttacctgtttcaaattgagcgaaagtgtgttatactcaattagttattttgaatagaatagacagttcattcgtaccatcctgtctttaaacaaaactaggacagtgtaagaagattgcctttgtgcagttcttacgtcttagagaaatgcttagagacatggatacctcagggtggcatgtcttttttgtttcattaggatagatagagaagggaagtcttatgtatcaattaaatacacatgcatcctttgactcggcacattttctggcgggttatgagggaaaatgcagcaatctgcacgggcaccgatggaagctttcggtgaccattcaaaaagaaaaagtggaacaacagggccagaccagagggatggtcgtagactttggccaattaaaagataaggtaaaagagatcgcagatgagtttgaccatgcactgatcatagaaaaaaatacactgaaagaaaaaacaatggaagcgctgaaggaagaagattttcggatcattgaagtagcattccggccgacggcagagaattttgcaaaatacttttatgactgtttcaaacagagcggctatgatgtatcttttgtggaagtgtatgagacgccgaataactgtgcaatttacggagaatagaaatggaaacttttaagatcgcagaaagttttgtgagtattaacggagaaggaaagaaggccgggaggcttgccatgtttatccgccttcggggatgtaatctaaactgctcctactgtgacaccaaatgggccatcagcaaaaaaggggacgcggaacttatgacggccccggagactgcacagatggtgaaggaggccggggttgaactggtgacattgacgggaggggagccgcttttggacgaaaatatcagcgggctcatcggaagtattctcgctctgccgaaagtagaactggagattgagacaaacggaagtattcccatccgcccgtggagagaaagagacgcaaggctttctatgaccatggattataagctgccgtccagcggcatggaagaatccatgtgccttgaaaatatggaagaattaaaaccgtgggatgtagtaaagttcgttatagggacaagagaggacctggaaagggcaaaagagatcacagaccggttttctctctgtgagagagccatcgtttatttcagtccggtctttggtgcactgctgccggaagagatcgtagaatttatgaaggaacacaagcttaataaagtcaggtttcagatccagatccacaaggtcgtttgggatccggagcagaagggagtctaggaagctatggcaatcgataaagaagcaatcaagacacatatcagaggaatacttgaagcactaggagatgatccggaacgggaagggctggtagagacaccggaccgtgtggccaggatgtatgaagaagtgtttgaagggatgaattatacaaacactcagatcgcggagatgttttccaagacgtttgaagacgatttgtcagttaaaaatcataaggacatggttattgtaaaggatattgatattttcagctattgtgagcaccatttagcattgatgtacaatatgaaggtgaccgtcgcataccagccgaaagaaaagatcctgggactcagcaagattgcgagaatctgtgacatggtgggtaaacgcctgcagcttcaggaacgcattggatccgatatagcagagattatttctgaggtggcccaaacagaagatgtggcagtgctcatagagggaaaccatagctgcatgagtgccaggggcatcaagaaaaaccaggcaaaaaccatcacatcgacactgagaggccggtttgagagcgatcctttcatggaaagccgtttttacacactggcagacagataaagaggaggatattatgtcaaaaccaacaaaggcagtcgttgtattcagcggaggacaggacagcaccacctgtctgttctgggcaaagaaaaaatatgaggaagtcattgcgctttcttttaactatggacagaagcattcagacgagctggtctgtgcaaaagaaatctgcaaaaagcatggggtggagcatcatatcctggatatgggcctgctaaaccagctggcgccaaattccctgaccagggcggatattgaggtggacaaagaagcgccagagaccggtacacccaattcctttgtagacggaaggaatatgctctttcttacattcgcagctgtgtttgcaaaacagagagggattcatgtgttggtgaccggtgtgtcacagagtgatttcagcggatatccagactgcagacatgtgtttatcacatctcttgaaacaaccctgacgctagcaatggactacgagtttgaggtgatcactccgctcatgtggattgacaaaaaagagacatggaaaatggccgatgatctgggagtttttgatattatcaggcaggaaacactgacctgttataacggggtaaagggcgacggatgcggtgactgtcctgcgtgcaagctgagaagaaaaggaatggaagcctatctaacagagcgccggaactgagattcaggcttagaaaatttgtctaagtgttatcttgtttttagattcttattgataaaacattaacaaaatagtacaataggaatgtaaccaatggtcagggttgtcaacatatcaatcctctgcaacaaaggagataacgtatgggaagatttacattacctagagatttgtactttggaaaaggatcacttgagacactgaagacgctggacggaaaaaaagctgttttagtcatcggcggcggatctatgaaacgttttggatttgtagaccaggttgttgattatttaaaagaagcaggcatagagacaaaattaattgagggagtagagccggacccttctgttgagaccgtatttaaaggtgccgagattatgagagagtttgaaccggactggatcgtggcaatgggcggaggatctccgatcgatgctgcaaaagctatgtggatcttctatgaacatccggaaaccacatttgacgatgtaaaagacccattcacagttccaaaactcagaaacaaagcaagattccttgcaatcccttcaacttcaggaacagctacggaagtgacggcatttgctgttatcacggactacagttcaggcattaaatatccgctggcagactttgagatcacaccggatgttgccattgtagaccctgcactggcagagacgatgcctccgaaactgacctcttatacaggaatggatgcactgacccatgcgattgaagcatatgttgccggactgcattcaccattttcagatcctttggcaatcgatgccatcgagatggtatttgacaacttaaaagcttcctatgagggagacatgaccgcacgtgaaaatatgcactatgcacaatgtcttgcaggaatgtcattctctaatgcactgttaggaattgtacattctttagcgcataagacaggagcagtttttgatacaggacatatcacacacggatgtgcgaacgctatctatcttccgtatgtgatccagtttaatgcaaaggtatgcgaagaccgctatgcagccattgcaagaaagatcggcctccctggaaattccgataaagcactgacactttctttgattgaagcaatccgggatatgaacaagaagctgaacattgtttccaacctgaaagatttcggaatcaatgaagaagaattcaaccagaagaagaggatgatcgcggagcgtgctgtggcagacgcatgtacaggatctaatcctagagaaacctctgtagatgacatggaaaaagtgttagagtgcatctactacggaaaagacgtaatattctaaatatagcagacactacatccatttaccactatgggcaagcgcattttaaaaagtgcgatggaaatcgtggtaaataactcatatttttaaagctgggactttttttagtcccggcttttttgatcttatgagctgaattcatttctaatattatcctgggtctgggcgaattatcctgatgaattatcagattattcatataagaatgcaaaataatcaaataatcagataacttaagaaaaaaatactttacaaggtccttaaatttttgtatgatagattccaacgtaggaaatctacaaaaaataacatttccaagcagcaggaagaaaggaagagacttatgacgaacaagagagagaacacccctgggttataccatcctagctttgagcatgataactgcgggattggagcctgtgtcaatattaaagggatcaagagccacaagactgttcataatgctttaaagattgtagagaccttagagcacagagccggtaaagacgcagcaggagagactggagacggtgtcgggatcatgcttcagatctcccacaaattttttgagaaagcttgtaaggaggccggtatcggaatcgggggagagagagaatacggcgtcggcatgtttttcttcccgaatgacgaactgaaaatccagcaggccaagaagatgtttgagattatcgtggaaaaagaagggatgaacttcctgggatggagggaagtgcccacggacagtaaggttttgggaaaaaaggccattgaatgtatgcctaagatccttcaggcatttattgaaaaaccggaggcagttgaaaaagggctggaatttgaccgcaggctttatatcatcaggaaagtttttgaacagagcaacgaggagacctatgtgatctctttgtccagcagaaccatcgtatataagggaatgttccttgtggatcagttgaggaccttctttaaagaccttcaggatcaggattatgaatctgccatagccctcgttcattcccggttcagtaccaacaccactccaagctgggagaaagcacatccgtaccgtttcatcgtacataacggtgagatcaataccatccgtggaaacgctgataagatgctggccagggaagagaatatggagtccaagtacctgaagggccagatgcataaagtgatccctgtagtcaatcccaacggatcagattcggcaagacttgataacacactggaattccttgtgatgagcggtatggcactgcctcatgcgatcatgatcaccattccggagccatgggagaacaataaagttatcagccagaagaaacgggatttttaccagtactatgccactatgatggagccttgggatggaccggcttccattctgttcaccgatggagaccaggtaggagccgtgcttgaccgaaacggcttgcgtccttccagatattacatcaccgatgacgatcagctgatcctgtcttccgagatcggagtgctggatattgaccctacgaagattctagtgaaggaacggctgcgtccgggcaagatgctccttgtggacacggtcaaaggagaagtcattgacgatgatgttgtaaaggaatcctatgcaggaaaagaaccctacggcgagtggttagacagcaatctgatcgaacttaaggatttaaagatcccgaatatccctgttccggcttacgagtccgagcagagagaaaagcttttaaaggctttcggatattcctatgaagaagttaaaacagccattcagcccatggcactcaatggctcagaggcaatcgcggccatgggaacggattccccgctggctgttctgtcaaaaaaacaccagccgctgtttaactattttaagcagctgttcgcacaggtaacaaacccgccgattgatgcgattagggaagagcttgtgacctccacaacgatctacgtgggaaaagacggaaatatcttagaggaaaagccggataactgccaggtgttaaaggttcataacccaatccttacggatacggaccttttaaagatcaaaaacttaaagcgggagggattccaagtagctgaacttccgatcatatactataaaaatacttctctggaaaaggcgctggaccgtctgtttgtggaagctgaccgtgcttacagggatggggccaatattattattctgtctgaccggggcgtggatgagaatcatgtcgctatcccgtcactgctggctgtgtccgcgatgcaccagcatttgatcaagacaaagaaaagaacctctgtggccctgatccttgagagcggcgagccgagggaagtccaccactttgcgactctgcttggttacggagcctgtgcggtaaatccatatttggctcttcaggctattcagaagcttattgatgataacctgctgcacaaggattattatgccgcagtggaggattatacaaacgcagtgcttcacggaatcatcaaaattgcatccaagatgggtatttccacgatccagtcttaccaggggtcccagatctttgaggcgatcggtattgactccaaggtcattgaccagtactttacaaatacagtaagccgtgtagaaggaatcaccctgaaagatattgaagaagatgtggatgtgagacattcctctgcatttgatccgctgggcctggaaaacgatctgatgctggagagcaccggaagccataagttcagaagcggcaaggaacagcatctgtataatccgcagacgatccatacgcttcagatggcggcaaggaccggcaattatgacacgtttaagcagtatacacatatgatcgatgaagagctggagccgggcaatttaagaggcctgatggagtttaactatccgtccaagggcatccctctggagaaggtagagagcgtagagtcgattgtcaaaaggtttaagaccggtgctatgtcttatggttctatctcaggagaggctcatgaaacattggccattgccatgaacatgctgggcggcaagtccaacagcggagagggcggggaacgcccggaacgtctgacggttggaagagacggaaagaaccgctgttctgctatcaaacaggtggcatccggaaggttcggagtcacaagtgagtatctggtcagtgcaaaagagattcagatcaagatggctcagggagcaaagcctggtgagggaggacatcttccgggaaagaaggtttatccttggatcgccaagacccgtcactcaacggcgggagtgggactgatatcccctccgcctcaccatgatatttactctatcgaggatctggcgcagctgatctatgactgcaaaaatgcaaacagggacgccagaatctctgtgaagcttgtatccgaagctggagtgggaactgtggcatccggtgtggcaaaagccggggcgcaggtaattctggtctcagggtatgacggtggtaccggagccgctcctagaaactccatctacaacgcagggcttccatgggagctgggacttgcggaagcacaccagaacctgatcatgaatgatctcagaaacaaggtgatcctggagacagacggtaaactcatgagtggacgtgacgtagcagtggcggctatgttaggggcagaggagtttggttttgctacagcaccgcttgtcaccttgggctgtgtcatgatgcgtgtctgcaacctggatacctgtccggtgggtgtggctactcagaatccggaactgcgcaagagatttgcaggaaaaccggagtatgtggtaaacttcatgcggtttattgcccaggaactgagggaatatatggcgaagcttggtgtggctaccatcgatgaactggtaggacgcacagatttgctgaaaccgacagaggaagccaaagaaaagcatattgacctgacaaggattctggatacttcctatgtggaagcggaaaaggttgattatcttcacaaaaaggtttatgactttaaactggataagtcagcggatgagacggttcttcttaagaaattgaaaccggctctggaaaagaagcagagaaagagcatcgaactggatgtgacaaatatagaccgtaccttcggtacgatcttcggctctgagattaccaaacgctggggtgaaaacacactgcctgacgatatgtacacaataaaatgtactggtgccggcggacagagcttcggggcatttataccgaaagggctcacgctggagcttgtgggagacagcaatgactactttggaaaagggctgtcaggaggaaagcttgtggtttatcctccgaccggcgtcaagtttaggccggaagaaaatatcattgtaggaaacgtggcgctctacggagcaaccagcggcaagtcatttatcaacggagttgcaggagaacgattctgcgtgagaaattccggagctattgccgtcgtggaaggcgtaggcgatcatggatgtgaatatatgaccggaggacgtgttttagtcctcggcgagacagggaagaactttgcggcaggcatgagcggcggtatcgcttatgttctggatgaggacagcagtctctacatgaatgtgaacaaggaaatggtgaccattgaaaacattacatccaaatacgatgtgctggaagtcaaagaaatgctgaaagagcatgtggcctacacaaactccgaaaaaggaaagaatatcctgaagaattttgaagaatatctgccgaagtttaaaaagatcatgccggtggattacaaacggatgctgaacctgatcgttcagatggaagaacggggacttagcagcgagcaggcacagattgaagcattttacgagaacgcaaagtaggaggacagacaaatgggaaaaccgaccggatttatagattatgatagaaaagatgcaagggctgaagatcccaaggaaagaattaaacattataatgaattccatattcctctcccaaaggaggaacagcagaggcagggtgcccgctgtatggactgcggtgtgccgttctgccagtcagggctgatgttaaatggaatggcctccggatgcccgttaaacaatctggttccggaatggaacgacttgatctatacaggcaactgggaacaggcatttgaacggcttaaaaagaccaatccgttcccggaattcacaggaagggtctgcccggccctctgtgaggcggcctgtacctgcggcctgaacggagaaccagtctgctctaagcaaaatgagctgagtatcattgaatacggatatgccaacgggctggcaaaggcaaaacctccgaagagcaggacaggaaagaaggttgcagttatcggatcaggcccggcagggctttcagctgccaattccctgaataaaagaggccatcaggttacggtttttgaacgctctgaccgggtgggaggccttatgatgtatgggattcccaacatgaaactggaaaaacaggttgtggagcgcaagatcaagatcatggaagaggaaggcattcgctttgagatcaatacggatgtgggaaaagatatcaaagcagaacagctgaaaaaagaatatgacagtattatcttagcctgcggctcctctcatccaagggatattgaagtcccaggaagagatgcaaaaggtatctactttgcagtggatttcctgaaatccaccacaaaagcactgctggacaatgggcttaaggaaaacacctatatcagtgcgaaagggaagaatgtgctggtcatcggaggcggcgacacaggaaatgactgtgtgggcacttccatccgccacggagctaagagtgtcatccaactggaaatgatgccggagctgccccacgagcgggcggaaaacaatccgtggccggagtggccaagagtttcaaagacggactatgggcaggaggaagcggccgctgtgttcggacatgatccgaggacttaccagtctacggtcaaggaatttaagaagaataaaaaaggggaggtgtcaaaagccgtcatcgtgaagcttgagagcaaaaaggatgaaaagaccggacggatggtcatggctgagattgcaggtacggaaaaggaagtgccggtggatttggtgctgatcgcggcaggattccttggaagcgaatcctatgtgaccgatgcatttggcgtaaaggttaatgagcgcaccaacgtcgccacacaaaaagactctttccggaccaatataaaaaatgtgtttactgcaggagatatgcaccggggccagtcactggtcgtctgggcgatccgcgaaggacgggaagcggcaagagaggtcgaccttgagatgatgggctacaccaatctttaagaaccgttacacggccagagacaaaaccagtttggttttgtctctggttttttttacagtttttccgtataataagaaagaaaaatcaatgggaaggacggatggatatattgaaggaatataaagaattatttttaaccttttttaagatgggtgcatttacgttcggcggaggttatgccatgcttccgatgatcgagagggaagttgtacagaataaaggctgggccaccagcgaagaggtcatggattattttgcggtgggacagtgtacaccgggagtcatcgctgtcaacacttccacgtttatcggatacaaattaaaggggattaggggaggtatcacagccactctgggatttacggctccgtccctggtcatcatcatggtgattgccgcttttatgaccaacttcagtgaactgaaagcggtgcagagcgcgttctggggcatccgggtctgtgtctgcgtcctgatgatcaacagcataaagaagatggtaaaaggcggtgtggtggactggcttaccgggattatctttgccgctacgtttttcggtatggtatttgtcatgaataatccggtgatctatgtgatcatcggtgctgccctggggcttctgctctgcgggcgcgtgcggaaaggagagcagaattaatgattctttttcagctgtttgtagaattctttaagacaggcctgtttgcccttggcggaggccttgccacacttccgtttctctatagtatggcagacaaatttcactggtttacccagggcgatattgtcaatatgctggcgatctcagagtccacaccgggagccatcggggttaatatgtcaacctattccggatatcatatcgcaggagttccgggaagtctcatagcgacctttggtcttgtgctgccgtccgtcatcattatcatcctggtggccagggtactggaaagctttaagaataaccgctatgtggaagctggtttttacggtatacgcccggtggtggccgggctaatctgtgcagccaccttatccgtgtttaaagttgcgttcttaaaaaccggagaactgaatattcataaaatactttcctccattgactttaaatctgtgattctttttgttatattatatatgataagtaagttagcagaaaaacgggggagatccatacatccgattttcttgatcgtgttgtcggggtgtattggggttgccgtactgggagtttgattatgcatattttaggacattttaggacaattacaaagcacaaaatcctggtggcaaagggctgctttaaggtcggcctttactggcaagggatcatgcacgatatgtcaaagtattctccgacggaattcattcccggggcaaggtactatcaggggaatcaaagccccaacaatatagagaggagaaagtacgggatatccagggcatggctacatcataaggggcggaacaggcaccattttgagtattggatcgattacagcttaaacccggaggccaaatgtctggtaggaatgaagattcccaaacgatatatggcggagatgctggtagacaggatcagtgcgggaaagatctataaaaagaacgattttacaacagagagccctctggagtattttaacaatgggatcggtgcatcgattatgcatgaggcatccaaggattatctgatgatgcttctgaccatgtatgccaaaaaaggagagaaggagaccttccgttatgtcaaaagagacctgaaggaagatatcagcggctatgacaaaatctctccttttgaaaagacgggttcagtagtcataggctgagtgctggtaaaattgtcttgcatataattcttgaaactctggaatacttagggtataatagctttaatgaaacggaacgaacggcctggggtgtacgataacgcctgctattttgaacctacaactatttgaacgggattccgaatatccggctggataccaagccacaatacggtggaaggtagaaggcaggatgaggaaacccacctagctgtggctaggagtcaaaattgcggggaacggcatcttgggcataacaaaagataagattgagggggatgccatacaggcagcccccttgtttcatgtcataggaaattcctacggaacctcttatgacataaaaacgcttcgcgagaatgcaaacaaaatgcgtaaggaaatcatttaactacgtcaattcacatttggtgctcaaaattgtcaattacagtacctcaaagagtgagggtctggttgttttgattgatactgaagaatggataggtctcccggcgtacctgatccaggtatacttgcccgatgggaatggcactctcatgtccgagcagatagaggctctctttgtccgccgctgcaatataggagagatttacgataaaagaacggtgcacgcgaataaatcctttgtcttttacggactgctccacagtattaagcttggaataaaattcaaatgtctggtctttaaagtgaacgactacgagacgtcccagcgtttcaaaatgtgaaatatcagagagcctgatgcactggaaggtagaacggttcctgcacacgataaacggctgctgtctctgtttaaagacagaataggcggcaagaaaaacggactcgccttttgtgtaattgagccttgacttaatgatataattaaagggataggctgtaaaacaatccccggcacattcagggcggagaccaaggaagacgacaagtccgtcggggtcatattcccggagatggacggcagtatctatgccgttcatgtctttcagcactgcatcgatgaaatagagatcaaaaaagtggtttggattttccgcatagcgaagaagttccccacctgatgagaaggctcggaaattggcctgaatctggtgtctctctgcgatggactgaaaaaggccgatatgtttttcgagggttgcaggggtatcgtcacaaaaacagatagaaaacatgatatcaccttcttaactcttatatggaataggttttaagttgtgaaagtttctttcggacctgatttaagtatgtggtgccgatagggagttcaaatccgttggtcagctttacggtgtggtcagtgactctgtcaatatggcgcatgttgatgagaaaggatctgtgaatgcgcagaaatcctttcggagtcagttccttttccaggcctgccatggacctgtagaaagaaaagcttgtattgctgtgatatacagtggtgattctttgaaatatttcaaaataataaatatctgacagaggaaacacgtgctcatccatgtcattgccgcattggaacagcttgtcccgccgctttctggctagtgagagagcttttatgtatacgtcctcaaactcggcaagggtcagatgcttgatataaaaatagtaaaaaggaaaggttggaaatgtatccgcggccagctgtttgttagccgatacataaataaacaaggcatgacagccaagcttgcgcaggctcttggcagcttccagcccggcaatctgttcgtctttgcacctggatatacgaaatatgatcacatctgcccgttccggatgggaagaaagatcaaatactagttcatctttgttgtcatattcaaagatatcagtgctgtagtggtgctttgaggcaagttcttctagtgtctttttattggctttggatgtcttccggttattgttatatatgtaaatgttcattggtatcatcactccattttgcattttgtacaactctatcttaccatggaaaaacttagaaatacaataagaaaccgaatcttttttattatctatggatatctgattttatttccggtataattggttaatatcttttaaaaggagctgtaacatatgaaattttacaataaaaatacgcagggattctttggacttgtagcatttggtgtccttctctatcttggggtcagcaacataagctacatactgaaaggaatctcttatctgatctctgtgattttcccgtttgtgatcggcggatgtatggcatttatcatcaatgtacccatgaggttttttgagacccgtttgttttccaaggtaaagaagggcagaagagcattgagtctgctgctggctatcgtctgtattatcggtgtgctggcgctgatcagctttttgattctgcctgagcttgccagaactttatacagcctggcctccagtattccggggtttgtgaatgagattcagggctttttacagaaaatatcggataatcctctactcacaaaacagaatttgatgaagattgatctggactggaacaagatcagcagtgaactgatgggcttttttcaatccagcgccagcagccttctgggatctacgatgtcagtgatcagttctgctgtgcagaccgtggtgactttccttctgggtatcgtgtttgctatgaacgcgctgctgaaaaaggaaaagctgatattgcagaccaagaagcttttgtattcttatatcaaagaatcctatgctgaccggatcgtatatatcggaaatatgtgtaaccaggcgttttcaagctttctgtccggccagtgtacggaagcggtaatcctgggtacgatcattttcatctgtatgaatatcattggactgccttatgctatgctggtagctatgtttatcggtgtgacttccctgatcccgattttgggaggcattatcggaagcaccctgggagctatcctgatctttatggtgagcccgtttaaaatggtagtgtttgttatcatgtttgttgtggtgcagcagattgaaggaaacctgatttatcctcatgtggttgggaattctgtgggcctgcctgccatttgggttttggtggctgtgacagtgggcggcaatctggcaggagttccaggcatgtttatcagcattccggcatgctccgttatttatgcactgcttagggatgcggccaatgaaaggcttaagaagaaaggccttttggagaaagttgaaaaaaaataagtatattctgcggatgttaggttcataataactccataaaacaatggaggtggaaggaatggaacgagacgatatcatctgtccatgtgtcgatgtgaccgtgggagaaataatagatgcctatgaagacggcgcaactaccgtggacgcagtcaaagatgccactggcgcagggagtatctgcggggcatgtcttgacgatattgaagaattacttacagaactgaaatcaaaataagaacaggtaaaagccggatggatttgacttattagtcagccattcggctttttattatgtcgtagaaaattccaacggagcctcttaagacataataacgctccgtgaggatcatactgcggcgctatgcatacaaattatataggaaaatgaaaattgtcgggatattccaatcccggcctttttttgtcgcaaaaaatggcatcaaaaaaatgaagtggtttcagagtgcaaaagcctatgacgtccactttggaatcgtcaattaatagatagcggtgttttgatttctgacaggcgatatttttgatttcactggtctcgatttcagtacagtatgcataattttcttgaagatcaatgccgacacaggcgataaagcagcggtcaaaattatatccttgaatctggttaacagcagtcggaccataggtcattgcaaagtcggacatatagatcccgccgaccatgatgattcttgcggttgttggaggtgtgatctgagaggcgaacagatggttgtttgtaacaatggtgaccggtctgttctgcagcaatttgaacatataagcggaggtggttccgccgtcaatgaaaatacattcgccatcctgtatttctttgcacgctatttcacaaacttttttctttgagacagaatttaattgtaatttgcttgacatgttaaagtcggtttccagggccatgacagatccgctggatggctttatggcacctcctggaatacgttttaactttccctgttgttcaagagaggataaatctctgcgtatagttgcagaggaaacatggaattcatctgccagatcattgacgtttaatatgccatcttcgtccagtttctttaaaagatattcaattcggctgttcataagcataaattcctttcgtgatcgaacattatgataccaataaacatagcacaaaactgaaagaatatcaaaatcttctggtggatagttcacaaatgaatatcaatgtttgggaataaacataaaatgattgactatggacatgaaatattgtaatatgttcatgaacgaaaataaatattttcggtaatggacaaggaggaaaataatgaaactaatcaaagctacagagaacaaggagggaacagatgaaaagctatacacaatctaaagtaaatccagatattccgggaattattgttatgagtcatggcccgtttgcagttgggctgatcgatacagcaaaaatgctgttcggtgaaccggaaaacatagctgcattttctctggaggaaggggatgatatcgatgagtatcgcagcatgttttcaaaaacatttgaatcctttcccaaaggaagtattgtactcgctgatttgtacggcgggacaccgtgcaatcaggtcctgcaatatgcacaggagaatcatcaagtgtttgaacttgtgactggggtaaatttaccgatgctgctccatgttgtcatatccagacaaagtccgggtattctggaggaaaagaatttttcactcgatgcagttgaaaatgctaaatcaggaatttcccgggtagatattgaaaggtttatttcatcagatgacgacgatgaagattagaagtaggaagtcatgaaaggagtttaatatggctaaaaaattaatggttcgtgtggatgaccggctgatccacggacaggtgcttacacaatgggttagtacgatcaatgcacagaaaattgttgtgatcgatgacgagatatcaaaggacaaaatgcgtaagaacatcttaaaatttgctgcgccggatgacataaagattagcattttctccgtggagaaagcagtggaagtatggaacaagaaccaatttgggaatatgaatgtgtttgtattgtttaaagacgtgaatatgatcaggaaatgcaaagatatggggttggttttttctgatatatcgcttgggcaaatgtccatcattcaagacaggcagcagatatataaacagttaggtttgaatgaacaagaggctcagactgtatttgaccttgaaagagagggaatccatatttattttcaaatgatccccacggacaaacaagaatctttggatatgttaaagaagatatttcctcagctacattaagaaagtcagaaataaaaaggaggatgttatatgaatcagcgaattgccggtctaaaggattttattcaggagctcaatcaaggcgtaagggaaaagaacttgtatgaatttgtaggagagtctttaaaagaaacaatgggggaaccggtacagatccggcgtgcgaaagcattccagcatgtattggaaaggacagaacaggtcgtgcttccctatgaactgatcacaggtaccatgcttggacagtgtccattaaagaaggacctgatgtcaaaggaagaacagagggagaaggcagtaacgaccctggatacatatctggacggaaagaaaaaaaacgtagtcacagatgagattatatttgatgaagagcacgtaaaaagttttgaagaaaattttggaagcaaaaaaagccgttggtctttgatggctcgtgtttatcaggattcttccattccctatgaggatctgcaggatctgatctccgatatgaaagtaagatataaagataaggatattgagccgtatgaaattgggcgggaattagaaagagcttttaagattaactatgacccggagtcaaaaaaactctttgatgaactcccttattttatcggaaaccatataagtttaaactatgaccggatcatcagggaaggattaaaatctactcgtgacagagttcagatacttggaaacgaaacgaaggatcaaaagaagaaggaatattatcaggccgcagtgatcgcagcagatgcggtaatcgcttttatccatcgctatgcagaaaccgctgtaaagacaggtgaggaaagattagtatctgtaaaacggtcggaagaattgaacaagatttcaaaggtgcttcatactgtcgcagaatcaccggcatccaatttttatgaggccgttcaattgatgtggatgctgcatatcatcgcaaatatccagggtggatctgcattgtctctggggcggatggatcaatatttgtatccattttatcaaaaggacctggagtcttcggaaattacagaagaatttgcgaaagaattgttatcttgtgtctggttgaaggtaaatgagccgagaatgcggactgtagaaagtgtcacattgggtggtattgacagggatggaaatgatgcatccaatgacctgacacgcatttgtttacaggtggcagccgatgtgcgcgtgccgtatccgaatatcgggctgcgcattaacaaaaagaatccagagtggctctatgaggaagcgattttgacaacggggtctggttcaggacagccgatgctgttgaatgatgaagtctggatccaaagtttaatgaaacttggttttccacgtgaagatgccaacgattattataatatgggctgtgtggaactggaggtcccggggaaacagcccagttatggagtttgtgaagcaatcgcgtttccggtattgattgaagaggttatgaggaagtatagagatggtatctatgaaatcctcacgtttgatgactattttagtgcttataaaaacgaacttaatattgccatcggagcggactatgaagaagcagcggaaaaaaagagattgatgaaggatcgctgctacgacccctattcttcccttctgattgacggatgtatcgagaatggaaaagacatgctgcagggaggcagtgaactgcccatggaatggtcagtgtatgcctatgggatcggaactgccgcggattccttgtatgccgtcaaaaaagtagtgtttgaagataaaagcatgacgttgaagcatttggacgaagtgttaaatgcagattttgagggctatgaatatgaacggagattattggcagactgcggtgaacattacggaaatgatcagagcaatgtggatgggatcgccaatgaagtgctggactattttacacagcatgtggatgctttgaatgaacgcggactgggggatgtttttgtctccaccttatttggatacttttttcatatttatcatggggagattgccaaagcgacaccggatggcagaaaaaaaggtgagccgttcagcgacagtatgggaccaagccagggcaaagatgtcaatgggcccacaagactgctgaattctgttctggccttagacgcagataaaattacaggcgcctttgcgctgagttttaaaatgaactcttctttctttgcggacgaatcaggaagaaccgccatgaaacagttgttaaaaacatatatagaggagggcggcccgcagatccaggtatatacgacaaatgcagaggatctcaaggatgcaatgattcatcctgataaacatagggatctgatcgtcagagtcggcggctactgcgaattttttgttgacttggaccggacccttcagaaggaaatattaagccgcacgatctacggggaatgatcatgagaaagggattagtctttggaattcagcatttttccattcatgacggcccgggaattcggagtgctgtatttttaaagggatgtccaatgcactgtctgtggtgtcataatccggaaggattgtcctctcatgtgggactgcagtactacgggagcgcctgcatacagtgcggcacctgcggatggatctttgaagatatgaagaaagccgatgttcttagtactgccaggaagcgtggactttcccggagctgtcctgcccatgctctgcggctcgtaggagaatatatgagtgtggaagaaatcatccatcaggttataaaagaccggcgttattttaaatcttccagtggaggaataacaattactggcggagaacctatgatgcaggcgttgtttgccacagaattagctgaggcggctaaagaacatgagatcacggctgctttggagacaagcggatattcatctttggaacactatatgaacattatgccctatattgacaccttcttatgggactataaggcaaccggcgaagaaatgcataaaaaacttactggtgtttccaatcagccgatactgggtaatctggcctatctctatgagcatggggcaagcattattttgcggtgtcctttgattcccggagtaaatgatacaaaagaacatttaaaaggcattgcagatatcagcagaaaatatcccgggttagcaggaattgagatcatgtcttatcacaaaatgggactttcaaaagcaaagaggattggctgtcagcaggaggaataccaggagcccgggaatgatctgaaaaataattggagtaaattaattcaagaatacgggggaaaaattacccgtatcaattaggatgaaaattataggaggaaaaatatatgaccataacattgacccaggctattatcttgggagtaatatgcggagtttggaaaagttgtatttgctatacgattggcggttttaatattaatactgtaatctttaatgctgtttttgtgggacttgtgatgggagatatgaaatcagccatgatcattggggcatccatccagctgatttatctgggcattgttgctgctgggggaaaccagcccacagatccatgccttgcggcttatgttgcgattcccattgccattgcatcggggcttgacacaaacgccgcggtcgctctggctgtccccgttgggctgttaggttctcaggtgacaaaccttgtatatctgatcaatgggtttttcgttgaaaaagcggatgaggcggcaaacagaggagatgaaagaggaattgggatctgggggatttatgttccgtttctcgttagaatcctattgatcgcggttccggtaaccgttgcaatttattatggaagtaatgtcttagcaggcgtcatgaatcatatccccgcatggctgaccaatggtttagctgcgatgggtgcctgtctgccggctgtgggatttgccatcataaccaatttgatcgcgaagcctaaatatgtgatcttcttctttgcaggtttttttctggtgcagtacacaggcttaggaacgatccctctcttacttgcaggagcatttgttacttatatgtacataacatttacacgaaacagtgcagatgcatctgaggaagatgaggatgaagaggacgaagatgagtctgtggcggtaggaacttccggggactgtacgttatctaaaggggatattttcagggcgtggacacgctggtggatatggtgtgaaaccggacatagctttgtgcgcatgatggcgcctagtttctgcaatgccatgatcccagcgttaaagagattttatccgggcaagaaaaatgatcctcattacattgaggccctgcagcgtcatatgactttttttaacacagaaggacatttcggcgggggaccgaacttaggattatcattggcaatggaagaggcaaaatcgaaaaattatgagtcaattcccaacgaagtcatcatcaatgtaaaaactggattaatggggccgttagctggcatcggcgatacgattacatggtcaactctgatgtatcttttgattgggttattcctgcctttggcaaaacaaggcaatgtcttaggggggattggacccgttgtctgcctaactgtcattgcatttacaatcggatatattctgaccagccgttgctataaatttggctacacgtttgcagaaaatatgttaaaatcgggaatcatcaatatcgtcataatggcggcaagtgttctaggactgtttatgatgggcggattagcatccacatatgtgactgtgtctacaccgattcagtgggctgtgggcggacaggtcacaaagttacaggatattttaaacagcatcttaccaggaattctgcccctcttagacgtaatgctggtatggggatatctgcggaagcatagaaattattttatggcagcaattttcgtgacagttatatctctggtcttaggatgccttggaattatcatttaatccaatcagacagtcggaaagtacagtgcttgacatccatgataggagaagatacaatgagagtaagcacttgcattacagaaaggaatgaaggataaatggatgagaccagccagaaaatcatagatgctgccatgtccttagtaagagataaaggctatgtggcgactaccacaaaggatatcgcaaatgaagccggggtcaacgaatgtactctgtttaggaagtttcataataagaaaagcattgtaatgagcggtattgaccaggaaaaatggagaggaaatttgacgccggaggttttctgtgacattcggtgggacttagcccatgacctggagatgttcatgacggaatacatgaaaaggataactccggactttgtgaaactgtccattggtctcagagcccctcagatctatgaggacacggccccgtttattatgaagattcctcaggcattcatgtcgtcgcttacagattactttgagcagatggagcaaaaagggaagattcccaaactggattttgaggcaatggctttgacgcttttctccagtacatttggattcacttttctgaatgcttccttcgaccatgagcttatggggatcagcagagaagcctttataaaacaaaccgtttctgtgttcctgcatggaattcaggacgacaacaaaatgagcagtctataaaagcttccgaataaatagagcggtactgtctttatggcagtaccgcatcatattaccctatatgcaagcgaatgcttgcatataacacataaaggatggaggtaggtacgatgaacataacaggagcagaattggtcgttaaagcattgaaggaggagaaaatagataccttatttgcttatcctggaggccaggctatagatttatttcatgcgctctatggtgagaggggcattcgggtgatcactccccggcatgaacaggggctgattcacgccgcagacggctatgcccgcaccacaggcaaaacaggagtctgtctggtgaccagcggtccgggcgcgaccaatcttgtgacaggcattgccacggccaacatagacagtgttccccttgtctgttttacagggcaggttcccacgggtttgattggaaaggattctttccaggaggttgacactgtctctattgtgaagacggtctgtaaatatgcggtcacggtccgcgaccgtaaagaactggggtctgccataaaaaaagcatttgaggctgccaaaacagggaaacccggagtagcggtggttgacctgccgaaagatatccagcaggagcttggtcctgatctgtattctgccaatgggaaactgcggccggaggcggatattcccccggaacagatccggcaggtagaagatattctgggaacatgccgaagacctttatttttggcaggaggaggtgtcaacatcgcccatgccggcaaggaaatgacgcacttagcagagaaaacagggattccagtggtaacgacaattatgggcaaaggagccgttcccactagccatcctctttacattggaaatctgggcatacacgggagctttgccgccaacacagcggtcagccaatgtgatgtattgtttgccatcggcaccagatttaatgaccgcatcattggaaatgcagatgagtttgccaggcaggcagtggtgatccatgcagatatagaaccaaagatgatttcacgaaatatcggcgtcgatgtgccaatcacagcagatgcaaaaggcgtcatctctgcactgtctgaacatgccaaaatcctggacattgaagactggaaaaacaagatcacactttggaaacagcagcatccgctggtgttgagaacaaagtaccctgataagatcaacgcctgggatgtgataggtgaaatcaatacgatattcgaacgagcggtcattacgacagacgtggggcagaaccagatgtggacaacacagtttcttgaattgaatgataaaaagcagctgatcacatccggaggtttaggtacgatgggatatggttttcccgccgccataggagcaaagctgggcaacccggacaaggatgtgatctccatctgcggggacgggggattccagatgaatcttcaggagattgccacggcagcagcctatgagcttccggtggttgtctgtattttaaataacggatatttgggaaatgtccgtcaatggcaggagatgttttatgacaaacattatgcttccacctgtacccgctaccgtcagagctgtcctttggagtgcagcggcccatcagcagattgtcctgagttttttccggatttcgtgcgtctggcagagagttatgggtcaaaagggattcgagtacagagaacagaagacataggagatgcattattagaggctaagaaaacaaaaaaggttcccacagtcattgaatttattctgggacgggaggataatgtcctgcctattgttcctcctgggaatccattgaacagtatgattgagtgagaaactgtggactgtaatacatataataaatgagaatagatacaaaaacagccctccaaaatggagagctgtttttgtattaaaacctgtcttttgatatatgccggcaatgggactcgaacccatacgcccgtaaggacaacagattttgagtctgtctcgtctgccaattccgacacgccggcttactgtcataacgaccttgactataatatcatctctaattaagattgtcaataataaacgttcagttttgtgaacatatctttccagacaggggccttatctaaaatagagaaaaacactttgacagatgacacaggattctttacaataagaatataacatagagaaaaagtaggaataaggagggaacccatgaagatctcaacaaaaggaagatatgcggttcgtctgttatatgatttggcacagcataatactggagaatggatttcattaaaagatgtctctaaacgtcagggaatctctatcaagtatttagaacagatcgtgcgccagctcagtgtgtgcggatatttaaaaagcctgagaggaccaaggggaggataccagctttccaaaaagccttcagaatatacgatcgcagatgtactggagatcacagaggggagcatcgccccggtggcatgtctggatgatgagaccaaccagtgtgaccgctattatgactgtcccaccatttttatctgggaggggcttgaaagggttgtccgggattatttaaacagtgttacaattcaggatatcttagatcgcgccgctgctaagggcggcaatgattttgtcatatagaaaggcttggcaggcttcccggtatcctgggaagccgagacttttgttctatattaatttttattttggaaggaaacctttttcttccacaggatacgtgatacatacagtaaaaacaaaacaccccaggagccggcttccgcatatgcaatgatcatattttggcatactccaacaaaagcataagaaaatataatacgggaaatcaacgcaatcattcccgatatacttgagtataagacatctccaattccttctatataaccacggattgacatcgcgaggccataaatcacataaaatgcggcaattctctgaaaaaagtcctttccaatctccgctgaagcaggacttactccaaacatggaaattaaatatccgccggtttctaatacaagccacgttagcaacaaagatacacaaatcatcatagcagttccagcatatacaatcttagtaatctgttttctttttcccgctccaaaattttgtgcaaccattgtagatattccagaaccaaggtttatgattgggagcagtatgatcgtatcgacacgatatgctgttgtgatagccgcaactgtctgagtaccgaatccattcatgaagttttgcaggataaggccgccgaatgagctgatgcaagattgaatcataggaggtatccccaggtgaagtccttctctcaagaccatagagtccagtgaccatttctttatagtgaaacacaggaatggatatttctttacgctgtacaatatgataaatactgtcattacagcctgagagatcactgttgcagcggccgccccggtaacaccccaatgcagtcccccaacaaacataatatctaatatgacatttacgacagaggaacagagcacagatccaaaaggtgcgcggctgtttccaattccgcggagcgctgaagcatatacgttatatatggcaagaagcggtattccaatcagtatgatctgaagataggcctttgccatatgaatggtttcctgtgtggtgttcatgatgcggagcaatggatatgccccggcaatgcctatgactgatatgaataagaaagttccgcccaggactacagaaaatactgagaggattttggatatatgatcatttctcccgcctccgaatttctgtgcaaataaaatagaaagtccaagagtaaaacccgtaatcgcggtaagaaatagattgatgatggtacttgttgatccgattgctgccagtgcgttttctcctgctacattcccaacgataaatgcatccacccaattataaagctgctgtaggataccgcttaaaataagggggatgcagaactttatcaatgtaaagactggactttctgctttatgtatttctcttttcatgtaaaaactcctaaaagacaaaaaccgcatgcaagaaaatagcctcgcatacggtaggtgctcacccggtaacaatatagaatataccaaaggaaggaacctttttcaagttaaaggtcttagactattttcaaattatcttaaaaaaatcttgacaaacaaagaagtggtacatataattaaaacatactaaacacgtaggaaatataggaatatagaaaaggagaaccattatggcaggaatctatcagaatgtgacagagttaataggaaacacaccgctggtgcgcttaaaccgtctggaaaaggaatatggagcagacgcacagatcattgctaagctggaatactttaatccggcaggaagcgtcaaagaccgtgtagcggcacagatgatcgaggatgcagaggcggctggaaagttaaaagaaggatctgtgatcattgagccaacctccggaaatactgggatcggactggcgtctatcgcggcttccagaggataccgcattattcttacaatgccggaaaccatgagcgtagagcgcaggaatctgttaaaggcatatggagcggaagttgtacttacagacggcaccaaaggcatgaatggagccatcgccaaggctgaggaactggcagaagaacttgagaacagcttcatcccaggacagtttgtgaatgcttcaaatccgaaacgccataaaaaaacaacagggcctgaaatctggaacgatacggacggagaaattgatttctttgtctccggcattggaaccggcggaaccatcaccggaaccggagaatatctgaaggaaaaaaatcctgacattcagatcgtggcagtagagcctacaggatccccagtgctctcaaagggtcagagcggacctcataaaatccagggtattggagcaggatttgtgccggacgtgctgaatacaaagatctacgatgagatcattgccgtggaggatgcggatgcatttgaattgggaagagccattgcaagaaaagaaggaattcttgttggaatctcctcaggagcggctctctgggctgccattcagctggcaaaacgtccagagaacaaaggaaagaagatcgtagcactgcttccggataccggtgacagatatctctctacaccaatgttttcctgaactcaagatgacagaagcaacagttaaaaataaaatataggaaagacccggggacggttgaattcttttcagtgtatgtcgaaaggaattcaactgttctaattttttgcacaggaaaagagaaaaagtccgttttgtgtctgccccctttcttttcatttttccttatgctaaaatgactcatagaaataaaggagaagacagacttatggaaaaaaaattaatgctgatcgatggccacagcatcctgaaccgggcgttttatgcgctgccggatatgaccaacagccagggactgcatacaaatgcaatcctcggatttttaaatatcatgtttaagttcctggatgaggaaaagcccacccactttgctgtagcatttgacttgaaagcgcctacgttcaggcacgaaatgtttaaggaatacaaaggcaccagaaaacctatgccagaggaactgagggaacaggttccggtgataaaagacgtgctgaaggctatggatatcccgctaatgatggaagaaggctatgaggcggatgacctgctcggaacaatgtctgtggttggtgaaaaagagggctaccaggtaaggatcatttctggggaccgggatcttttacaactggccacagaaaatgtacagatccgcattccaaagacaaagggcggcggaaatgtagtagaagattattttgcaaaggacgtcatggaagcttacggggtgaccccaaaagaattcatcgacatgaaagcgttgatgggcgatgcctccgacaatattccggggatcccggggattggggaaaagacagcggctaagatcatcaaggagtttaagagtattgaaaatgcccacgaacacattgaggatgtgatgccaaagagggcgaaaaacaagctggaagagttttacgatcagggtgttttaagcaaagaactggcaaccattaagctggactgccccattgagctttcatttgaggacgcgaagatcaatgatatttttacaggggaggcttatcagctgctgaaaaagctggaattcaagtctgtcttaaagaagtttgagggagaacatggagaagagttttccgtggacatccgcaaggtttcaaatctggatgaagcagaccagatttttaccaaggcgaaaaaaagccaggctgcaggacttgcgctgtaccatgaacaagacagcacatttctcgggctctgcacgggaggaaccgaagtatttctgtttcagacagaagggtttctcacagatgaatatctgatgggacaggcgggagaactgtaccgtttggtgccggaagtgagtatgatggatgtgaaagagtttctgaatgagctttctctgagtgaggaagacaggagtatttttgacgcggctctggcggcctatctcttaaatcctttaaagagcacttacgagtatgacgatatttctagagattatctgggggttctgcttccatccaaaaaggaacttttggacaagagaaaaagtatatttgaacagggtgagttgatcccggaaggggaacagatcattggttacgaagcctatgttgcatgtgcgtgtgtggagcctctgaagaagaagctgaaagagaccggtatgctttctttatatgaagagattgagattccaaccatggtggccctccatgatatggaagtgcggggtatccatgtggacagacaagcgctgaaacagtatggggatcagctggtagggcggatcgaggaactcaaggacctgatctataaagaagccggcgaggaatttaatatcaattcaccgaagcagctgggtgtggttctctttgagcacatgaagctggaaggcggaaaaaagacaaagaccggctattccaccagtgtggatgtattagaaaagatcgagcatttatatccgatcatctcttatatccttgagtaccggcagttgaccaaactgaaatccacgtatgcggatggactggccaattatattggggaggatgagaggattcacggaaagttcaaccagaccatcacggctacaggaaggatcagcagcacagagccgaatctgcagaatatccctgccagagtagaacttggaagggctatccgaaaagtgtttttgccagaggaaggttatacgtttgtggatgcggattattcacagatcgagcttcgggtgctggcccacctctcaggagatgaaaatcttatccatgcatatgagatggagcaggacattcatgccagaacggcctctgaggtgtttggagtgccgattgatcaggtcaccagcattcagagaagggatgccaaggcagtcaactttgggatcgtctacggactcagcgcatttggcttaagccaggatttgaagatcacgagaaagcaggcacaggaatatattgacaagtactttgagacgtacccgaaggtaaaggaatatttgaatcgggaagtggaaaaaggaaaagaagagggctttgtgaccacgatgttccagcgcatccgtccaataccggagttaaagtccagcaactttatgcagaggaatttcggggagcgtgttgccatgaactcaccgatccagggaacagcggcggatattattaagatcgccatgatccgggtcaatatggaactgaaaaaaaggaaactgaagtcccgcctgatcctgcagatccacgatgagcttctgatcgaggcctatgacagtgaggtggaagaagtgaaagaaatccttacaaaagagatgatgagcgcagcaaagctttctgtaccgctgagtattgatattcacacaggaagcagctggtatgaggctaaataaatgaagaaaaaagtcattggaatcaccggtggtgtgggctccggcaagagcgaagttttaaatattttaaagaatgattacggtgccggccttattgaggcagaccgggtagcccatgagctgatggagccgggagcagtaaactttaaagcattggtgaagcagctcggtgaacaaatccttacagagaaggggagcattgaccgtgctgccctgggtgccattgtatttggcgatgaagaaaaattgaagctgttaaacagcctgacgcatcccaatgtagtaaaagcgatcgaacaccggatagatgagatggagaaggattctaaggtccggttcatagtatatgaagcggccctgctcacaggggcggaatttgagcagagatttgaccagctttggtatgtgtttgccagagaagagctgagatatcagaggcttaaggagggaagaggctactccgatgagaagacagcctctatgattaagagtcagccgggtgaagacagcttcagaacagccgctacccatgtcatcgacaactccggaagtcttcatgagacaaggcagcagatcgccgatattctaaggctggaaggcctatagggaagggagaacagtctcctgaataaatttttcaaattttttctctgacaggatctcatttgtgacaaacaatccctggtaaaataggctgaaagcagtaaatggagcaggagcattttgtgcctgcttggttgtttcgattttatggacggtgagaggcagcccatgaagcttagcgacatcctgaaggagagggatatattttgcagtgtgcggacattgattggtataatagatcaccataccgtcctcgttgatctttccatcttttgcacagcccttaaatgtgggaatcggtgcattctcatcgaagggcagatagagcagttcaaagaaaggatgtgcggtatccgcagtgagaaatcctctgtgtctcagataacctggatcagacagaaatggttttttctttgcggaggaaagtgcggtgaggccggattttcctgcttttttggcatcttctatacactggttcaaaagctggtcagaaagcccctgccccttgaattttcctgaaacccagagacagttgatgtgcatatattgttctgctgtcacaggcagccaggcattttcagcgggaatatattcgatgaacacttttccgcgggcatccagcttacgaaataccaagccgtcagcaaaacgctgcttcatccaggttttttttgaggaaacacaagtttcacctttcttttctgttatggcacagcaaatgtgttccttatcaatattgctttggtccacagagataaatgttaagtcattcatgggaagactcctttcttttcgtttgatacatctattataacagaaagaacctgacagcagtctgtcaggttctttgcatcactttaaaatagaggaaagcagtttttttgagatcgtaaattctggagttcccatgtatccgggagcagcctcatatttgtcaaagacgatgacaaggtcaccagacggtttcaggtaaaagttctgtgaagcagagatctttttgaactcatctacgggaacatcgtctttttttgtatcaataaaataagatttggaaggatcctgtttcatttgctgccgcatctgtcttttgatctctttggatatgaccgtttgatagtcggcatttttatgaaacaggccgcgaagcttcatgatcttgccggtttttttattgatattataaatgcggctgtaggcgtttgagcttccctcagaggtttcagtgcggatctgtatggaaaggaaggagttgttgttcaacaggactttatagtctgtggtgagacttttgtgggttttgctgttttttcggagatcctttgcaaattccttttttattatatctgtgtactgtgccatctctttgtttaattctttctgggtctttttatctttcagaccggttactttcggtgttttgatctttgcttccatattgttttccttttcctcataggaacggaaggtgaccaccttgacaatgcttttcagcacaggaacctttgtcatagcataggcaatgttctggtttgtgtttgcggccacggtgatgacaaaaagagcagccgcggcagataatcctaattttgttccaaacgccgtaaaacgtgctttttttcgggctctttcattttccgcttttcctttctcgatggaatccatcactttttggtgcagctcttttggaatttcaatgtcttcatactgttgtttgagacgatccattttctttttattttccatgatatgattctccttctgacaattcgacttttaattttttcaggcttcggtagagcagagattttactgagtttaaattctcatttagtatttcagcgatctccgaaagcttcagatcctcaaagaaacgcaggatgactacctgtttttctctggggctcaatacatttaacgcgtctaacgtatcaaaatcccggtaggaatcctcagatccgtattcgtaatcctcgatccctatgacttcctttttgtttttcctgatcaggtcaattgcagtgtttatggtgatccggtaaagccatgtctttacatattgaggctttaccgtgtggcattttgtgatggccttgcaggcactctcctgaacgatgtccatggcgtcactctcattgtgcacataagtatatgccatacggtaaaggctctcatattcagagacaatgatgtctgctgtcaggctttccatctccgatgtctttttcatgaatgaaacctccttgatttgtagctacaaaaattagacgcagcagaaagagaaatagtttcaagggagtttttctccgttgtctccagtcagctctggaaaggcctccatacgacaacggagaaaaacttttgtaggcagtaacagttattcggcttgctttttcagataggtcataaattatttattaaataaatgagccagctaaacattaggtaccgatctgagatagtttttgttcattatcggaaggaggccttaccagagtcgactggagataatgaacaaaaactgtctctttcaattatcacagagtacggataaaaaaactatacaattttcctaaccttatgatataatggcagatagattcggaccgcgcttttatgcggacgaagatgaattgaggtatgagaatggaattatcaagtattgcaagcagcagtgagggaaactctatctttgtaggggcaaaggatacgaagcttttggtggactgcggcatcagtgcaaagagaatagaaaagtccctgggggaactggataccagggccgatgagcttaccgggatcttggttacccatgagcactctgaccatatcaaggggctgggagtgatgatgaggagatacggcctgccggtttttgccacggcaaaaaccatcgatgcggttttaggaagcaggcatattggaaaagtggagaagagcttgttccatcccattgaagcagatcacccgtttaggcttgacgacattactgtggaagcatcccatgtgtggcatgacgcggcagatcctgtgtgctattccttctattcagaagggtttaaggcaagcattgccacagacctgggagactatgacgaatatctggtggaaaagatcagggattcccatattttatttgtggaagcaaaccacgacgtgaacatgctccaggtgggaagctatccatattatctgaagcggcgcatactgggcgaccatgggcatctatccaacgagcggtgtgcccagctgattgaagataccgtgacccaaaagacccagaaggtatatctgggacatttaagcaaggagaacaactttgccgagcttgcctatgagaccgtaaaggtagcactgacaaagccggattttctgatggaagtggcaaagagagactgcatttcatccatcaccaaagtcagttaagatacatatttttaggaggattaaaaatggataagacagtaattacagtggtagggaaagataatgttgggattatcgcaaaggtctgcacctatctggccaataaccatgtgaacattctggatatttcccagacgatcacagggggattcttcaatatgatgatggttgtggactcttccgaggccacaaaggatatcacagtattttcagaagaactgaaacagatcggggaagaactgggcgttgtcattcaggcacagaacgaaaagatttttaatgttatgcacaggatttaacgggggtctgaaatgataaatattaacgaagtaattgaaaccaataagatgatctcagagatgaacctggatgtgcgtacgatcactatcgggatcagtcttttagactgcgtaggttccacactctctgaagtaaaagaaaatatttatacaaagatcaccacagttgcgaaagatctggtgaaaacagggaaggatatagagaaggagtttggcattcctatcgtcaacaagaggatctccatcactccgattgcactggtgggcggaaatgtctgcaagacttccgatgatttcgtagagcttgccaaggtgctggataaggcggctaaggaggtaggcgtcaacttcctgggcggttactccgcgctggtgagtaaaggaatgacaaaagcagacgagctcttgatccgttccattccgaaagccatggcatctacagattttgtgtgctcctccgtgaatgtgggaagtactaagactggaatcaacatggacgcagtgaagctgatcggtgagatgattaaggagactgctgaattaacaaaggaaactgactgtctgggatgcggaaagtttgtcgtattctgcaatgccccggatgataatccatttatggcgggtgcgttccacggagtgacagagacagattctgtcatcaacgttggagtcagcggaccgggagttgtaaaacgtgccattgaacttgtgcacggggagaactttgaggttctgtgtgagacgatcaagaagactgcatttaagatcacccgtgtgggacagctggtagcgaaagaggcttccaaacgtctcggaatcccgtttgggatcattgacctttcccttgcaccgaccccggctgtgggcgacagtgtgggagagatcttagaggagatcggacttgagtttacaggtgccccgggaacaacggcagcgcttgccatgttaaatgaccaggtgaagaagggcggagttatggcttcttcttacgtgggaggtttaagcggagcgtttattccagtaagcgaggaccagagaatgatcgatgcggtcaacgcaggcgcattgacactggaaaaactggaggccatgacctgtgtatgttctgtaggacttgatatgatcgcaattcctggaaaaacaaaggcatccacgattgcaggaatgatcgccgatgagatggctctgggaatgatcaaccaaaagacaaccgcagtccgcatcataccggctatcggaaaagatgtgggagaccaggtagagttcggcggtcttttaggatacgcaccagttatgccggtcaatgaattctcctgtgatgactttattaaccgcggcggcaggattcctgcgccgatccacagttttaaaaattagaggtgaagacttttggggtattaagccatttagaaccaaaaaaagtttttgaatattttgaaatccttaccggaattcctcacggctcttacaactgtaaggctgtgagtgatttctgtgtggattttgccagacagagaggcctttttgtactgcaggacgatcactataatgtgatcatcaaaaaggaggcctctccttcttgtgcccataagcctgctctgatccttcagggacatttggatatggtatgccagaaggagcctggcagtccagtggattttacaaaggatggactggaactggaaattgacggggactttgtccgggcaaaaggaacaaccttaggaggagatgacggtattgctgtagcatactgccttgccctcttagatgatgacacggtttcgcatcctcctttggaagtcgtgtttacaacggaggaagaagtaggcatggagggagccacggcccttgatacctccgtccttgaaggaagatatcttttaaatattgattctgaggaggaagggattctccttgcagggtgcgcgggaggtaccacagttaaggttaccctgcctcttgaatatgagaagagacagggcagcatctgccagatctctatcacaggacttttgggcggacactctggcacagagattgacaaaaaccatggaaacgcccatattttaatggggcggatgcttgagtacatggaagggatccatttgatccgcatctatggtgcccaggaacagaaggacaacgctatcccaaacgaatgctatgccaagctggtctatgaggacagggatgctatagaagaggccgcagcgaaactgcttttatactgcaaggagcagttccaggatacggatgatggaattgaagtcaaccttgagttttttgatgcggaggctgaagaatgtctgacatctgaggcacaggagagagtcctttatttcctgacccatacgcccaacggaatccatacgatgagcagggatattgaggggcttgtggagagttccttgaatcttgggattcttaagatggaggccggaaagatctccttttcctttggagtccggagttcagccccggtttataaggaggaactggccggaaatcttaagtcactggcagagaagcttcatggaagctatgagcggaccaatgattatccggcctgggagtacaaaaaggattctgtgctgagagaggtatttctggataagtactgtcagatctacggaaaagatatgaaggtggagatgattcatgcaggtcttgagtgcggtatttttgcttccaagatcaaggggctggatatcgttgccttcggaccggatatctttgacatccacaccacatatgagaggctttcgatttcttctgtgaagcggacgtgggagctgctgttaaagatcattgaagagttcccgtaaaggaccatgcagtcagacagctgaaataaataggaaaagaaccatttagataaaggagtagacgaatgagtgaaaatgtatatgatattttacaagaaagaggatttatcgctcagaccacccatgaggaactgcgcgatctgcttggcaaagagaaggtaacgttttatatcggatttgacgctaccgcagacagtctcacagcaggccacttcctgacggtcatggctatgatgcacatgcagaaggcaggccacagacccatagcgcttttgggcggaggaacgaccatgatcggggatccctccggaaaatccgacatgcggaatatgatgaccaaggaaaccatcgaacacaatgccatgcgctttaaagagcagttatcccggttcatctcgtttgatgatgacaaggcgattcttgcaaacaatgcagattggcttttagaccttaattacgtagaatttctccgggagatcggagttcatttttccgtcaacaaaatgctgacagcggagtgttataaacagcgtatggaaaggggtcttacattctttgagtttaactatatgctcatgcaggcctatgacttcctggaactgaaccgcagatatggatgtacattagagatgggcggcaatgaccagtggaacaacattctggccggagcggacttgatccgccgcaaggaacagaagaacgcatttggactgaccctgactctgctcacaagaagtgacggagttaaaatgggaaaaacaatgtcaggcgcagtatggctggatccggataaaacttctccttatgaattttatcagtactggagaaatattgaggatgtaaaggtggaagagtgtctgggactgctgaccttcctgccgatggaagaggtaaggtctttgggcgcacttcaggatgccgagatcaacaaggcaaaagaagtgctggcatacgaagtgacaaagatcgtccacggagaagaggaagcaaagaaggcacaggccggtgcgaaggccatgtttgtcaaaggtgcggccagtgaggatgcgccgatacatgaatatccaaaggcacagcttgaggaaggccttgatatcctgacgcttttggtggatgcaaagctttgttccacaagatccgacgccagaagaaccgtgacccagggcggggtttctgtgaacggtgaaaaggtcacagactttaagaaggtttattcttccgcggactttgacgataaagaacgtctgttgctgaaaaagggaaagaaaagcttctgccagataaaagaagagaaataaagaaaagattcaggaacaggacatacaggtgtcctgttccttttgatattctatgtgcaggatgggaggtgagcgtatggcatcaagtgctgaatttgtagagtatgtatgcggacagctggaagatacgggaaatgtccgctgccggaagatgttcggggaatatggtgtgtatctggacggaaaatttatcggtgtcatctgcggcaatcagctgtttgtaaagatcacgcaagcaggggaaaagattctgccggactgtgcaaaggaaccgccctatgagggggcaaagccctattttctcatagaggaactggaaaatacggagctggtcagccagtttttaagagctacctttgaggaacttccgtttccaaaaccaaaaaagaaaaaatgaaaacagccgctttccttttaatggaaagcggctgttttgctgaccggagtcagcggaaatttttttggatttcattcagggctttttgggtatagggatccctctggtcgatgtgctgaatgacggacttgatcttttgggcatccttgttgcctgcagttttagacagggataaaacaaacagcagaaggatgacggaaaagattgtgcgcagcttcagaaaagaccaatagctggcgccctcttccgggtctgtgtgaaacggatcggaatgggagctgtatttttgattcagtttcagtttttcctgttccatacgaagccttgttaaatctgtcatctcatcatctcctttgttcattatatgaaaaagggaaatttctatgacacaaaaagttcagacattttataatttctttatgttttctagtaaatgaaaatgctataatggtatctataccctcagggcaccccgtattttataaccctcgggtgagcgcgctttgcgcggtatgggttcagtttttaagaaaaagaaaggtgagatgatgagagataagattcaaaattttttaaggggacgctatggggcggattccctttccaaatttttaatggttgtggctttgattgccatgtttgttcctgtttttataaagaagttttttcttctctatgatctgggaattgttttgctggtgtatagttatttcagggttctttccagaaatatctctaaaagatcagcggaaaatgcggcattcttaagaaggaccagtaagatcacaggcttttttgcaaagaagaagctgcactttcagcagcgtaagacacataagtttttccgctgtccgggatgcggccaggatatcagggtgccgaagggcaagggaaagattgtgatcacctgcccaaagtgccgcaaagagttccaggcaagatcataaaaggaggtttacatgtttgggtatttgaccgtcaatagaccggagatgaagattaaggattttgagcggtaccgcgcctattactgcggcttgtgccggcgcctttataagaattacgggaaaaggggtcagctgacgctgagttatgatatgacatttttaacgatcctgctgaatgggctctatgaaccgaagctttgttccggtaagcatttctgtggactgcaccccaccaaaaggcagaaggtgctgtgcaatcagctgagtgactacgcagcggatatggggatgcttcttacttattataatctgctggatgactggcaggatgaaagaaaactaaaaagccttttattggcagacagtattaagaaagcctgttcagagatcagcggcagatatccgagacagagcagggcggtccggaactatattaagaagctttccatgtgcgaacaagaggaggtgaaccagctggaccgggtggcgggactcacgggagagatgctgggggagatctttgtgtgcagggaagatgagtggtctgaggatctgagaaaaatgggatttttcttagggaagtttatttatctcatggacgcctatgaggacctggcggaagaccaggagcacggacgatataatccttggagtttttatgaggaggatgcgggatttgaacagaaggcagagacaatcctgacgatgatgatgacagagtgtgccgcagtgctggagcgtcttccgatcctcaaggatattgaaattctcaggaatatcatttattctggtgtatggaccaagtttgagatcgcaaagaacaaaagaaaaggcaatgaggaagatagagatggatgaagcatatagaatcctcggcgtatcacaggatgcgaccgatgaggagattaaaaaagcataccggagactgagcaaaaagtatcacccggatgccaacttaaaccagccggaatatgcggagcggaagtttaaagaagtccaggaggcgtacaagaaggtcatggactttagaaaatacggttcagcgggaggcaatccatacggaaatccgtatcagggaggacagtcttcctacggagggtaccaaaacgccggaaccggttcagcggagatggcggcggcgcttaattatctgcgggcgggccattatcaggaggctttacaggtgctcagccgcatttcccagaggagtgctcagtggtattatttcagtgctgtagccaatttaggcattggcaacaacgtgacagctttggaacatgcccagacagcagtacagatggaaccctccaatatggaataccagatgttcttaaaacagatgcagcaaggtggaaattggtatcaaaatatgggttccggctacggaaggagcagtatgggaggcagctgctgtatgcagctttgtatgctgaatcttttgatcaactgctgctgcagaccttattaacaaaagaacacaaacaggaggacttatgggtaagatcatagggattgatttaggaacgaccaacagttgcaccgcagtaatggaaggcggaaaagcggtggtcatacacaatgcggagggatcaaggacaaccccttccgttatggcattgacgaaaaacggagagcggctcatcggagacgccgccaaaagacaatcagcggccaatccggaacgcactgttgcctccatcaaaagacatatggggacagactacagggtgaaacttgacggaaagaaatatcttccccaggagatctctgcacagattctgaggaaattaaaggacgatgcagagagctatctgggaacccaggtgacagaggcagtgatcacagtaccggcttattttaatgacgctcagaggcaggcgaccaaagacgcgggaaggatcgcagggctggatgtgaagaggatcatcaacgagcccacggctgcggcactggcttatggcctggacaacggaacagaacaaaagatcatggtctatgacctgggaggcggaacctttgacgtgtcggttatccagattgaggacggagtcattgaggttctggcaacctcagggaacaatcatctgggcggggatgattttgaccaggcagtggcagattatctggtggagaccttcaaaaaaacagacaggattgatcttaagtctgatgtacaggctatgcagaggatcagggaggctgcggagaaggccaagatcgagctgtccagcatgtcagagaccaatgtgaacctgccgttcatcgtggtagaccggggagagacacaccatatggacattcagcttaccaggaccaagtttgaagagctgacctacggacttgtggctaagacagaggaaccggtcagaaacgcactaaaagatgcagggctgtctgcaggagaattgagccgtgtgctcatggtgggaggttccacaagaatccctgcggtccagaggaaagttggggagatcacagggaagcgtccggaccagtccttaaaccctgacgagtgtgttgcgctgggagctgccatccagggaggaaagctggcgggagaggcagggaccaacgaagtacttttgatggatgtgactccgctctccctctctattgagactatgggaggcatggccacaaggatcattgagagaaactctaccattcccacacgccacagccaggtctttaccacaggggcaaacttccagactgccgtagatattaaagtcttgcagggtgagcgcatgatggccaaagagaataaggtcatcggaaacttccggttaaagggcatcaaacgtgccgtgaggggagtgcctcagatcgaggtgaccttcgatatcgatgtcaacgggatcctgaaagtgtcggcaaaagatctgggaacgggcaaggagcagagtgtcgtgatcacttcgagttccaatatgtctgaggacgagattgaacaggccatccgtgacgcacaggaaaatgcagcgtttgacgaggagcacaaagaggcagttcaggcctaccacgaggcagagcaggcccttgcacaggcagaacagtatcttgtcgaacacaagaaggatattgaaaaagaaaaaaagaaagccatcaaggatgcggccacttctatgaaaaaggccatgaagcatgtgaagattgataagatcaacggggagcaggcggcggaactgaatgcggcaaaagaggaactgctttctgtctttccggaagcttagaatatagtattctataatatagtaggaaccgttcttttaaaagagcaggttcctattctattttatgaggttttttggagagaaatttaaaaaaatgtataggaggggttgacaacaaaatttaaaagtgataacttatgttatagatattagcactcgtctaagttgagtgctaataatgaaaggaaagataccatggatttaaatgatcgtaaaagattaatattaaaagcgattatagccaattatctggagaccggggaacctgttggttccaggaccatctccaagatggagggactgaatctgagttcagccacgatccgcaatgagatggcggacttggaggatctggggttcattctgcagccacatacttctgccgggcgtatcccatctgacatgggatatcgattttatgtggatcagctgatgcaggacagagagtcggacgaagaagaacggctcgaacttgtgcagaaggtcgacaagatggaagtgatgttaaagcaggttgccaatgtcctggcgtccagtacaaattatgctacaatggtatctgcccctcagtacaagaacacaaaactcaagtttgtgcagctttcccaagtagatgattatagtctgctggcggtcatcgtggcagacggcaatattgtgaaaaaccagatcatcgacgtggaaaaaccactggcaaatgacgaagtcctaaagctgaacgtattgctcaattcttttctgcagggtctgacactgaaggagatcaatctggaactgatccagaccatgaaggagcaggcagggattcacagcaagatcctggaaaagatcctggaggagatcgcagttgttatacacaatgcggaccagctggagatttatacgggaggcgcttctaatatcctgaagtatccggaacttggcgcgccggagacggccactgaacttttggacgctttagtagagaagaaggcactgaacaagctggtggatgatacattgggaagtgatgaccaccacggaatccaggtctacatcggagatgaagctccggtgaagaatatgagtgactgtagtattgtgacagccacttatgaactggaggaaggcggaaccggaacaatcgggatcattggtcccaaacggatggattataagcgggtggtaaaaaccctggagaatcttaccgatgagatcaacggcctatttaagaaaaaaccataggagggaaggtgcattatgggagaagagaataaggttcaggaagaagaaatgaaggaagataaaaacgtacagcaaaaagaagaaccaaagaaaaaagatacaaaaaaggcagataagaagcagtcaaaaaagcaggcggcagaagatttgatgaaagaaaaagaccaacagatcggtgagctgactgataagtaccagcgcctgatggcagagtttgagaacgtcagaaaacggacggcaaaagagtttgtccagagatatgacatgggtgccatgggagttttagaaaagcttctgccggtggtagacaactttgaacgcggacttcaggctgtcgcggaagacgaaaaggataccccgtttgttcagggaattgaacagatctataagcagctcatgggaactcttgatgaactgggagtgaaagccatggacgcagagggcaaagaatttgacgcgaatctccacaatgcggttatgcacgtggaagatgaagaagccggagaaaatgtcgtggttgaagaactgcaaaaaggatatatgtataaggaaagcgtgcttaggcacagtatggtaaaagtagcgaactaaatgtaagaaacttgagaagatcaagcgaaagcattggaaatatagaaagatttattttaggaggaaatttatcatgggtaaaattattggtattgatttaggaacaacaaacagctgtgtagcagttatggaaggtggaaaaccaaccgttatcacaaacgcggaaggtgtgaggacaacaccgtctgttgtggcattcacaaagacagatgagcgtatcgtgggagaaccggcaaaacgccaggcagttacaaatgcagagaagaccatctcttccatcaaacgccacatgggaacggactacaaagtaaccattgacggaaagaactatacaccgcaggaaatttcagctatggtgcttcagaaactgaaagcagacgctgaaaactatcttggagaaaaagtaacagaagcagtcatcacagtaccagcttactttaacgatgcccagagacaggcaacaaaggatgcaggtaagatcgcaggacttgatgtaaaacgtatcatcaacgagcctaccgcagctgctttatcttacggactggacaatgaaaacgagcagaagatcatggtttatgacttaggaggcggtaccttcgacgtatccatcatcgagatcggtgacggtgtcatcgaagttctctccacagccggtgataacaaattaggcggagatgacttcgacaatgtgatcacaaactacatgttagacgaatttaagaaacaggaaggcgttgatctctcaggagacaaaatggcaatgcagagactgaaagaagctgctgagaaagcaaaaaaagaactttcttccgcaactactacaaacattaaccttccatttatcacagccacaaacgaaggaccaaaacactttgacatgaaccttacaagagctaagtttgatgaacttacagcatctcttgtcgagagaacagcaacccctgtcaacacagcgttaaaggatgcaggaattgccgcttctgaactaggtaaagttcttctggtaggtggatctacaagaatccctgcggtacaggataaggtaaaacagctgacaggaaaagaaccgtttaagggaatcaatccggatgagtgtgttgccatcggtgcatctatccagggtggaaagttagccggagacgccggagcaggcgatatccttcttctggacgtaactccattgtccctgtctatcgagactatgggcggcgtggcaaccagactgatcgagagaaatacaacgatcccgacaaagaagagccagatcttctccacagccgaagacaaccagacagcagtagatatcaacgttgtacagggtgagcgccagtttgccaaagataacaagtctttaggaagattccgtctggatggtatcgcacctgcaagaagaggtgtacctcagattgaagtaacctttgacatcgatgccaacggtatcgtaaaagtttctgccaaagaccttggaactggtgcagaacagcacatcaccatcactggcggatccaacatgtctgacgaagacatcgataaggcagtcaaagaagcagcagaattcgaaaaccaggataagaagagaaaagaagccatcgacaccagaaacgaagctgactctatggtattccagacggaaaaagccctggaagaagccggagacaaagtcgatgctacagaaaaagtaaaagtagaagaagatttaaaagcattaaaagacctgttagagcagacaaaagacgctgaactgacagacgctcaggtagaagacttgaagaacaaaaaagatcagctcatgaacagtgcacagggattattcaccaagatgtacgaagctgccgcagccaatgcccagggagctcaggagactgcaggggacgctgccggagcagcaggtgcagcagatgatgtcgtagatggagattacaaagaagtataaggaaaaaagaaggtagacgattatggcagataaacgagattactatgaagtgctgggcgtgagccgcagcgcctcagaatcagaaataaagaaagcctaccgtaaacttgcgaaacagtatcatccagatacgaacccgggagataaagtagccgaggcaaagttcaaagaagcttccgaggcctatgaagtcttaagtgatcctgaaaaaaaagcgcagtatgaccagtttggtcatgctgcctttgagcagggcggacccggaggatttaatggaggattcggcggttttgatttcggcggggatatgggtgatattttcggagatatcttcggcggtatgttcggcggaggcggaagaagccagcgcgcggccaatactccgacccagggtgctcatgtgcgggcaaggatccatgtgacttttgaggaagcggtcttcggaaccacaaaaaaactggaaatctctctgaaagaggaatgtgcttcctgtcacggaagcggtgccaaagcgggcacgcagccggaaacctgtccgaagtgcggcggtaaaggccaggtagtgtatactcagcagtccatgtttggcacggtgagaaatgtccagacctgtccggactgtcacggaaccggccaggtcatcaaggaaaaatgcccggactgtcacggaactggttacacgagccagagaaagaccatcgaggtcacagtgcctgccggtatcaacaatggacagagcatcaggattcggggaaaaggagagcctggaactcatggcggcccaagaggagatcttcttgtggttgtttctgtggaccggcatccgaagttccagagacaggaatacgatattatttccacggagccgatttcctttacccaggcagctttgggggcaaccatcaagatcaatacggtagacggtccttatgattatacaatcaaagcgggaacccagacagatacacgtgtgcgcctgaaaggaaaaggtgtgccgactttaaggaataaaaacgtccgcggtgaccactatgtgaccttagttgtccaggtgccggagcatctcaacgaagaacagaaggatgctttgaagaagttccaagaatctatgggtgagacaccgaaaaaagaagaacataaaggattttttgggaaacataaaaaatagattatgcaggattatgattgaaacaacatcatagtcctgcattttttattctataggaaagttctgcgaacctccctatggaataaaaaagccctgcgggcattatgcacacaaatgcgtgaggaaactatttgactacgtcaaatcgcatttggcgcgcaaaggtgcccagcccctcaaagagtgaggggttggggagatgaagtgggcttgcccactttgttcttacctgttaatgttctctctggccaggcagttgataaattcagaaggggtacgcgcagagacaagctgtttgatattctgcgggttttccaggacacgcacgatcccgtcgtacagttccataaattttttccggtcttcctgatggactgcgatcatcataacgatatggatcatgtgctcgtcccatggaatacctttttcgctggtgagaatacagaccattgtcctgcttgcgttcatatggagtgaatggggcactgcaaaagcatccaagaaacaggtggatgacaaacgttcccgttcgagaacagagtcgataaaatcatctcccgcaattccaaagtcaacgatcttttctccaagaaagcggatcacattttcttttgcagaaaattcaagattctgaaaaaacagaggaattaattttaggagtatgaatgcgcagagagtatttgatgaggtgctggaactattaaagtagaaataaaccaaaccctggagagaagttttttctccagggttttataagtgcttataaaagatgttccagcgtatgtgcaatgccgtcttcattattgccgagtgtcacttcatcagcaatctctttcagagcatcacaggcatttcccatcgccactccatggcctgcaaattctatcatttccaggtcgttctccgcatctccgaaggccatcacttcctcgggagagatttgaaggagcccacaggtacgcctgagaccttctgccttattgatccctttgggcatggcctctatgtaaaatggtgctgtcctgacgaaaacaaggtcgtcttcaaagggttttccaatctccgaaagaacctgccagagctgatccggctgcacggacattaagatcttgaccagatcaaagtcgaggaaatcagccaatgaagggacttctgtacattccatctgattgttccagcactcatgctggactttgtagccattcttgtccgtaacataaaagcgttcgccgtcatcgatgataggtaccaccggatagtgttccaagtgccgcaggacttccttggcgaaatcacaggggaaggactgctggtggagcactgtcttgtcatcggctctaaggatctttccgccgttgtaggcgatcagcattccgtggtatttttccatctctaatatacgcatttctttgtaaaggcccggaaccggacgggcagaacagagggctacggtaatgccctgtctctgtgcggcaagcagggcatctctggtttttggagtgaccgttttttcatcggtgtttaaggttccgtctaaatccagggcgatcagtttatatttcataagtaggtaccatcctttctgtatgtaaatgatagtcaaaaaatattataacattaagaggggctgattgaatatatagataaaaatttattatgttatgataaaaaactataattatgaataattatagtacagcagtataatagaagtaatgaaacctggagatcttagattaggctacacagagtataaaatggagggatgagaagatggagtattcacttgacattgcccaggctgaccgggtgttggaagcgcttcgcagagactaccgcgtctatgccccgaaacgttttccaaaacaggggcgttattctgacacggatatcatacgctacgatgaggtaaggaaatttgaagaaattgtctggaaggaaaagtcagattatccgatgaaagaggttgtaatgccgattcagcagacacttttctattacacagaggatgagtacagaacaagcaagaatcctgtaaagcctgttttaatcctggccagaccgtgtgatatcaatgcccagcatatccaggatgaaatatatgcaggcaacggaggctatacggattattattatgagcgtatgcgcggccttgtaaagtttgccatgatggaatgtaccggcggggatgatacctgtttctgtgtttctatgggaagcaataaaaccgatgattattccatggcagtccggttccgggaggacggggccgatgtgcagatcaaggaggattcgttcgatacatattttgaaggaatgccaaaaggcagctatacccctgcttttgtggaagaaaatgaaacaaaagttaccatccctgacctttctgacaaacaagtgcggctggcccttaaaaagcatcctatgtggagagaattcgacaaaaggtgtatctcctgcggcagctgtacggtggcctgttctacctgcacctgtttttccacgcgggatctgagctatggagataatccggaggctggcgaacggcgcagagtgaccgcatcctgccagatcgcaggatttgatcagatggcaggccagagagagtttcgtgacaccgcaggcgacaggatgcgctacaagatcctccataagttccatgactataaagcacgtttcaagaccaggcacatgtgtgtgggatgcggcaggtgtgcccaccgctgtccggagctgatctctatttcagcgactgtttccaaggtgaatgatgcggtaaacgagataaaagccgagatggcacagcaagggaggtaaaggtatggaaaattttgttcagccccagccatgtacgatattaaatgtaaagcgggaaagcgagcatgaatggacgttccgggtcgcttctgatgccaggccggaccacggccagtttatgcagctttccattccgaagacaggggaggctccgatctcagtttccgcccagggagacggctggctggagttcaccatccgctctgtgggcagagtgaccaactgcattttcagcaaggaaaagggggacacactttttctcagaggaccttatggcaacggatggccggtagaagaattcagaggcaggcatctggtggtcatcaccggtgggaccggattggcccctgtgcgctctcttctccataaatgtgcggaggatgtggactttgtaaaagatgtacacctcatctccggattcaaagacgaggccggaatcgtattcggcagagaactagaagagtggaaggatcaattccacacagtttatacacttgatcatggggagaaagatggctggaggaccgggatggtcactgcttttgtaaaggagatcccgtttgaaagttttgaagaagattatgctgtcatcgtggtagggcctcccccaatgatgaaatttacaggactggaacttttaaactgcggtgtggacccggaaaaaatctggatgagttttgagagaaagatgtcctgcgccatcggaaagtgcgggcactgccgcatcgatgaagtctatgtctgtctggatggaccggtattcccttacacaacagccagggatctggtggattaaggaaggagtgtgcaacaatgaatcatgatatcaatgtgggcaaagtacggctgaactgtttccgccaatccaaagaacctggagtgttcatgcttcagatgagggttcccggaggaaccgtggatgccaaatacctgtcttacgtggagcatatctcccagacctggggggacggcaacttccatttcggcacgcgccagacctttgacattccaggtatcaagtatgaaaatattcctgcagtcaatgcatatctggagcagtatatcaaagaagtggacggagaactctgtaaagcggatatggatacggtggcccatgagccagaaccgtgggatccaaaggcaggctatccgaccatcggagctagaaatatcaccgcttgtatcggaaactaccactgtatctgcggcaattccaatacctttgagttggcaagaaagatcgagccaattatatttcctagccattaccatattaagatcaatatttccggctgtcccaacgattgcaataaagcacatatgtgtgactttggcatcataggaactgccaggatgacgtatcacccggagcggtgcatcggctgcggagcctgtgtgcgggcctgtgaacagagagctacacgggttttaagtctcaatgaagagacgcagaaaatcgaaaaagatacatgctgctgcgttggatgcggggagtgtgtgagagcctgtccggccagtgcatggaccaggcaggagacgaagttttatagagtgatcctgggaggacgcactggccgccagactcccagagcgggaaagatgtttttaaactgggccacggaggaagtgatccttaaagttctcgggaactggcagaagttttctgcctgggtcatggactataagccggagtatttgcacggcgggcacctgattgaccgggccggctataagaagtttaaagagattatgctggacggcatagagttaaatccggaatgccttgtggcagaggatattttctggacggagagcgaataccgctccaactttaatgtaaaaccgatcggcatgcactgtactgccggacctcagaacgattgagatatacatcaaagccctggatttttccggggctttatgtgggcttgtacacttttaccaacatagataaattttccataagtctacttccgtgttttgttttatgatatatagatggaagagcaaaaatagtcgagagttttcctttcgctaaatctataatagcagatgtaaggaggtaacggatatgcaggaacagatcgatgcggtccagcgcatgcaggattttatagaagaacatctggcggacaatataacgctggctgatctggcaaatgtatcactgtattctccgtggtattcctaccggctgtttacccgtcacgtgggggtaacaccggcggactatataagacggctccgcctgtccaagtcggcattaaagcttagggactgcgcatgcaggatcacggatgtggcttttgagatgggatttgacagtgtggatggatatcagagagcgtttttgcgtgaattcgggtgcaatccccgggagtatgccttaaaccctgttcctttatatctctttacatcttatggcgttaaattcagggaaattgaaaggagaccgatcatggaaaatttaagaaatgtatttattcaggtgacagaaaaaccagaaagaaaagttatcatcaaaagagggaaaaaagcagcagattatttcgcttactgtgaggaagtcggatgtgatgtatggggccttttgctcagcatcaagtccatcagtggagagccggtatgcctgtggcttccgccggcctacagagagccggacacatcggaatatgttcagggtgtggaggtatcaaaagattatgagggagaagtgccggagggctttgagatgatccttctcccggctgccaagtatctgatgttccagagcgaaccctttgaggaggagaactactgccaggcaatcgaggaagtgtgggaagctatgaagaagtatgatccttccgttatcggatgccagtgggatgagagtaatccccggatccagctggagccagtagggacaagaggttatatagagctggcaccaattagatagaacagagaaaattatttgcctgcgtcaaatcgcatttggcgcgtaaagtgaacaagcctccccaaaattaggaggcttgttcacttttttctacagggaggctttctcgacagataaacaaggatttgatacaatgatatggaatacccgttgtattgtgtattacaataagagaggttacatatggaattttacttgttgctttgtgctgtagtattgcttctctgtatcttttccaacaaaatctctgataagattggggttccaagtctcctgatctttatgtttctgggaatgatgttcggatctgagggaatttttaaaattgagttcagtaattatcagattgcagaaaatatctgtactgcggcattaatatttatcatgttttacggtggctattccaccagctggaaacacgccagaccggctgtaaagagagcggtggccttgtccacactcggtgttgtcatgactgcggctctggtctgtctttgctgtcattttcttttaaagctgccgtttccggaaagttttctgattggatctgtggtcagttgtaccgatgcggcatctgtcttttccatcttccggtcaaaaaacttgaacctggaagggaatctagctccgctgctggagattgaaagcgggagcaatgaccctttttcttatatgctcactgtgatcgcccttacgatcatgcagggcggggaaatgggctttctctggaagatggtccttcttcagctggccgtgggcatcggcatcggtctggctgtggggatcctggcgccgaaggtaatccagaagtttaaattctgcaccgatggattcgatgcggtttttgtactggcggcagcgctgatttcctatgcccttgcagggatacttggaggcaatggctttctttccgtatatctgaccggcattatcatgggaaatgcgaaaacaaagaataaggccaatgtggtaaagttttttgacaatgtcacaatactggcacagatggctactttttttcttatcgggctgctttcctacccgtcccagatgatcgcgtcacttcctgagacgattgtcattatattatttctcaccctgattgccaggccggcgatgatttttgcgctgaccggcggttatctcaatctaagagagaagatctttgtttctttttcgggactcagaggggcatcctccattgtgtttgctatcttcgcctcggcgggaggtgcaacaatgcagagcaatgtatttcacatcgtgtttgggctggctctgatctcagtggctgtgcaggggaccctgctcccagaagctgcccggaggcttcatttgattgatgaacaaaacaatgttttaaaaacctttaatgattatcaggaagaatccgccatgactttgatgcagatgcatatatctgccggacaccattgggaaaaccggaaactgaaagatgtgactctgccggagggatccctggccatggtcataagaagagaggacgggattatcataccgaagggggatacggtgattcaagccggcgatgagattgcgctgaacgttccttcctacgaatcggccaacgaaatagccctaagggagattaaaatagatgaggagcatccgtggagaaaccggaagatcaaagatctggatctggaagatcatgtgctggtggccatgatacggagaaaggcccaggatttgattccaaacggcgagacgatgatccgtgaagatgatgtggttgtaatttatgatgaataggagaatgagtatggagacatatcagggtgtgatttttgatttcaatgggacaatgttttttgacgatgataagcatgtgatggcgtggggagagatctcaaggcttttaagggggacggatgtcacagacgaagaacttcacacaaagctgaacggaaccccaaacatcataaatatccagtacatgatgaacggaagggcgacagaggaggaacaggtcagatattctcaactgaaagaggaatactaccggagattctgcagagaggataaagagcatttccatttggtggaaggggtagaaagatttctggatcttctgaaagaaaagggaattccttttactatcgccagtgcatccattaaagaaaatatggactttttcatagagtcttttggtctggaccgctggtttgatccttcccggatcgtctatgatgacgggacttatgaaaacaagatcgccatgtttgaaaaggcggcagatttgatcggcgtggatatgtcccacatccggatttatgaagattcgctttcagggatcaaaagtgcctacgaagcagggtgcagggatatcgcagtgatctgtgcaaaagaaaaggaatcggagttaagaaactacccgggtgttacaaaaaccatgcaggacttcttgttctgagccggtttctgtgatacactaatgaactggtatagtgaaacggatgagaaacattaaaggagcagatttcatgggatggaaccaaattacgatcagcaccgtgaccggagcggaggatatgctgagttatgaactgacagagcttggagcgtgcggtgtagaagtggaggaccgggtgcctctgactcaggaggagatgaaagagatgttcattgaggtcctgccggaccatcaggaaccggatgacggaaaagctctgcttcactgttacttcgatgaatctgagaatctggaagacgtgaccatgaggatccaggagatgttagacagggtaaaggattttatggacattggagagggtacgatcgaatacggattcaccaaggaagaggactggatcaacaactggaaacagttctttaagccgctgagactggacgacacgatcatcatcaaacctacctgggaggagcttactgaccagaaagagggagatgtggtggtagagatcgatccgggcaccgcattcggaacaggctcccatgagaccaccaggctctgtattgagggcctgaaggaagagataggcccggacacggtcatgctggacgtgggatgcggcagcggtattttatccattattgccctgaaactgggcgccggcaaaacagtcatgacagatattgacccgagagctgtgaaagccgcggcggaaaatatggatgtaaatcatttagccggggacaggtatgaggtgttcggggggaatgtactggatgacatggaattcgcaagatctctgggagagcaccagtatgatctggtagccgccaatattctggctgatgtgattcttccgctcactgagatcgtagacatgttcttaaaggaagacggggcatttgtaatctccggcattattgatacaaaagagcaggatgtgcttcaaaagctggaggaatacggatttcaggcagtgaagacaagaagattaaaagagtgggtttccattacagcaaggaaaaggaaagattgatgtatcgtttttttatagatgagagccaggtggaccaaaccttgatcaaaatagagggggaagacgtcaaccatataaaaaatgtgctccgtatgaagaagggagagcatgtgctgctttccaaccgccggggaattgaatatgaatgtgaactggaactgatagaggaaaacagggttctggccaaaattctggatatccacggtgtggaatcagaactgaaggagaggattgtactgttccaggggttgcctaaaggtgacaagatggaactagtcatccaaaaggccgtggagcttggagccagtgagatcgtgccagtgaagatgaagcggtgcgttgtcaaactggatgaaaaaaaggccagaaaaaaagtagagcgctggaatgccatcgctctcggtgcggcaaaacagtccaaaagaggtctggtgccaaaggtcagcgaagtacttacattgaaagaagctgcagagaaagcccaaagcctgtctgccctcctggtaccctacgaggcggcagagggtatggaatattcaagagagttgatccgggagacaaaaggcaaagagtccatcggtgtttttattggaccggaaggcggatttgagcctttggagatcgaagaactgaaacaggcaggaggcagagttttgagtctcggcagaagaatattgagaacggaaaccgcgggcatggccgtgctgtcggttttaatgtttgagttggaggagtgacatggcagtatatttggataatgcggcgaccacaaaagtttttccggaggtcttagaggccatgaacgaggctatggaagtgtcctacggaaatccttccgcaaagcatacaaaaggattagaagcggagaatattgtgaaagaggccaggtctgtcatcgcggggaccttaaaggcaaaggaaaaagagatcatatttacgtccggggggacagagtccaataatatggcgatcgttgggacagccatggcaaataaacgacgtggcagacacatcatcaccaccaggattgaacatgcctccgtatacgaaccaatgttttatttagaaaacgaagggtttgaggtcacatatctgaatgtggacgagaaaggaatcgtagatcttaagcagcttagtgacagcgtcagagaggataccacccttgtgtctattatgctggtcaacaatgagatcggcgcagtggagccggtaaaagagatcggcagtatcgtcaaggagagaaatcctaacacagtatttcatgtagatgccatccaggggtatggaaagattccggtgattcccaagaacgaaaacattgacctgctctctatgagcggccataagatccatggtcccaagggtgtcggttttttgtatataaaggaaaagacaaagatacagccgctgatacttggcggcggacagcaaaagggcatgcgttctggaaccgaaaatgtgccgggcattgccggactttcaaaagcgtgtgagattatggcaggacatttgtctgagaatgcgcaaaagataggagaagtcagagattatttcagagatcaggtcgccaagatccctgatattaaggataattcgggcgatgcgccccatgtggcaagcatcagttttaagaatatccgaagcgaggttctgttgcatgcgttggaggagagggaaatctatgtatcctccgggtcagcatgttcctctaaccggccacacataagcggcactctcacagccatcggcctgagtccagagtacagggacggaaccctgcggttcagcttttctgtatataatacaaaagaggaagtagaccaggttataacagcactggaagaattggttccaatgcttcggaaatttgtaaggagataagaaggagaagaaatgaaaatacaagcttttttgattaaatatgccgagatcggtattaaaggaaaaaacaggtacatgtttgaggatgccctggtaagacagattaaatatgccatgaagcctgtgggtgagttcaaggtaagaaaagagtccgggcgtgtctttgtggaaggtcaggatgaatttgactatgaggaagcagtagagggcttaaagacagtctttggcatcaccggtatctgtccgatggtcattgaacagacgaaagatatggagcatctggcagatgcggtgctaaactatgtggacagccagtatgacaagaaagattttacctttaaagtgaacgcaaggcggggggataaggaatttccagtaaactctatggatatcaattgtcttatgggagaaaagcttctggatgtctggccggaattaaaggtggacgtgcatcatccggatgtactggtgaacattgaggtaaggcagcagatctacatttattctacagagatcctcgggccgggaggtatgccggtgggcaccaatggaagggcaatgctgcttttatcaggagggatcgacagtcccgtggcgggatacatgattgcaaaaagaggtgtcaggattgacgcgacttacttccatgcgcctccgtatacaagtgagcgcgcaaagcagaaggtagtggatctggcaaagatcgtgtccaagtatgcaggacccatccatctgcatgttgttaactttacagacattcagctggcaatctatgagaaatgcccccacgaccagcttaccattatcatgcgccgttacatgatgaagatcgcagagcattttgcaaaagaaaatgacgggctggcgctgatcacaggggaaagcatcggtcaggtggcaagccagacgatccataacctggcaatcacaaacgaagtgtgttccatgccggttttccgtccgttgatcgggatggacaagcaggagatcgtaaatattgcggagaagatcgacacattcgagacctccattcagccgtttgaggactgctgtacgatctttgttgcaaaacatcctgttacaaaaggaaatttaaaaaagattgagaaatcggaagaaaatctaaaagatatcattgatgaactgatggaaaaagccatcgatactacagaagtgatcgtagttaaatagaaagaggttacttaagagggagagaagagaaatggttccagcctttcaagaatctcatacctctgttcgggaatctgaaaggcgagaaggattggttcatttaagtttaagctgaacagatccatgacgcttgcggcgtctaagagataagaacccgatattatgtaaaaatcgccgtcatattctttgataatgtttataaaatcattgaccttctttatggaattcagcattaattgtacttcgcacatgattcatcctccaatgacgatagtgtacaagctaatatttgaattgtcaatatcaacgaaaggaaaagaaacactctatgagtttagataatgtgaaagcagccattgtgacgttagggtgcaaagtcaaccagtatgagtccgatgctatgtttgatatgcttacgaatgcaggagcaagaattgtaaatcccaaagaaggtgctgatgtgtacatcgtaaatacctgctccgtcaccaacatcgctgagcgcaagtccaggcagatgctgcaccgtgccaagaaactgaatcccgatactgtggttgccgctgtgggatgttatgcccaggtggggaaagaggaattagaaaaagatccgttgattgatctgattattgggaacaataaaaagaaagatctcatctccattttggaaacatattttgaagaccgcaggcaggagacggaagtggtggatctgtcttccgggagcgagtacgaagcactgcatgtaagccatctaaatgaacatacccgggcctacatcaaagtccaggacggctgcaaccagttctgttcctactgtatcattccctatgccagaggaagggtaagaagccgggcaatggaagatattcttgaggagatccgggagctttctgagaacggctgccaggaatttgtcatcaccgggatccatgtgtgttcctatggcacggaccttaatgagggaaaggatcttatcgacctgctggaggagataggaacgatcagcggagtcaaaaggatccggttaggttccctggagccggggatcatcacagaggaatctgtaaataggcttaagaacatagaacagttctgtcctcactttcatctttcccttcagagtggctgcgatgaaaccctcaaacgtatgaaccgaaagtatactacagaggagattcgggaaaaaataagaatattgagggatgcatatgatcagccagcgctgaccacggatatcatcgtaggatttccaggtgagactcccgaggaatttgagaccaccaaaagatttctggaagagatcaacctgtatgaaatgcatgtttttaaatactcaaagcgtaaaggaaccagagcggctgttatggaagatcaggtcgatgatcaggaaaaagcaaggagaagcagcattttgatcgccatgaatgagactcacaagcgggcttttgaacaggcacagatagggacggacagggatgtcctgatcgaagaaaaattaaagcacagtgcggaaaacctgtatgtggggcataccagagaatatgtaaaagtggcggtgaaaagcagggaaccgctggaaaatcagattgtcagagctcatcttaccggtatcagtgaggatggatatatgacaggaaatctgtagaaaatccattgctattttttcggatatatattagaataaaaaaaagatacgaaaaaggacgtgatattatggataagaatcagacacaacatttttcagtagtgaaagatgaattggatgtgcatagaattttagagcatgtctatgaggcattggaagaaaagggatataatcctgtaaaccagatggtagggtatattatgtcaggcgatccgacctacattaccagccataagaatgcgagaagcattatcaataaggtagaacgggacgagatcatagaagccctgtttgtaaattatatcaacacaaggctgaagtagaaatatgaggatacttgggcttgattatgggacaaagacagtgggggccgctctcagcgatgaactggggatcacagcacagccgcttgagaccattacgagaaaagatgaaaataagttaagaaaaacttatgcaaggatagaggagatcatcgccgaatacaaggtagaaaagattgtcctgggctatccaaagaatatgaataatacggtcggagaacgcggaatggcaacggaagctttccgcgatagtttagtgcgcagaaccggacttgatgtaatcttgtgggacgagcgccttactacggttgcgtccaataaagtattgatggaaagcggcgttcggagggaaaaccgcaaaaaggtcattgatcaggttgctgcttcaatgattttacagggttatcttgattccctgtaaagaaaggattgataagatgaaagataaagagagcacaattctctttttagatgaccagggccaggaagtggaatttatggttctggaacagacgacactggcaggaacaaactacctgcttgttgcggattccgtggaagaagacgggaccgttttgatcatgaaggaaatctccctggaaggagactatgtctcttatgagattgtagaagatgaagaagaacttgagatcatttctaagatattcaatgaattaatcgaggattttgatttgacagtataaatgcaacaggatttcgaggtggttgaatgggttataatgaagaagcttttatacaaattttaaaaagcaagggtttaaaagtgaccaatcagagaaaagctgtattgaaggcactttcacaaaaaccagaccagcatctgaccgcggaagaaatctatgaattggttaaagtagacatcccggagatcgggattgcgacaatttatcgtaccatacagttactttgtgaattaggattaattgataaattgaatttagatgatggatacgttcgctatgaaatcggaaaagaagataaaaatgagcaccaccatcatcatttgatatgtgtgaattgcggaaaagttttaaagttcgacgatgatttattagatgaattagaaaaacaggtggaaaaaacaaccggattcatcgtccatgatcatgaattgaagatgtacggatattgtcgtgattgtcaaaataaccggaaataatcataatggaggaattattttgaaatcagacaacacaagtgtaggtaacaagacagaaggacagcaacaaaagaaacaggccaggaattactggccgaaaaagtacagccagcctaaggcgccggcagtgatcaaaaaagaatcaaaggagcttacggtgaaggaaaagccgaaaaatcagccgaaaggccaggcgcctgccaaaaaagaggcacctgctaaggcgaagacagctccgaaggcacagggacgtccaaagacgacccagagaaggaatacaggaacggtaaagatcattcctcttggcggactcggacagattggtatgaacatcaccgcctttgaatataacaataatattttgattgttgactgcggtgtggcctttccggatgatgagatgctcggaatcgatcttgtcattccggatgtgacatatttaaaagaaaatgcaaagaagattaagggactggtcatcacccatggacatgaagaccatatcggtgcgatcccttatattgaaaaacagctgaatattccagtgtatgccacaaagcttaccatgggactcatcgacaacaagttaaaagagcatgggctgctcaagcaggtgaaaaagactgtggtaaaacacggtgacgtgataaagctgggagtctttacagtcgagtttatcaagacaaaccacagcatagcagatgcggcggctctggcgatccatactcctgcgggactgattatccatacaggtgactttaagatcgaccacacaccgctctttggtgaagccatcgatctggcaagatttgcggagcttggaagagaaggtgttcttgcgctgatggcggacagtaccaatgcggagaggcctggttatactcagtctgaaaagaacgtcggaaagacactggacagcctgtttgcggcccatcccaacggaaggattcttgtcgccacctttgcttccaatgtagaccgtgtacagcagatcatcaattccgcctataagcacggaagaaaagtatcagtagaggggcggagcatggtcaacatcatcgctacagcttctgagcttggctatattaagattccaaagaatacgctcatcgaaacagaacagatgagaaattatccggatgaccagattgtcatgatcacgaccggaagccagggtgagactatggcagccttatccaggatggcaaatggaacccaccggaaggtttccattaaaccgacagacaccatcgtgttcagttccagcccaatcccgggaaatgaaaaaaatgtatcaaacatcatgaatgagctggcaatgaagggcgccaaggttgtgttccaggatacccatgtatccggacatgcatgcagagaagaactgaggctgatgtatgccctcaccaagcctaagtatgcggtccctgtccatggagaataccgccatctggtaagacacagtgaattggccctcgagatgggaattccaaaagagaatgtcttcatcatggaagaaggagatgttctggaattaaataaaaaggccggaaaggtcacaggaaaggttccggcacagggtatcttggttgacggcctcggcatcggcgacgtagggaatattgtcttaaatgatagaagacagctgtcccagaacgggctgatcatcgtgacagtgaccctggagaaacgtggaaataatattcttgcgggtccggatattgtatcccgcggttttgtctatgtaagagagtctgagagccttatggaaggagccagacaggtggtggaagatgctgtggaaggctgtcttgccaaaaatatcactgattggggcaagttaaaatcttgtatcagggatacgctgagcaattatatctggaagaaaaccaagagggatccgatgatccttccaatcattacagaagtatagaaacccacgccggaaaggaatgtgccgggagttatgatgacaaaggatgaagatgtaaaaaagaatagagaagacctgtttcgacttttttggaaagtggtccatcagattttgatcatcggcctgattatcggattgtttttcggtatgtattcttttgcctatcatgctttctctaacgaggcatatgatgcctccagtaccagaaaggtacaggtggtgatctcaaaaggagagaaaaccgaccaggtggcggaccagctttatgagaagcatctgatcgtgggaagaaacagatttaaggtaagaaaatttttctcaaaatacagtgatacggactttgtccccggaaagtacaggctgtcacagtctcagggtatcgatgagattatggcagtcctgtgcggggatgcccgtgaaaaggatacaaaatgattgtaaatgaaaacgtgacagattatctccgctcgcttataaaagaggaggatgactttctcgacgggattgagcgccaggccagaaaagaccatgtaccgatcgtcaagccggagacaaaagagttcctgaaagtattagtgaaaatgaatcaaccgatgaaaatcctggaggtcggaacggctgtgggattttcatctctttatatgcacaagtttcagccagagggcgggaccgtggtcaccatcgagcggaatgaaggaaggatcaagagggcaaaggagaacttttcaagagccggagttaaagatgctgtcactctcatggagggtgatgccgcagagattttggctgaactttccggtacctttgactttatcttcatggatgcggccaagggccagtatatccgcttttttgaacacattctgaggctgcttcctgctgggggcattctggtctctgacaatgtgcttcaggacggtgacattgtaaaatcacggtatgccatagagcgcagggaccggactatccacaaaaggatgagagagtatttatatacattgaaacaacatccgttgctggacacatctgtgcttccattgggagacggcgtggcagtgagtatgaaaacaggagagtaacatgagaaaaacagagctgctgataccagcaagcaatttagaagtactgaaagtagctgtgctctacggtgcagatgcagtttacatcggaggagaaatgtacgggctgcgggcgaaggccaagaatttctctatggaggatgtaaaagaaggcgtccgctttgcacatgagcacggtgtaaaggtttatataacagcaaatatcgtagcccataacggggatctttccggcatacgggaatatttcagggaacttaaaagtattcagcccgacggactgatcatctctgatccaggagtctttatgacagccaaagaggaatgcccggagattgaacgtcacatcagcactcaggccaacagcaccaattatgccacttataagttctggcatgaacagggggcatcccgcgtggtggcggccagagagttatccttgagagagatcggggagatcagaaagaacataccggatgacctggaaattgaggcatttgtccatggagccatgtgtatctcacattccgggcgttgtctgctgagcaattattttacaggacagaacgccaacaagggagcatgtacccacccatgtcggtggaaatactctgtggtggaagagaccaggcccggcgaatatatgccagtgtatgaaaatgaacgggggacctatatttttaactccaaggatctctgtatgatcgaacatattgacgatctgatcagcgctggaatcgacagccttaagatcgagggacggatgaagaccgctctctatgtggcgacggtggcaagaacctaccggaaagccattgacgattacaaagaatctcctgacaaatataaggccaatatggactattacagacaggagatctccaagtgcacctaccgtcagtttaccactggtttttactatggtaagacggacgaaaactcacagatctatgacagcaacacttatatcaaggagtatacctacatcgggattgtccagggatataacaaaaagggatacgcgctgctggaacagaagaataagttccttgtgggggagacgattgaggtgatggttccagacggagaaaaccggcaggtgacggtcaaagccattgaggatgaggatggtgtttccatggagagtgcaccacatccaagacagatgatctatgtagatttcggggaggagatcccggagggatatctgctcagaagaaaagaagattaattcagcgaaggcatcggagataaatccgatgtctttcttgtaaaaagaaattggaaatgatataataattatgaaataactaagagcgtagatttaaaataaaaggagaactattttgaaggataaggatttaacaaacagggaaaaactaatcatgaaatgtgtctgggcggctggccaggagatctctttgcaagaattacagcgggaattgaaagaaaggttccagtgggatgccaacaggtcaactgtgcgtacttttctgtcaagcatgcagggaaaggaagccgtgacggttgaaagaagggggagattttcttatatcgctcctttatacaacgaagaaaagtacaaaaaggcccagctaaagaagttgatggatttctggtttaacggatcaaaagaagatctgatcaaggcactgacagaggtgaactagggattatgctcagtgagccgtccccaaaggtcatttccagacagccgtctatgatgccgcctgcatagcaggcggcatcatagacggctgtctctttctttatcattgtacatctgattaccggaattgcccttttcgggatttgaattttggagttgtattgccggaaaaaagcagtggcacatcggcgtaattccttcaggatcaatgtctcaaaaatacatctgctttagaatataatacagctttacccgccagtgttaccctgtcaccctgcattttgcagtacagggtacctccgcggtcagaggcctgacaggcagcaatatgatccttctgcagtttatcagaccagtagggtacgatatggcagtgtccggaaccacatacaggatcctcggctacattcagtttaggggcaaacgaccttgacacacaatccgtgacagttccttctgctgttatatgaagcaggagtccgtccagctcccttagtttctccaaatctgggtttaagtctctgatgatctgttcgttttcaaatacacataacagatctcttccaatatatgcctctgccgggacagcgccgatggcttccgccattttttccgtaatacgtacaggcttcaagtcataggctggaaaatccatttcgtagagatctccatctttcataacagttagttcaccgctcactgtgcggaatataattctcccgctgttttcgccgtaataattgaataggacaaaagcgcaggcaagggtcgcatggccgcacaggtctatctcgccgcccggggtaaaccagcgcagactgtatgccttgccctcttttaacgcgaaagctgtctcagacaaattattttcttttgttatgctcatcatcagttcatctggaagccattggtccaggatgcagacagcggcaggattaccgccgaaaactttatctgtaaatgcgtcaatgacatattgttttagaattttgtttttcatattcaggtatctcctatgttttgtttgacttcattatagcaggcacttaaaatataagtaaaacaaatatttctaaacttaacattagagaaagtgaagtaaagatatgaaccggtatattgcattgcacaaaatcgtggagctgggcagcttttctaaggcggcagaagctctgggatatacccaatccgctatgagtcagatgatctcgtctttggaaaaggaattctcgataaagctggtaaaccgtttccgtacaggtacaaaactgactttggagggagcagaactttatccttacattgagcggatggtgtatcagtatcaggcaatacaagaaaaaacgaaggagatcaaaggattggagacaggcattatccgcatgggaacgatctccagtatttcggcccactggctgccaggtttgctgaaagaatttcaagaacaataccctggggtggagtttgtcattcaccagggagattatacgtccatccaggaatggatcaaaacaggagccattgactttggttttatcaatccccgtgccgcaaacggaatttcaacggtcaccctgaaagagggagaaatgctggccgtcttgccagaagatcatccgctggccaaaaaggacatggtcactttagaagaattagcctcggaaccatttatccttttggaggaagggcattactatgagcctttagaaagtttcaggtcagtaggtatcacacccaatattaaatatacgatccacgatgattattccatcatgactatggtagaagcgggattgggggtcagtattctggcggaactcatactgcacaggacgaactaccgccttgctctgcggcccacagatcctccggttttcaggaccattgccataggatataaagacaagaacagtctttcaatggcaagcagaagatttatcaggcgtctgcatgagtgtatttcagaattgccataacaaaatgatggacatacatcaaaggtcagcgttcttatgatttgctgcgaaataaaatccgaaacagcagatataggatcaggatacccgacaggacaaagccggcaaagctgatccagggcattcccagaacctgcggcctcagctgtgtcatacatagaaggctcgcaccgataaaaagagcggaagcgatcaatcctagtactagatatcctgccgcgcggtgaaacacccgtatgtagtcctctgtgtctgtcagctcaatgttcagctttgtctgcccattttttgtgatatttaacagatcggacaactgggacgggatctccatggatttgtcaagggaagcataagctgtgcgcccccggtggaccagttctttcttccagtcaaaatccttgtagatcatggatgacatatgcatggagaggatcttaagcatattgacctcaggagaacaggcggccagggttccttccattgtgaccatgctgcgtcccaggagtgtaatatcagggctgatagcgatcttatgcttttttaccagatccaatagcttctcaatcagatcccccaggcgcatctctccgaaatccattgtcatataacggctgacaatgtcatcgacatcagtatacagtctggcgtgattgatacggtcctttggctctccaagtgtcagcagaacattctttagggtataaatatcatgctttaagattgcagaaatagccttcttaagcaactgtttatagtggtcggacagtcggcctgtcatacccaggtccagccaggcgatccggccccctgagatccagaggtttcccggatggggatccgcgtggaaaaagccgtcctccaatatctgtttgcagtaattttcagccgccttctcaccaatctcagtcagatcataaccggccgatttaagggccgccatatggtcaatctggattccgtcaatgtaagacatggtgagaagacggggagttgtaagttttgtgaaaacctgaggacaggtgatataagagatgtccctttgattctcataaaatgtcagtagattctccgcttcccgaataaaatccatctcttcctgggaagtcttccacagctcgtccaggatggtgttaaaatcaatcagatccccggtccccatggcaaccttcagaaactttgccgcttttttcagcagatgtatatcccgttccatcatctcccggatgtggggcctttgaaccttgatgacagcctggcctccgctggagagcaccgctaggtgcacctgagcgatggacgctgagcccagcggggtctcctgcaccttggaaaaaacagactccagagggcgtccaagttcctgttggatcacctgtttcaccaaagagtattccattggctttacttcagttctgagtttttttaactcatcgcagtatatttcaggaagcatatcagagcgcatagacataatctgtcccagcttcacataggtaggacccagatcctcaaagatctccttcagcttttctggagtcatccccttggccagatgatgtttttttaagactttaagaatgtctaaaaatctctgattggaaacgtcactgctcattttcttctgggtcctttggagtttgtgcatccttttgttcttttgctttgatcttttccttcaaaagctccaagtcactgtcagacatagaatccactgcgtccatgaggttgtcgtattcttttacaatattgactgtcacatgatctttcagcttgtcctttgccttgtgtttcagttcttcattcacgaccttgccctgttcaacagtgagttccccctttttaaccaggtcatccacaatgtctttggcagattcagcagtcgtggcaacagcaccgatgcctgccagcagaatttttttcataccttcgccaacgtccataaaaaccatcctttcctgtaataaaacaaagagatcaacacgcacctaatgatataattaagtatactctatcgcgcgaagcgcgtccacccggaggaaatgagttttcttcattatctccagtcggctctggaaaggcctccttccgataataaagaaaaactatcgtattcgcatgtgatcgtcagttacttttttagatcttaaagactcgattatctgaaaatagggaaaaacttaaatcttctgttgactttccgacatatgtgtcttattctgtataaaaagacatgtatgtcggaaatggaggcggaatgaataagcgagggaaggcgaccagaggcttgatcaaggaaaaggcttgtcttatgtttgcagaaaaaggatttaaggaagtaacgatgaaggatatctgtgagatcacgggactgagccggggcggtttatattgccattacagcagtacaagtgagatttttaaagagatcacggaggatatgatgagctgtcaggatgaagagttccagtcgaaaatggatcttggcctgcctgctgtcgatatcctggacgatgtgcttcggcgatataaaaatgagatgatagacagtggacattctctgagtatggccatatatgaatattacagcatcaaagaaaataccatcggtgagaatgctttatatgaacagtatctgttatcttacgcatcatggaaaagattgatccaatatggcattgaccggggggagtttaaccagattgatataccagcagtgtttgacctgattattttttcttaccagggagtccgtatgtacagtaaattgatgccggtggaccaggaggtgccggggagaatgttaaaggagatccgtaaattgtttgtcagacaggaggggtaatcatggcaactatatttgagcgttttgatcatacaaaaacagcatttatcaacccggaagataccattgtagcagaacctggttttccggaggtgtgtatcaccactttttcaaacacaatgattgataaatttgtcagtctgaatcaggcagagaaaatcgcggagctttacactgcaaatggaattacaccgatttatgggatcagctataaaggaaaacggattgctctctttttatcccgggtaggggcccctgcctgtatcgcagggttggaggaagtcatagccatgggtgtgaaaaagatcgtgttgtttggctgctgtggtgttctaaaccagcaggcagtccaggataagatcatcattccttcatctgctgtacgggatgagggaaccagttatcactatatcccgcccagtgaagaaatatacacggaggagagttccatccggaagctggaagcctgcctaagaaagctggatttatcttatgtgaccggaaagacatggaccacagatgcagtatacagagagactcccagaactctcaaagagcgcagagaacagggctgtctggctgtagatatggaactctcggctgcactggctgtagcacagtttagggatgtcagacttctcccgttcctgtatggggcggacaatctggattcagaagaatgggaatgcagggatctgaaagaatatggattctctggactgcacaagtattttgggctggcgctggaatgttccgccattctgtgagaaagaggtttccactagaaaaaatatccgatataatggaatcatcgaaaaaggagtgtgtatcatgggaaatattaaagatgtaacgaagctgacggataatccttatttaaacctgtaccatttaaaaggaaccaaccgtgtgggaaaaccgctgaattattatatcgcatccagagtcaaaagcatggaacgcatgaaactgaaaacaaaaaagaataccccggacgggatcatcatttacagtctttacggagagaaaagagacaaggtagtcctggtaaagcagtaccggtattccatcgacggttatatctacgaattccctgcagggctggtggaggaaggcgaagattataaagaagccggaattcgtgaattaaaagaggaaacagggctggacctggacttgattcaggcggagcctatgtatgagaaaccgggatttatgtctgtgggcatgacggatgaatcctgtgccactatctacggatatgcaaacgggacaccgagtaaaaagggacaggaggattccgaggagatcgagatcgttctggcagacaggaaggaagtcaaaaggatactaaaagaagagcgggtggcaatcatgtgtgcctacatgctgatgcattttgtaaaggacgaggatccgtttgcatttctggatctgtaagcttacggcagatgatacaaataagatacaaaaagctgttatattgaccttgatcaatataaaaagttaaggagagagatatgaaccgtattttgattgtagaagatgagccggctatatcaaatttaatccagatgaacctttcagccgccggctactcctgcggctgcgcttttgacggagccagggcagcggacctgctggagcaggaagcatttgacctaattcttttggatgtcatgcttcctgagattgatggatatgagctgatggattatatcaggcctttggggatcccggtcatatttctcacggccaagtcatctacggaagataaggtaaaagggctgagagcaggagcagatgattatctgaccaagccttttgagatcgcagagcttctggcacgggtggagtcggtgctcagacgctatcataagacggaaagcaattttaagatcggggaccttgagatcgatatgtccgcaagaatcgtagaaaagcagggtagggttataaacctgaccgtgaaggagtatgaattactgcttcttttcatacagaacaaaaaaattgccctgttcagggactacatttatgaaaagatctggggcagcggatatatgggagacagcaggaccgtggatctgcatgtgcagcggctcagaaagaagatcggatgggagcataagatcaaaaccgtatataaaatcggttaccgcctggaggattagcaaatgaagttttcttggaaagtattcttaagtatcatcacggccaccatgctgaccttcagtatcgggggttattttttgatacaatccacttttcagtcatccctgcgccaggccgtagaaatggcttatcaggaaaatgacattttcagggctaccttaggagcatccatcgccgtttctccgccggagagcagctctccggagaacacagtaaaaaaactggccggttccatcagtctttcctcgccgggaaaagaacggaagttccgtatctgtgacagccgatatcagcagctgttttccgacctgagtttccaggtgccggatacggttataaaaacactggatgccaggcatgcgggatattccatccttaagcaggagggcagatattatctgcagtctgcctgccggtttacagtagatgataaggttttttatctggaaaatgtcagggatatttctacgctgtacgagatgaaagaaaaccagcttgcgctttatcagaagatttctctgatcttgatcatcaccttgggaatcgccgttttttgtctcacgaactggctgacccgcccgcttagaattctttccaaagcagtcagggcatttgcggcaggtgatttaaagatacgctcagagattacctcagaagatgagatcggttctcttgcagaagattttaattccatggctgggcagctggagcagaagatctgtgagttgaaagatgcggcgctgagacaggaaatgtttatggggagttttgcccatgagttgaagacgccgatgacctccatcataggttacgcagatacgctgagatccagggggctcagtgagcagcagaggttccaggcggcaaactatatttttgaggagggcagacgcctggaatccctgtccctaaagcttatggatctgatcgtactggacaaacaggagatttccatgaggacggtttttgcttctgacctgtttgagagagtgcagaggcttgtggaaccgctgttaaatacctctggcataatattcgattgctcttttgaggaagggacattctggggagaaccggatctgcttcagagcctgtgcctgaatctcatcgacaatgcaagaaaggcagttggtgaggacggtatgatctgctttgaaggaagagcggatgagaatggttataccctgtgcatacaggacaatggcaggggtatgacagaggaagacatgagcagagtcacagaagccttttatatggcggacaaatccagagccagaaaagaaggcggcgccggactggggctgtccctgtgccgccgcatagtggaactgcacggagcaaagatggaatttgtaagcaaagtatccgaggggacggcggtcacgatccggttcaggaaggagcggtctgatgaggcataaaaatctgttgatctgtattacggccatcgcgttggcggtctcttgtattttctggccgtcactggtttcaagctatcaagaccagaagatgagggatagagtagaacttgacaaggtagaggatacctccgatatacagacagatacgttgtccataaaggaaaaattgtcccttatcatccagacaaacgattcagatggagaaattgctgtgaccaatcaatcgtatgattggggctctgcagagctggattcattgaaaaaaatctgcttaaatgagttaaaaaaattaaagcaaaagggtatgtttcccaaggttacattagataaaaatacgatggtattttatgatactactaccacttatctggatacaaaaaattattccagacggctgagagtccacagtatcactgtacagtcagcggacaagagcctgaggataatcatagacgattcgtcgcataagatcctggcaatagacaacgtggaaggattcggaatcagggcttccgatgccgaccgcattgtgaagacatggggagaatatcttgagttaacagaagaaagtatcatgaaggcaaagaaaggatatcgttttgttaaatataaagcagggaaagaaaatgtctgctatatgtttgtattttatagcaaagagaatgcggaagaaggagaactgtctatttttccggaaaaggattatggacagcaggtcagtgaagagaaatgatacaactttgatggaagtatgaatgaattgtgatacaaggttcggttatgataataccagagagtagattctctggaaagtaggtgacggaccaatgagaaagaatcaagcggtacgaagaaaacataaatattttatcctgctgttattggaggtcctgggaacatggattttatcgatcctgatcatccagtattgtacttctacccagcagaccgtgaaaaaaccaatccctgtcagcagttttgtgagacccaaggaagtaaaacatagggtgaatactccttggaatctgatgttagtcaaccatgaaaatgctgtgccgaattactatgagcctgatctgactaccctaaaaaacggatgccaggttgaccgcagaatactgccggatctgcagcggatgatgaatgcggccaggagcaggggactttatccttctgtttgttctgcatatcgtacatccgagcgccagtcttatcttctggaacaggatatcaataagtatatcaatcagggatattcagaaaacgaagccaagagaaaagcaatgatgtgggtggcacttccgggacgcagcgagcaccagaccggactgtcattagacatcgtggccgtggactaccctgtgctggacgtgactcaggaacgaaggaaagaacagcagtggctgatgaaaaacagctggaaatacggttttatcctcagatatccaaaagacaagaccagcatcacaaaaatcggatacgaaccttggcattaccgatatgtggggaggaaagcagccagggagatgaaaaaaaagaatctctgcctggaagagtatatagacaagcttaattaaaggaagccattgcccgggctggtcaaacccggcaatggcttctgctcattttactttttttatataacttcccgcaaaaacatacgttttgaccgtacctccatttcgatttttataggaggaatttcccatcggtatgcagtaggcgtctataaaatctgattcatgaatctgtttaagctttcctggataatatacaatacaaacctgtctcttggaataattaacgagaagcagctcactgatatcgtatccataacatgaatatgtatcaaactcgaccacataataattagataactttacaagcttatctccgtattggtctggattttttaggatctgttcaagctttatggaaggatccattttattttttatctttttcagacttttggctgggaataattcctcattgtacgacaaaaagttctgggctttatagcagaccgaaaaaggcagatctttattagaacctaaattgttgaagagttccagaagatttggtgtaaaggaaccttccgtaaaagtcccggactgtgtaagatagcttttatcatcaaagaccaattctccctgtccctgcgccaggttgtccttccagtaccctgtataggtggattttaaatcagagggagtcagggccctgtatttccctttgccgttcagttttccatccattgattcaccttcatagataccagtggtatctgtgacgccaaatttgactttgcagaggttggtctttaggtgtcctttgccggagggatgccccttggtaaaatcacccttgtagtataaatactgttcgccattcttatactgaaatgaaccttctccttccggtttcttgtctttcagtgtcccggtaaacttgccctttaaatccctgtcgagaaaagaaaccgtcagttctttattttttacatttttggtgcaaccggtgagacacaagatgaccagacaaaagactgcgataaactttaaattcttcatatcctaccctccttttgctactcgtgttttaagaaactgcccgccaatatcagtacttttaatttttcgcctgaattggtcttatagacagaagaagcaagaggaagtccatatacagtctgattactgttggtgacagcattttttaccggatccagacatatcacatagacatagatattttcagagggtttaccgataagaatcaaggaaagatctttgataaataggtccttttccaatgtagaatttagaaccggatagttggaaaatttcatgatcttatctccatacttatctggattttttaatacatcataaaaattgagggaggtatcaacagatgcggcaagatcattttcatcttttgtcataaagaattcactgttattttctatgtatgacccagcccttgaagaaactttatattttggtcccacaaaggtcccgattgtctgataggaatccaatgtggaaggttcataatagccgttgtcaaagtggcctataaaggctccgtccccctcaatgggggagtcgatacgtcccgttccattcatcatatttgcaagccagctgcccttataaatacagcctttaaagtccttaggagacaaaaattcaaaacttccatccccattggccttgccattggaaacatgacctttatagatccctgtgtaggccattcctgtaaaataagttttcataaggttggtactaagagtaccctttccggtcattttacctgatgaaattttgcctttgtatgtgagatagtcctctccattcttataggaaaaggtcccttcggttggcttgccgtctgtcatgaggccggtatacctgccctcatatttcttttcttgatacgttaaagtgaccgtcttgtttttgacattttcttcttttgagcacccagcggtcagcaggcacaaaagacataataatgccgcaattcttaattttctcatactctctcatctcctgtattgtttttacataattatatcataaagcagagagaatttgggaaaaccttgtgtcaaactttattgtactgtgggatattttatggtttgatatacgaaaagccgtcgtcctgacgctgggcgatctccactacgccggcaggcacaatatcaacaaaaggcagcaggcgtccgggcgtgatatgatttcccataagagcattgcggcaggcgcagatccggatctttggcgatagagagcacaggggttccttcaggccgagcttttctgagacagagtcttgaagttcacagactgcagggccgtttgccactaattcgatctgataaggaatggcctgatcttccatataccggatcatattctggatgtttcccagagccatgttccatcttgaactttcatcaatatgaaataaaacgttcattcttagcacctcctgaataaaatatattatgattttaacatatatgacagaaccattacagaaggaaaaataagtttcagaaggaaaagcactattggacgcaggcgggcatacaatgttaaaaaggcttggaggttgctttacttgcaggcatttttagaaccgctgtcacaagaagaggaacaatattatttaaagaaaagccacctgggggatatggaggctagaaatatattagtggaacacaatcttcgtctggttgcccatattgtaaagaaatacaataatttcgacagggataaggatgatctgatatctgtcggaaccattgggctgattaaagcaatcaatacctataatgtggaaaaggggcaccggctggtgacctacgcttcccggtgtattgaaaacgagcttctcatgatgctgagacaggagaggaaaagtgcaaaagatacatcgttgtatgagccgatcggaattgacaaagaggggaatgaaataaatcttttggatgtactgggggcggatgagaacgacatagtagacgaactggatctcaaggaaaaaattagggatctttataagatggtagacgaaatggagccgtccagagaaaaaagtacactgatcatgagatatggactgtatggaaaaaagccgatgacccaaaaggaagtggcaaaagaactggatatttcgcgttcttatgtgagccgtattgagaaaaaagctgtagagaaattaaagagaagattaaaaatgtaagttaagatatctgccggaattgtaaacaggattctggcagtttctatttttatgaaagagagatttggatttcccaacgagcaaatgagagaaaagacatgtaagccgcaatttatgagcatagacatcaaaagattacttcattctaaacttccgaaagcaatgaaattggtttggcagacctttctgaaggttgaaccccctgaacactcagaagaagcagaaccagggcattggactggccttgtggggatattttatcaattggaccgttaatcataatctaaatgtgaacaattggtgaattttttgtgtaaatatgttacaatataacatattatatagaaaaggggtatgatttatgaagagagagaaaagaatttcagtaggtttaatattaatcttttttgcaatttgctgtttgagtggatgcaagaaaaaagctactcttgcggatgattttgaaaaagatcaactaaaaaagataaccacgcatgctttagactttaaggtacccaaggcatgggatgatgcatctgaagaagatgagattaaatatctcaaaatggacaaagaagatgacagtaaaattgtagcaggttgttatgtcaaatacttaggaactgaatccagcgtaacggatgacaatgatgaaattacgaaagacgttttaaaagagtatattggatccgattctacgaacgttaaacatgttaagacaattaaatataattttgatggcgcaaataaacaaaaagctatttcttatgaggacaaggaagagaagcaggaatggaataactattcagcaattgttacatgtgatggtgtagcattccatgtatggttttatgctaagaaggatttggactctgaagacgcggctaagaaattttttgataccattaacttgagtgattatgtatcaccgaggaagttaataaagatatcggctgcttatgatggaagcaccatagcgggaacggaaataagcgaagataatacaagtatttctgttacggcgcattttgatgatggaaccacagagtatgtaacagattggggcgtaagcaatccttcagttttgaaagcagataaaactacatcatataaaataacgtatctagataaaagctgtaacttaaaaatacgttgtactaccatatctaaagcaaaatataaatcaaaatgcaaaagttatgggtatacaagcattgcacgatatcccgaaaaatatgaaggtaaatatatcaaggtgtatggtaaggttatccaatcattaaatgatacatatagaattgcgatggatggaaattatgatcatatagtatatgtgacagcgagtggggtaaaaactgctggtaagatattagaggatgatatggtcactgtatatggaaaatgttccggtgaaacaacgtatgagtcagttatgggggctagtataactcttccatcggtagaagcaaaatatatcagcagatagaaaaacctaatacaattaataaaaataccagacaaaacttaattgtctggtattttttatacaaaatgttatgaataattctgaagcggcgtaacagatacagcaccggtcaaatcaatatttcgtgtgccgggagaataggtcaggcgaaatgacagccgcccctcagcagaaattgcctcgtttgtagtaaagcttcccgatgcagaagcattccgctctgctccggcaggggcaaaaaatgaatataacagacggggtgagccgttgatatagggcaggatctgcatataattatttgcttcaggagtcgcaaggaaaagataatttatgagatatagatatcccggagccagtaagatcgttgtatcattctccagctgtattccgtccccttcctggaaaacagggaaaaaatctaaatatgtgccggaggcgctgttattagaagcaccgaattgtgcataaaaattaagggattccggcggaacaggagccggagggcatggattgtgacagcagcatttgtccataaaacaatccttttctttcttttactttataatatataataagtacagaattgtgacactaagagaaggagataatcagaaatgaaactgggcaggatacaccatgtcgccatcattgtcagcgattacgagcggtctaaagacttttacgtaaataagctggggtttcagatcataagggaaaactacagagagagcagaagggactataagctggacctgaagcttcatgactgtgagctggagatattttcaggaaaaggccatccccaaagactgtcttatccagaggcctgcggtctcaggcatttggcgttttatgtagaagatatagagcaggctgtaaaggaattgaatgcggcaggaatcaaaacagaagaaattagacgggatacctatactggcaaaaaaatgacatttttccatgatcctgacggactgccgttggagcttcatgaatagaagagagcaaataatccggattttacaggtatgtgccgtacccggtatatcctaagcctatccagaagtgcaacctacagttgacacgttgaatggtgctgattggtggtatgcaaccgggaaaaataataaaatacatgtatattaattatacagaggaggataaaaatgatttttgcagacaaactgacacaacttcgcaaaaaagcaggctggtcacaagaagaattagcggaacaaatgaatgttacgaggcagtctgtttcaaaatgggagggtgcacaatcggttcctgaccttgagaaaatattacgtctttcagagttgtttggcgtctcgacagattatctgctgaaagatgaaatcgaagatgtagaatgttatacatcttcaaatgaagcatctgcattaaggcgggtatcaatagaagaagcaaatgcttttctttctgtaaaggctaagacatcaaagtcaatcgcaatcgcaacttttttatgtatcgtatcgcctgtttgtctgtttttactgggagcaatgagtgaagtcccggaatatggcttaaaagagaatgtggccggaggaattggaatgattattttgattattcttatcacaattgcggctgcgatattcatttcaagtggaagaaaaacagctgcatatggctatttagagaaagaagtctttgaaacagagtacggtgtgagtggaatggttacagagcgaaaagtacaatataataaaacccacacaggaaataatatcattggaaccactctttgtattatggcgataattcctttgtttgtaggagtaatgatggatgaaaataatgatttgctgtttatgaagatgctttctgtttcttttgtatttataggaattggcgtagttttctttgttcgcagcggcattgtatgggcaagctatgaaaaacttttacaagaaggtgattatacaaaggaaaagaaaaagaacagcactgtaatagaagcgatttcagttacctattggctcattgccacggcaatatatctgggatatagttttcttacaaataactgggaaatcagttggatcgtttgggtggttgcaggagtagcatttccggcagttatgagtataagcaatttaatcaatagacaaaaaggtgagtaaggaaagaaccgacttccgttgaaatttcatgagtagaagagaacaaatgagagaaagggaaccatgaccagcatggttccctttctctctgttatgaaaaattgttatgaaaagagtttggcaagtgttgtctataagtattccatgtcagaaagaactcttaagatattgtgtccttcctgtacgccgtcgatgatacgtcttgcgcgtacgctgtcaccgatattgacgatttctacgttggtatctgcatatgcctcacggacttcatcaagaatcggcgcattggcacgcatacccagacagacaaatccatagtcaaacggaagatctttttcttctccgtctgcttttacaaggaaggaatcagccttgacttcacagagagccgtatttggcatctggtttacatcatgctttttcataagagccgtgacaccggatttggaaacaggatctaaatcttttccaatggcaggcatcatttccacaatgctgacttcggcgccttttggtgcgaagtattctacaacgtcaagtcctacagcaccgccgccgatcacaacgacttttttgcctgtgcagtcttctggataatctgctaagtggttgatcattcctgagatagaagcaaccttggatccctctttgtcgatatggtcatgaagacctttaatcggtggaagaagaggattggatcctgtggcattgacaatgatgttcggatgaagagcttcgatcactgaaagtgtagcctcctgtcctttgaagataaacaggttgtttaacttggatgctctcacctgtaagtagtgaggaaagtcacccagacgtttcttgtcaggaatcttggagatctctacggaaagtccgcccaagtggtcttctttttccaataagaacgtcgtacagcctacttcagcagccgtgcatgccgcttccagtccggcggtacctccacctatgacgactacgttgcacggttttgtgatcttatgctttttgtaatcagctccgtcattgaccgtaggattaatcgtacagcggatcggacgattgactccgatacggttgcctgcgcatccgatgttacaggaaatacattttctaagttcgtcttcatgtcctgtagcaaccttttttacccagcaaggatctgcgataagaccgcggcccataccgatgatgtcagcgtcaccacgtgcaaggatatcgtcagccacacgagggtcacggatatttcccatagtcacacaaggtttgccgtatttttctttgaccgctttggccatgtaggatctccatccgtcttctaggtagttggcatcgatctgatactggatggatccgtttaatcccgcggatacgtcaaacgcatcgacttcttcctggaagtattggagataatccaaagtgtcttccagagtattgccgtgttccataaattcatcggcactgatacggacaaaaatagggaacatcggtcccacctgttttctgacttcctctaataccagttttgcaaatcttgccctgttctcagcagatcccccgaactcatcggttcttacattggtggtaggggataggaactggttgatcaggtaggaatgtcctgcgtggatttcaacacagtcaaaacctgaagcctgtgcgcgggcagcagcttcgccgtatttcttaacaatggcatagatttcatcttttgtaagaggacgtgggatttctccgcctgccttggatggaatatttgatgcagatactggctgcatgtttgtacgcttagactgtgcagaagcacctgcgtggtttaactgtaatccgatacatgcaccgtgagaatggatggtctcacagagtttaaagaaacgcggcatgtaattgtcatggtcaattctgatctgagtggtaccgttggagccaagcggggaatccacactggcattttccaccatgatcagccctacgccgccttttgctctctgctcatagtaattgatatgaagaaagctcatctctccggtctgttctccgtagttggttcccataggtgtcatcatgatacggttcttcattgtcatgtttttgattgtcagcggactgaaaatatttttataattgcacttcattttataacctccaaaaaagatcaacgatttctaaatggggttgttatcattgcatttgggtgatctgtaatgataagtctattataaggcaaggataaatatttaacaaattgatattttttaagaaatcaatagactgtatctattgttcttttgacaaagccaatgaatttttctacagccggaatcatgatgttatttttcatgtaggccatataaaccgtatgatacggttttagattgcttaagtgaaggatgtcaacatcatattctctcaatgattccacatgggccacaaatccgataccaaagttttcagacacgagggcggcgatcgcattctcgtcggaagtctcaaaggcaatctgaggttccatctggttttgtcgataaatggaggttgtaaactgtccgaggccggaggtccggtcgtagccgattacagggtagtccagcaaatcttccagaaagatttctttcttatattttaatgggtgttcgggaggtgtgatgatgaccatttcctggttgatgaccggaacaaactcaatatcaggttcgttggaaacataagatccaaaaatcacatcgtatctctcggacttgaggtcacggatcattttattggtgatctcctgtgtcatggagaacgtgatattatggttcccctctgaatccaggaagctcctcacaagatggggaatataggactttgccagaggaaatacataggccaggtcgatgtggccgcctttggtattggagagcgccttcattttgtcttctgcgatctttacctcatctaggattttattgacatgctctaaaaagatctttccgtactttgtcaactcaatattccttccgtttttcctaaaaaggggaagtccaagttcctcttccaggttagcgatggaacggcttaagctgggctgggaaacgttcaattcctttgccgcctggtgataatgttgtagtgtggcgattttttgaaagtatattagttggtttaaattcatagggcaggcctcatttcattggaaatattcaatggctatttatatatggaaggataacataaatgatagcaaaaagctattaaaaaatgatgaaagatgtattagaagtatcaatgggatgcgtgtataatggtttttgtaaggttgttaaaaaattaacttttgggtgaagcagtaacagggtaaataaaaaagggtaagtaaaaaggagaatgacacatggcagagagaatcacaggacatacagaattaatcgggctgatggcatatccgatcagacattccagttcaccggcgatgcacaacgaagcatttgccacattaggacttgactatgcatacttagcgtttgaggttgataatgatacactggaagatgcagtaaaaggcttacgcgccttaaagctgaaaggatctaacgtatccatgccaaataagacagtcgtaggacagtacttggataagctgtcaccagctgctgaaatggcaggagcagtcaacacgatcgtcaacgaagacggagttttgacaggacatatcacagacggcatcggctacatgcagtcactgaaggataatgatattgacgtgatcggcaaaaaaatgacaatcacaggagcaggcggtgcagccacagcgatcgagattcaggcggcgcttgatggtgtgaaagagatgtcaatctttaatgtgaaagataagttctgggagaacgcggagaaaacagttgaaaagatccgtgccaacacagattgtatcgtaaacctttacgatttagaagacaaagataaattaaaggaagagattgcagacagctatctgttcgctcaggctacaggcgttggaatgaagccgttagaaggccagtcagtgattcctgatgcatccttcctacgtccagacctaatcgtcacagatactgtgtatgcgccgagagagacagcactgttaaagatggcaaaagaagtcggctgcaagacaatgaatggacttggaatgatgctgttccagggagacgccgctttctatctgtggaccggaaaacatatgccgattgaccacatgaaagaagtgctggatattaaatacgattaaataagaggaaattcaagagaggaatctattatgaacaaaaaatattacccaagtgcctttattttatacttaaattattttatccatggtatcggatgttctgtattaggccaggtagcagtaaaagaaactttggtaaagcagtggggagcttctgacatcgggctggtaacaatggtagcggcagcgctggggcttggacgattgatcgcccttccatttgcaggacctctttctgataaaatgggaagaaaagtggcctccattatcggtgcaggttcttacgcaatctttttcttaggccttgctatgtcaccaaatatgacggttgcatacatagcagctgtattaggaggaatcgcaaactcattcctggataccggtgtgataccagcttgtgttgaaatcctggctccaagatccagtatggcaaccatgctgaccaagttttcaatttcatgttctcagttattaatgccgtttatgatcggagccatcgttggtgcgaacctttctttaaatgtattattatatgtttgcggtgttgccattatcatcatcggtgtgctcgtattatttgcaccacttccaaagatggaagctgcaggcgcacaaaaaacatctctgatccaggatatcaaaaatgcaaacttctctttagagagcattgcattgatcatcatcggatttacaggaactgcaacattccagttatggttaaactgtgctcaggattttgcgaaagaatatgcaaaaatcggagatccttctgttatgcagacatactatagcacaggttctctggtagcgatcattgttacaactttattagttaataaaatcaaaggcgtcagattcttatttgtctacccattgattgcaaccatcatgatcgccttagtttacttattaaagactccatctatctgctatatcggttctgcagtggttggatattccgcaggagcagttgtacttcagcttgttaccgcaactgcaaacgacttattcccgaaaatcaagggaaccatcacaagtattgttatgattgcatccagcctttcaaactatacaatcctttctctggctggtacaatggacaaagctgatattttactgatgaatatcggaatcacggttgtaggtgtgctgctggcactgtttgtcaatgtcagatataaggcaatggaagaaagagcggcaaaggagtaaagaatgaatccagtaaaagtaagaaatattgagattggcacaggtgtccctaagatctgtgtgccaatcgtcggagtaacaaaggacgagatcattacagaagcaaaatcttttaaagacattccggtagatgtagtggaatggcgagtcgattggttcgaaggagtctttgactttgacaaagtagaagatgtattaaaagatttaagagaggcgttaggcgaaacgccgatcctgtttacattccgtacttcaaaagaaggcggggaaaaggcaatcgaggccgagccctacgcagaacttaacaaaaatgctgcaaaaagcggatatgtggatttagtggatgtggaagtgttcacaggagatgatattgtaaaagatatcgtttctgctgcccatgaatgtggtgtcaaagtggttgcttccaaccatgattttgacaagaccccagcaaaagaagatatcgtaggcagacttgtgaaaatgcaggagctgggagcggatattccaaaaatcgcagtgatgccgacctgcagaaaagacgttctcacactgctcgctgccacagaggagatgtatacagaacatgctgaccgtccgatcatcaccatgtctatggccggaatgggtttgatcagccgtctttgcggtgaggtgtttggatctgcattaacctttggtgcggcaaaaaaagcatctgcaccgggacaggcagcagtcaacgaattaaacgatatgctccagtttcttcataagaaccagggactgtagagatcacaaaaaagggttttccttcacaggagagccctttttttgttccataggaaagtgcgttctatgaaataaaaacgctccgcaaggatgcacacaaaatgcgtaaggtttagaatcctccccggacaaaccggtagaatgcctttgccgcaggcgacagatagtgatttttttgtactgccagataaaatttccgaaacagaggttccggtgctgcggggatcaggcggatatcatggctcagcagagtttcatcatatggaagtaccgagatcccatagttgatagagaccaggctcgcgatggcatggtcttcctgcattcgtgagatcacctttggggaaatccctttatcttgaaacagttgctctaagaattgtgttttatccagtgaaaagatcatgtcatattcagccgcttcttctagagagacagctgatctgcgtgcaagaggatgattttttgacacagcgatccttaattcacattctgtcaccggggtaaattcgatcagcggctcgtcacaaaagtaggaacagatgccaaggtcacaggtcccttcttttaataaatcaatgatagacggagtgtttccctgataaaaatgaaactggtatccacagttttccggctgtgaggaaaagtcctggatgatccgggggacatagctggatgacagggcgtagatgaaggccaggtcgatcattcccttcctggggtccatgagttcctttacgctctggactccagtgccgatctcggataatccggcatggacatggcggtaaaataattcaccatatttcgttaagacaacatttcttcctttcttttcaaacaaacaggtgccaagttcctcttctaattggctgatagagcggctcagggaagactgggcgatggagagttcctcggcagtccgggaatagtgctggtttttggccagggcgtcaaaatactgaagctgggtcaggttcatgtcctttctccctcctttttcttttaatataacatactgttgggttgattcaaacagatatataacaataatgttatgaattcgggctgccagttgtattgttaatagaatgacaaatttatataattgataatgtcaaaaaaataacaagggaaaaggagaaactgccatggattatgtagaaattaaaggtttggatacgccggtctctaaaatattttttggaaccgcatggattcatccgggtctgaaagaggatgcggacgaacagctcaaacgttacatcgaggtcggtggaaatgtgattgacaccggaagattttattttggaggaaaagccgaagattatctgaaagtatggatccaggagaatcctgaattaaggaaaaaagtgatgttcacaaacaaagcatgtcatcattatgtagatgaaaacaacattcattttccggaacagcagagggtgaatccagagtgtatcgatgaagatcttcatttcagtttaaagaagctgggccttgatcattttgatatttatatgcttcacagagataatccggaagtaccggtaggtccgttatttgataaattggaacagtaccacagagaaggaaagattaccgtttatggggtcagcaactggaccaaagaaagaattgaagaagcacaggcttactgcaaagaaaaaggatatgcggggattgcagttaacagctgttcctacagtctggcaaccgtgacaaagccaagatgggaacgcactgtatacgccacggatgagtatgcgaaatggtgtaccgagcaggacatcacgatcctttcctggggatcacagggaaatggattttttggaaattatccgttcccgaaaggaacctgtgtgacacaggattttgtggatgcattcgggacaacggcgaactttgagaaattccgcagagcaaaagaactggcggaagagcgcggagttagcacatccaacatcgcatatgcttacatatttaatcaggatctgaagatcgctgggatcacaggatgcagaaacgtacatgaatttaacaactctctgatcggactggatcttacactgacagaaccagagatcgactatctggctttaagaaaggattttatataaaatggaagcagtgaaggtaagaaatattaatatcggggaaggggttccaaagatttgcgtgccagtagtgggagtcacaaaagaagagatccttgcggcagcaaagaccatgaaggatattccagtagatgtagttgagtggcgcgtggactggtttgaacatgtatttgagactgaaaaagttattgaggcagctcgtgagattcgtgaggcactcggagagattcctttgttatttacattccgcacaaaaaaagagggcggagaaaaagaaatcgggccggaagcttacagtgagctgatccaaaaggtttccgagagtggttttgtggatatggtagatattgaactttttaccggcgatgtcattgtaaaaaatacgattcaggttgttcatgaatatggggttaaagttatcatctccaaccatgattttgacaagacaccgggaaaagaagagattatcaaccgccttaagaaaatgcaggaattaggggcggatatcccgaaaattgcggtaatgccaaatgagaaaaaagatgtgcttacacttttagatgccacaagagaaatgtatgaaaactacgctgaaaaaccgttgatcaccatgtctatggctggcatgggtgttgtcagccgtctttgcggagaagagtttggttctgctctcacctttggtgcggcagggaaagcttcggctccgggacaggtttctgtagaaaaattaaagaacgttctgaccttgcttcatgagtgcagggcataagacggagggagatcatgaaaaataaatatgtgaaaactgcggtttccatttatatcaactatatcattgtaggggtcagcgtgatcattttgtcactgaatatggacagcctgatggcgcagtggggaaccaataaagcagggtttgggctggtgaccagcggaatcggaatcggaaaatttgttgtgctgttcatttctggaatgctgtctgaccgttttggaagaaaaccgtttattgtaggaggaatgattggatttattgtattcttcctgggtgtgatgttcagtcctacaacgtctgtggcgatcgtatttgccgttgtggcaggtgttgcaaatgccatggtagacgcaggttcctatgcggcattgatggaagcttaccctgagtctccgggtacggcaaacctgatcgtaaaagtattcgtggcagcaggccagtttgttttgcctgtctttgtgagttttattctcgcaaaccatttgtactttggaatctcattttatgtgcttgttgcgattttaggactgaatcttttatttatgctgaaatgcaagttccctccgctcacgaaaaagggggaaggggaaaaagcagtaaccgcgggaccgttgatgaaagaacagccgaagctttatttggaggggctggctttagtcctctacggctttacttccacagccggactgaccatcagccagatgtggctgcctaagatcggagaagaggtagcaggaatgtcggttacatcttccaatgcgatcctttcctattttagtatcggaaccctggtctctgtgtttgtcacagcttaccttgtaaaatcgaaactgcgtccggcggctgtcacctttttatatccggtgatctccatcgttatggcagctgtctggtatctgtttccgacaccgatggtatgcagcattgcaggttttgtcatgggatacagcatcgcaggagggatccttcagatggcgatcacggctttgtctgagttcttccctggaaacggcggaaaatgtacgggcgctgtcaattcattgaactctattgcaatctggaccatccctgcgatcactggaatgatggccgaccgcaatatcaaagatattattattctgatcggcggaatctgtgccgttggagctgttctcggtttcattgccatggtccgtgaccgcagagtcttcggccgctgatgtaagtgcagtattgatagactgagattattaatctcatataaaaaatctatttgaagaatcaattaattccctgtataatataagagattggttgttaaaaaattaacttttgggtgaggtaatgacgacaacaaaagggagttctttaaatagaaaaatcaatgctgcggacggaggaactccgtttacaaaagagaggtattatgatgcttaagtggttagatgagaatttagaagagtttttaatgggagcctttttgatcggtatggtactgatcatgggtgtccaggttttggcacgctatgtatttggggcatctctttcctggtcggaggagatcacaagatatctgtttatatggtccggattcattagtgtgagttattgtacaaaaaagtgcatctccatcaaaattgaacagtttgtcgcaatgtttccgagaagaggaaaagcagtctttaaagtagtgaatcacaccattgagctggcattgttcctatatttgatcccgtactccgttctctatttaaaaagtgcgtttgaaagcggacaagtgagtccggcctgtcacattcctatgtattacatacaggcggcaccgctggtcagcttcttgctggtgactttccgcattttgcagagatggatcattgagtttaaagtggcggttggaaaggatcaggaggtgtagacatgtcagcgttgtcagtatttgttattttctttttatgtttgattattgcgataccgatttctattggactgggtattgtttcggtactgccaggaatttttgacccttcttttacggccagcggccagtttgttatccgttctatgttgggagggattgatagttttcctctgttggcggttccaatgtttgtcttgtcaggcatggtcatggcaaagggaggtatctctaagaagatttttgatgtatttgtattttttattgggaaatttacagcaggtatgccttgtgctgtcatcgttacctgtttgttttatggagcaatctcaggttctgcaccggccacagtggcagcggtgggaagtatgaccattccgattttaattaagcttggttatgataaaaaatttgctacagcaatcgttgcggtttcaggaggattaggtgttattattcctcctagtattccttttattatgtatggtatggcatccggacagtctgtcagcgatctgtttatcgccggaattcttcccgggatttttatcggactgcttctgatggtatatgctgttttttattgcaggaagcatggtgaagataaagaaaagatccagaaagaagtacaggcgcttcatgacaaagggctgcttactgtgctgaaagacagtttttttgcactgttaagtcccgtcattatccttggatgtatttatactggtgtggcatcccctacagaagcagctgttatttctgttttttattctgtattcgtaagtttatttgtctacaagagtatccatgtaaaagatttatggggagttatgatcgagggaattcatacctatgcacctattttatttatattggccgcatccgtagcattttcaagagtcctgactctgatgcaggtgcctcagacggtcagtgaatggatcctcggaaccttccacaatggagtcgtggtcctgctggtgatcaatgtctttttgctgcttgtgggaatggtgatggatacaacaccggcgatccttattctaacgcctattttgatgccgattgctgtaggcgtgggcatgaatccaatccatttcggcgtgatgatggtagtcaacctggcgattggttttgtaactccgcccatcggagtcaatttgtttgtggcttcatccctgacgcagatcccggtagtggatatcgcaaagaaggcaatgccactgatcctttgtttccttgtggctttgttacttattacatttataccacagatcagcctggcgctgttataggagggggatacagatgaaaagaataataagatttggtattgcggctttatgtgtcgtctctgtcttggctcttagcggatgcaagaagaaaagtgatgacggtgtgcagcggtatgcgtggcctcttggaacttccagcccggaggataccgtgacgcagctatattctcagaagtttgcagatgaagtaaacagattgagcaaagggaaaatgaagattgaggtatatccaaacagtacgctggggggagacagggaactgctggagagctgttctgacggtgatattccttttgttgtgcaaaatacggcacctcaggttacttttatgccggataccgctgtctttgatttgccaagtgcctttactacgattgaagaggcaagagctgccgtagacaatcctgttttttataagaagatggaaaaggtttatgaaaaaggtggatttaagctgcttggttatgcggatcagggatttcgtgtcatgtctaccaacaaagaggtgaagtcgattgatgactttaaaggacagaaaatccgtaccatggaaaacagctaccatatggatttctggaaggcactgaaagccaatccgacaccaatgacgttcagtgaagtttatattgggcttcagcagaagactattgacgcacaggaaaatccatacgaagttatcgtgtccagtaaactttatgagcagcaggactatgtggtggagacaaatcatctgccccattatatttctctgattgtaagtgatgaattttataaagaccttccgaaggatcagcagaagattattgaggaggcggcagagacggcaaaggaatatgcaaggaaagcttcggatgaacggattgaggaccggatgaaggtcataaaagacagtggtacgaagattgtgacgctggataagaaaactcaggaggacgtaaggaaagcggcttccgacatatataaaagcattaaggaaaatgtatcaaaagatatttttaatgcatatttgaatcagaattaagatcagcaggctcttttattgaaaaacaataaaagagcttgtttttattccatagaaaagttttccccatggaataaaaagccctacgggcactatgcgcacaaatgtgtgaggggttggggagatgaagtgggaaagcgaaaatccgaatcacaggataatttatgaaaaaagcaaaatacctgcttgaaaatcacgaaagcttgcttgtcatcggctgtaagaacaaaaaaatggacaagataatttagcagaagtgaaatatcgttgcttttaggataaatttattttgactataatgatatcatattcagaaataataggaggatattatggcagaaagaattacaggacatacagaattgatcgggctgatggcatatccgatcagacactccagttcacctgcaatgcacaatgaggcatttgcacagctgggactcgattatgcgtatcttgcatttgaggtgaccaatgagacccttgaagatgcagtgaaaggacttcgtgccctgcagctgaagggctccaatgtatccatgccgaataaaacggtagtaggacaatatttggacgaactttcacctgcggccaaactttgcggtgcggtaaataccattgtgaatgagaacggaaagctcatcggacatattacggatggaattggctatatggcatcattaaaggacaacggaattgatgtcatcggaaagaaaatgaccattgccggagccggcggtgctgccacggctattgagatccaggcggcgctggacggagtaaaggaaatgtcgatctttaatatcaaagataagttttgggaaaacgctgagaagaccattgaaaaaatcagatcaaatacagactgtgtagtaaatctttatgatttggatgacaaagagaagttgaaggaagaaatcgctgacagctatctttttgcacaggcaacaggggtgggaatgaaacctctggaagggcagtcgatcatacctgacacctcatttttgagaccggatctgattgtgacagatactgtatatgcaccgaggcagacaaaactcttagagcaggcaaaagaagccggatgtaaatgtatgaatggattgggaatgatgctgtttcaaggggatgcagcttttcatttatggacaggaaaacatatgccgatagaacatatgaaagaagttttggatatccgttattaatttcaggaatttaggaaagagcatctgtgagaccaggtgctctttttgtgtcataaaaattctgatttgccgccgtttcattggtttttcttcatgttggaaactttgtgctgatacagttctcggaatttgagtggcggatactgcattctcttctgaaaaagttttgaaaaatgattggtgttctcatatccgatttttttagcaatggagaccagtgaatcggatgtattgatcagcatccattttgcctcattcagtctgcggtcaattacataattgattggtgagatcccatataccttggaaaactcatggctgatatgatctgtgcttatgtgaaattgttcagctagtttttttaaagtgatttgtgaggcgtaattttcattaatataaattaaaatatcacgggcaaaagaagaatctttatgacgctcagtttttggatcggcaaggaaaagttcaagataaatgcttgccagtgaaacagccaaagcatcacaggctgccagatgagtatcggaagaaaacctcctcagtaagtctaactcctcaaacagacggtgaatatagttttcatgtatgccggaatccatggcaggacaaacattggctggcagcataaatccatgatcggaccggcagcataatttgtaatctgaaatggcgcaggtccagcagctcagaggatcatgttcatcagaaaacagggaatggatggcaccttgttctacaataagaatcattccttttttcaattgataggaattggtattgatgacataagtcccgcatccttttgaaatatagaccagttcggtctcatttttatgtaaatggtactggtaattccaagttggattattatagctgtgtgataagcggcagatttttggagaatgagccggctcaaatattggggtccttactttctcgcgatattcctctaagaacataatgctactcctttcactacaagataattattatataatacaagatagttgactagaaaataagaaaatctgaaataatcatacaaaatattatatagaaaagcaagataattttaatgatctacaatttacattgtagaaaaatacaggatagttggtataatttttgtagtaagttacacagatcaatgactgaccgtttattgaaaaaataacatgtaacacttttcaggaggagagaaatgaaacaggaaaaacgttataagcatttgtatccaacagcatttatgctgtacgttacattctttgtccatggttttggagcagcaatcataggacagaatgtaacttcccttcagcagcagtgggggaccacagcggccggagttgttgccgtgacatcagcgcttggaatcggacgtctgattacatatccgttttcaggtgcactgtctgaccggttcggaagaagacctattactttgatcggaagttttgtctacgtcttgttctttgctggaatccttgtatctccaaatgcccaggtcggctattttgtcgcgatgctctgcggtgttgccaatggatttttggactccggtgttattccgggggcgatggaaattctggaggattcaggactagcaagtatccttacaaagctggtcatctcgattgcccagtatattctgccgatgatgattgcctatctgctggcaaacgatatgtggtatgggtggacatttgtcttttgtattattatcttgatcgtaaatgcactgctgctgacgagagccaagtttgcaccgcagccgaaagtagagacagaaaacggtgagaaaataaaaggttttgtgggagtttccaaggcttctaaatttgcagtggaaggaattgcgctgatcgttatcggttacacctgtacagccacattccagatctttttggctgtaaataaaagctatgggatggacgttcttggaatgacagaaggggctgccgggcagatccagtctatgtattctttaggttccattcttatggtcgtagcgacaacatttctgctgaaatggatcaaacccgtcaaatttattttgatctgtccgatcatagcaggagcgacagaatttttaatgtttatttccagaaacgctactttggcagtggcaggcggtttcattgtcggcgctacggcagcagggggtgtgcttcagctggtgacagctacaatgacagacttatttccggcttccaaggcgaaatgtgtcagtgcagttatgattgcaggggctctttcccagttttcggcaactgtaatggcaagtaaactagctgcaatgtttggtatggaatattcccttctggtagctgtaggatttactgttttaggaattgttctggcggttgttgtaaatatccgctattcaatcattgaaaagtctttggcagcagaaggaaagagtctgtaatggcaaaagacagagggagatgtggctgtggccaatattataaatcaagacttttatttcaacaggaggtttgaatatgcgtaaaccagaaaaaaagggcacgaaagtgcaggttatgactgcaagagaggctgtagaattaatagatgacggagatactctggcagtttgcggagccggaggaggcatcgtagatccgtcttcattgatcgaagctctgaaagacagatatgtggagacaaaggagcccaaaaatttgacgctgtggcattccagcggattaggagaccgtggggaccgcggaatgtcaccgctggctcaaaaaggcatggtgaagcgtgcgatcggaggacactgggggcagtcaccgcgtctggctgagatggcagagaaaaatgagattgaagcctataattttccgcagggagtcatggcacagctggtcagaagcgcagccgccggccatcccggtattttatctcatgtggggcttggaacctttgtggatcctagaaatgaaggcggtaaattaaatgatgtgacacaagaagatctcatccgtctgatggagatagaagggaaggagtggctgttttatccggcagttcctttagatgtatgctttatacgtgctacaactgtggacacagaaggttatgcttctctggaagatgagattacttatatggatattctggcaacggcccaggcagtccataacaatggaggtcttgtgattctgcaggcaaaacgtgtcgtaaaagccggaagcatccatccgaaaaaagtgaccattcctggatatcttgtagatgttgtcgttgtaaatccggagcaggaacagctttacaatggctctgaccggttcttttccggagactatactgcagaggatggagaagtagaacctcttctgctggaccagaggaaagttgttgcacggcgtgctctgatggagatcgcaccgggcaacgtgggcaatgtaggtgtaggaatcgccgatggtatcggaacagttgcaagagaagaaggagtaggagataaatttacactgaccgtagagactggcccggtgggaggtgctactgcccagggaattttctttggagcaagtattaactcaaaggcgctgatgtctatgccggcgcagtttgacttttatgacggaggcggactggaggtagctttcttaagctttgctgagctggatgcaaaaggaaatgtcaacgtacataaatttaacggaaagattatgggaaccggagggtttgtaaatatttgtgcaggttctaaaaaagtggtactgtgcggaacactgcgtgccggtggactgaagacagaagtcggtgacgggaaaataaagatccaacaggaaggaaaatttgaaaaaatggttcctgaatgttctgagattacgttcagcggagaacaggcattaaagcaggggcaggaagtcgtatttatcacagagcgggccgtattctgtctcacagaagaaggtgttgtccttacagaggctgctccgggtgtagatatcaaaaaagatatcatagatcagatgggatttgaaccaattgtttcagaaaatctgaaacagatggatcaaagaatctttaccgaaggagtcatgggtattcatgatgagttcatgaaaggttcattttagaaaacagcagtaaagtaaatgatgaagtaaatgtgaaaaaaaggagattattatgagcaaaattgcaaaagttgaaattccactgcatgttggcgatacagctgaatttacaaaaacagtgacagaaacagatgtttatttatttggcggtattacagcagattacagccagatgcattttaatgaagaatatatgaaaaaaacaatgtatggaacacggattgtccatggaattcttacatttgctattggctgtacggcatctacaaaaattcaggaacaggtaaaatcaccagtgccgagtgcttcttatggatatgacagactccgttttattaaaccggtattttttggtgataccttgacatgcagatatacagtagatagagtggaagaagagacaaataaaacattctctaaactggagatatttaaccagcatggcgagatcgtcgttgcagcggtacatattcttaagttcttcccgctggaagatgacaaataactaaaaataattagattcagaagaaaaggagaatatcaatgaaaatttgtatgttgggaaccggttctcttggaagcacaattggaggcactttagcacagggtgggtctgaagtttattttgtggaccaatggaaggaacacatagataagatcaatgaaaacggtctgaaaatgacagatgaaaaggaagattggtttgtaaaggtggatgcccggacttcggcagaagggatagggccagtggatctggtgatcgtacttgtaaaatcatttgcaaccaaagaagcggtggcacagcttaaagagacgaatgtcattgggccggagactcttgtcatgtcccttcaaaacggcctgggcaatgaagagacaattgcagaagtcgttggagaagaaaatgtcatcagcggcaaaacttatgtaggaggacgtcttctggaacctggatatgtcagtgcgggagttcaaggcaaatatacttatataggcgagctgacaggaaagatcacagacaggattcaggcagtatgtgaggagtttaataaagccggattgttgtgtgaagtcagtgataatatcaaaggactgatttgggataagctgctgatcaatgtggctgcaggggccctttgcggtattaccagacttccttacgggccgttatatgaagaggattatattaaggatacagcagttgaagccatccaggaagggattaacgtggccaaagctgccggagtaaaattaaaatcagaagatcctgaatacgcatggtatgctgccagtgagggacttcctggaacattcaagacttccattttacaaagccttgaaatgaaacgcccaacagaaattgattttattaacggttccgttgtagagtggggtaaaaaattcggtattgcaacaccagttaacaagacactcgtgacatgcgtaaaaggaattgaaaaatttttgctggaatatgaaccgggtctggaaaaataggaggataaaatggcttcatatttagaacacatggccctccgggtaaaagatctggattggcatattcggttttttgaagaagtatttgatatgccggtgcgtatggaattgggagaggcaccaaacagaaaggtatggcttcacgctggaatacagctgaatgagacgattgattatgaaggaccggaaggccgtgcggatcatatgggaattatgacagaagatgtagatgaagttttagagaaggcttatcgtttgggagtaaaagaactgcctcagggacataattggtttacacttcctagcgggctgtgtattgaggttattgccggtaaaagggatgtactgaaagagattatagagaaaaagccttggatagaataacggaggaattgaaaatgaaaaaaataatgatgcttcactgtgttaatcacaatatgtacggtaaacgtgacccggagcagtatggaactattaccttagatgagattaatgaattgattgcacagacggcaaaagagactgggattcaggtggatacttttcaaagcaatcatgaaggtgaaatggtagataaaatacaccaggtattctacgaaaagtatgacggtgtcatcatcaacccaggcgcatggactcattataactatgccattcatgatgcgctggaaatattagagtgcccaattcttgaggtccatatgtcaaatatctttaacagagaagattttcgctcccactcagttatagctcctgttgcggcaggaatgatagcaggaatgggcgaatcagcttatactcttgcagttaaagcctttggtgaaatgtttaagagaacaagtaactaaaatttgaccacaacaaataataaggccgatccctctctacgaaagagaagtactttaagtcaataacttgcaccggtagaagttttactatataataaagaaaatattgccggtaaaattattggcgaacactggtgagggggaatatataccagattatgaataaaaagtacggtgcggctgttttacttttgctgtgtgtcttgatgctggcctcgtgcaggggaaaccgtgacaagaacaaaaaacagacaaaagaagagtcatatacagtgataaaagattctaccgggcgaaaagtaaagataaaaaaagaaccggaaaaagtagtagcgttatcggcttccctgtcggatgtatggctgctctccggaggagagttatgcggaactactgcagatgtgctggaagaagaggtagttcacgaaaatcttaacaaaaaagagattaaaaacgttggttctgtcaaacatccggatctggatgctattctctccctaaagccggatttagttctggtttcaggaaacattgaggaacagatggatacagctgagactctgaaggaagaaaaaattccatattatattgtcaggatgaatacgctggacgatttcctgactgttttaaaggaaatgacggaagtaaccggcgaagaggataattatgaagagtatggggagaaagcaagggaggaagcggattatctgctgaaacaagtaccaaaaggcaggaaaatatctgcgctggtgctcagagcttattccacagatgttaaggtaaagacagaggaaaatgtagtctgcaatatcctgcaggacatcggagtagagaatgtagcgtcgaacaataaaaatcttgtggaaaataagactccttcactggaagcgatatctaaaagcgatccggattatatttttgttacaaccatgggagatagaaagcttgccttaaagaagcttcatgatactttggaaacagagtccggatgggaggatctgaaggccgtgaaggaaaagcgctttgttattcttccaaaagagctgtatcagtataagccaaacagccggtggagcgaagcttatgagtatattctgtcgattgtatatcctgatacttttcatttggcattggaagagagtaaataaataattataaaataatacattaagagaagacaaaacataaaaagcaccccattgaacaatgttaaaagcattgattccaatggggttgtttttattttgtgtatttttggatgataactttcagggcatccggattatcttttatccagtcagaatatgaattgtaatttttttgcactgtctgtccgatttctattaagaagtccggaatatctgtttccaaaatggttccggcatcttccccgaactgtgcattgtcctgtgtttcctctccgccgatatacagctggaaggctggaagaggttttttatcaataacctttgtggctccacggaagccaagggttccaatctggtgagtcccgcaggaggatggacagccggaaatatggatcttcgggagcacatcattcggaaaatctaagggacggatcttatccatgacagctttatagagtttttgagagtctcttaggcctacttgacagattttgctgccaatacaggcgacagatgtctcaaacaggttggatgcactgtctttggtaagttccaggagttccagggcttcatctttgttgcagttgatgaaataaaggctttcgtccggggagattctcaggaccacctggtccatcttctgtactgctttatatatcggtgcaatcagctccggcgggatattacctccaaacggatgatataaaacgctgtaaagaccatcctgtttctgggcagtaatccggaagttttcctcaaggaaaccacagccttcttttgttacaggaacttcctgaacattgaggtcaagagaatcttcagccattgacttgctgaggttttcaagaaatgcagcccggtagccttcctggcccaaagtatcctgcatataacgtgttctggctttcccacggttttcatagttcccatgctgtataaatgtcataatcattgctttgatatagtacagcactttcgatgggtcgatcccttcttccacgagtacgcccattttagggttattaccaagaccgccggcactgtaaacgtcgaaggtgtgatccttgcgtgcaacaaatccaagatcacggaaggtggcatgtgttacattctttggagaattagaaaaacatactttcagctttctaggcattttcacttgtttaatgaaagtcagaagataatcggcggcttccctggcatatggaagcacgtcaaagtattcctctttttctacaccggagagaggggaaaccatgacatttctgggaaaatcacctccgccgcctctggtgataatatcgtgctcaaacgcttcttcgatgagggaagagacggtaacatcatttaggttgtgtacctgtatagtttgacaggtggtcaaatggagtttgtctatcttatatttttcaacactgtccgcaataaagaggagtttatcttttgtgatttctcctccggtaaaccgaagcctcagcatactggaaccgccgcctctctgtgcgtagcttccaaatcctcctgaaaaacctttataatctttaacactgatctccttttgataaaactttctggtcattagatgaaattcggctagatcagcctgaaattctttttttaattcctgatccatgttattctcctttgtcatataattaacggtattctaattatagcatttctcctaatgcacgtccacattcaggtaaatttggctttttttcagttatatgctagaataggacaaaagaaaaaataaaggatggatatacgataagatgtttgagaagttttacccgaatgaatatatggacagcacctattccattgactttaaagattattatgaaaaaggatacaggggagtcctgtttgatgtagacaatacacttgtgccgcacaatgcacctgcagatgaccgggcgatctgtttttttagggaattaaaagagattggttttaatttttgctttatgtccaataacaaggagcccagggtgaagaagttctgcgaggcagtggaagggacctactatatttataaggcgaacaagcctatggtgggaagttatgagaagggcatgaagctgatgggaacagaccggtctaatacactgtttgtgggagaccagctgtttacggatgtctacggggccaatagggccaatgtttacagtatccttgtaaagcccatgaatccaaaagaggagatacagatcgtactgaaacggtatcttgagaggattgttctgcatttctataagaaaaaattgaaataatgcatgattgctctgccaaacgtgaatcattatattcagtctattaaatagttatatacgtttgcaggaaaacttaaatagtacgcaataaaaaaggcctttggcatcaaatgatgatgtttcccaaaggccttttgttcatttatttcattataccagatgaattataagaagtgatgtctttcaagtgcgatcaggatatcacgcccttctttgacaccttcgatcatacgtcttgtctttgcgctgtcaccgatgttgagaacttcgatgccttcatctacaaaatgatcgtacagagcctgcagcgccggtgtggcagactgcattccgagacagataaatccatagtcaaagtctaattccagatccttatagtcatgacggacaataaaagagttctctttcacttccaaaaggttggcattcggatactgagtgactttgtatttctccagaagctcattggcaccggttcttgtgataagatccaagtcttctccaaaatggggctttttctctacaatggtcacatctgcttttctaggagcaaagaattcaaccacatccaaaccgacatttcctcctccgatgacaacgacttttttgccggaaagatctgttttttcaaatgtgtctaccttgtcaaccaggtcaaagatcgtagagacatttcctttttcaaggttttccttaaggcctggaatattcggaagcagtgggttggaaccggttgcgttgacaacgatgtccggtttgaatccgtctacaaattccgcagtagcttctacattcttgcagataaacaagtttttaagggccatggctcttttttcctgataagcagggaagtaaccaagacgttttttattcggcatgttgcccacacgtctagccagtccgccaagctggttggtcttttcgatcagaacagtggaacatcccacctctgctgcagtacatgcggcttcaaggcctgcggtaccgcctccgataacaaccacgttgcaaggcttcttgatatgctcttttttatagttttctccgcttactacaaatggattgacagtacagcgcatcggtttgttgctgagcgttgcagtacatccattgttgcaggagatacatttgttgatatcatcggtgtttccgaactgtactttgttgacccactcaggatctgcgatcagtcctcggccgataccgatcaggtcagactggccgctctttaaaatctcattggcaatctcaggttcacggatatttccttcagcggtacatggttttccagttttcttcttaacagccttggacatataagatttccatccgtccggaaggtaatctgcgtcatgctgatactgaattgtacaggtaagacctgcggatactgcaaatacgtctacataatcttcaaaatattcaacgatctccaatgtgtcattcagtgagtttccgccttcagtgagctcatctgcactgattcttaaaaagatcgggatgttctcgcctacaacttcgcggactgcttttaaaacgagcgttgtaaaacgtgcacgattttctttagaaccgccaaactcatctgtcctgtcattggtcagcggggataagaactggtttagcagatagccgtgtcctgcctggatctcaacagcatcaaagccggctgtgactgcgcgcttagcagcgtctgcaaacttctggacaataccgtggatctcttctatggtaagaggtctcgggatgtctcctccagcttttgatggaatatcagaagcagataccggctggatatttgtcacagaaccgtctgagtcggcaccgccgtgattgagcagaatagaagcgttggatccgtattcatggatcgcttcacagagcttgtacagtccatggatgtagttgtcatggtcaattctcaactggttggtgcttaaagatccctgaggggatgcgacactggcaccttccactgtgatgaggcctatgcctccttttgcatgttgtttataatatgcaatcagtttatcactgacttctcctgttcgttcagcaaaatttgttccaatcggcgtcatgacaatacggttttttaatgtcattgattttactgtaaatggttcaaatagattgcggaaattctttgcagccatagttagttcctccatttttctttctttttcactgcaataattatatcaaactgtgtatacaaatgcaatgaatattatacccagagggcactccacaacataaaagccattgggtggacgtgctttgcacgatagggtatgagtttttctccattgtctccagtcggctctggaaaggcctccttccgacaacggagaaaaactatcgtaggatggcaccttttgttttttaactttcatctattctctaacgaactgcccgtaagcctgaacgaatatgtaacgtttaaagaaaacacacaaaacgtaaaatgataggagtcaaaaggagccactttacgaaagttatttaccactattggaggagcgcatttcaaaagcgtgacggaaatagtggtaaataactcatgacattttccacatgatttccgttcggctcttagaatgcctcactccaattatgtagaaaatggacgtaatgtctgctggagaagggcttctgtcaaaagaagggtgacacttttcaaaagttatttaccactattggaggagcgtatttcaaaagcgcgacggaaatagtggtaaataactcattcccacagggcagtctgtaatttcataccctgcgggtggacgtgctttgtacgataaggtatgatatactcaaagctaagaaactaatcctggaggtatcctatgaatctgaatcatctgtattatttcagaacgttggtgaaagagcagcactatacgaaagctgcccagatattaaatatcacgcagccaagcctgagccatgccatcaatgctttggaaaaggagttgaatgtcaaattatttgagaaagttggaagaaatgccaggcttaccaaggaaggtgaacttttttggcgttatgtggtgcagtctctggatatgctggatgaaggcaggcgggttgtgggtgaagtctctggaatggtaggcggtttcattgatatcggatatatttatacactgggaagtcattttattccccagaatatgagcgattatatgaagatgaacgaggggaaaaatatcaggttttcctttggccaggggaccacggaacagatgatagaagaattaaaaaagggaacctatgatttggtattttcgtcctataaagagggggaggaccggctgaactttattccagtagtggaagaagagcttgtgttgattacaccgaaaggccatccgctgtcccgggaaaaggctgttgatctggcggagacgaccacatatccgtatattatgttctccagaaagagtggactgaggccgtttatcaacaagctgtttacaaaggtaaaagcacagccgtttatcgcatatgagggggaagaagattcttccgtggcgggacttgtggccgctgggctgggtatctccatcgtgcccagaatcccgctcctggaaacaatggaagtggaagtgatccctattaaaaggccggagatcaaacgctatatttatctcgttacgcagaaggataaatacttgtcgccgatcgtgcaggattttatcaagtttataaaatcccgccaccagctgtagaaaaggaggcagaggattctccagtctcagtccaatattgaaagaaatgccggattatggtatactgaaccacattagattacgattgaagaaaagcgaggaacacaatgggaaagttagaagagatcagagccagactggagatctgtgacaaacagatcgtgtcagttctggaagaccggatggatattatcaaagagatcatggagtacaaaaaagaaaacggacttccgatcctccagccagagcaggaaaagcgtcagagaaagatgctgaaagagcatgtaaaagataatacatataaggaagagattctgaacatttttacttatattgttgaaaatagcagaaggattcaggccaggactctgtttacccataatattttcctgattggatttatgggagttggtaaaagtacagtttctgactatttgagtacgattcttgcctctccccaggtggagatggatcaagtaattgtagacaaagagaagatgtctatcaataagatttttgaagagtatggtgaagagtattttagaaactgtgagactaacctgctgatcgaactgcagaaaaagaataaccagattgtgtcctgtggaggcggagtggccatgagagagatcaatgtgcaggagatgaaaaagaacggacgagtggttcttttgaccgcttctccggagactatcttagagcgcgtcaaagacagcgatgaacgtccgctgctccgtggacgcaaaaatacagagtatatctctgaactcatggagatcagaagaccgaagtaccgtgcggcagcagatgtgatcgtagatacggacaaaaaaagtgttgaggagattgcagaggagattgtcgcaaagttaacccatctataaaataggaggaatgaagatgcaggcatttacccatcacacaccgacagaaatcatttttggaaaggcttccgagaacaaagccgctgaactggtcaagaagtatcacggttccagagtctttgttgtgtatggaggaggaagcgtcaaaagaacagggcttcttcaaagagtgacagaaacactggaaaaagcagaccttcaagtggagaccatcggcggggtaaaaccaaacccgagactggattttgccagagaggctgtgaagaaggcgattgagttcaacgcagattttattttagctgtgggcggcggaagtgttattgacacggcaaaggcagtgtcccatggagttgcaaatccagacacagatatctgggagttctggtccagaaaaaaaccgcttcaaaaaactctgccggttggtgtcatcttgactcttgcggctgccggaagtgagaccagcgattctgcggttcttacgaatactgagatccaggtcaaaagaggccttggcacggacctgaaccgtccggagtttgccatcatgaatccggaactcacttatacccttccaaagtatcaggtgggatgtgggatcgtagatattatgatgcatacattagaccgttattttacaaagaccaaaggcaatcagctgacggatgagatcgcagaaggccttctgcgcactgtgatcgctaacggaaggattgcaattaaagattcccataattacgatagcatgagtgagatcatgtggtgcggaagcatttcccacaacggactgaccggccttggggcagagaaggactttgcgcctcaccagctgggacatgaactgagcgccaagtttgacattgcgcacggagccagcttatccgccgtatggggagcatgggcagagtattcctacgtggaggatgtggatcggtttgtgcgttttgcagacaaagtatggggaatttcaggagacaacaaagaagaagtggcaagaaaggccatcaatgccacagtcaactattttaagtcactggacatgccgacttgtttttcagaagcaccggagatcggcataaaaacagacgatgagctgtgggcaatggcagacggatgctcctaccagaatacgaggacgatcggttccttccgtgttttgaacaaggaagatatctttaatgtatacaaattggcaaataaatagttgataagaagtaccatttattatagaatgttatagaacaaaatgattaaggaggaaattacgatatggtatccgcaggagattttaagaatgggttaaccatcgaatacgaaggcaatatttatcagattattgaatttcagcatgtaaagcctggaaagggagcagccttcgtgcgtgcgaagttaaagaatattaagagtgggggggcgatcgaaaagtctttccgtccatctgaaaagtttgagaatgctcacattgagcgaaaagaaatgcagtatttatatacagatggtgaattattccacttcatggatccggagacatttgaccagatcgcattagatccggacaccatcggtgattcattaaagtttgtaaaagaaaacatgaatgtaactttggtttctcataacggaaccgttttccaggtagaagcacctctgcatgtagaactgctggtgacagagtgtgaaccgggagaaaaaggaaacacagctcagggtgctacaaagccatgtacggtagagacgggtgcaaatgtcaatgttcctctgttcgtcaaccagggtgacacattaaagattgatacaagaaccggggaatatttatccagggtataagcttgtcaaagaatcagaagattcgggggatcatctgcattatcctgtcagcgttctgctttgcatggatgaatgcttttgtaaagctttcgggcgatctcccttcgattgaaaagagctttttcagaaacctggtggctttgatcttcgcatttgtcatgatcaaaaaaagcggcgccgggttccggtttcaaatgaagaatttacactggtttatcctaaggtccttagcagggaccttaggtattttttgcaatttttatgcggtggatcatctggtgctttccgatgcgtctacgctgaacaaattgtcgccattttttgtgattgtattttcttatttgattctgagagaaaagattaccatattccagttgacttgtatcacatccgcatttatcggcagtatgtttattgtaaaaccaagttttgcatcagtttctgttcttccggcattcataggattcatgggaggattgttcgcgggatgcgcctatgcctgcgtcaggaagcttggtaccagaggggagagaggaccattcatcgtctttttcttctccacattttcttgtatcagctgtattccttttatgatcgggaattttcatccgatttccggaatccagctcgtttatctgcttcttgcagggcttgcggcagcgggagggcagttttccatcacggcggcctacacctatgcgccgggaaaagaaatatccatttatgattatacgcagattattttttccactctgctgggatttttcctgtttggccaggtgccggacggattcagtatccttggatatctcatcatcatcgctgcagctgtggttatgtttttctacaacaaccgcagggacaaaaaagaataagatcgtattttgcaagggaagttctccgatgttcgagggggcttccttttttgtattctaaaagcccggacttgttcatatattagggttatacagctttacgaagaaggaggagttctatggaatacacaagtgagatctaccatattcttccgaggtctgtccggggactgatgctaaagagcggtttaaagccagatcagctgcaggaaatcaggctgaggatccatcagccggtgatcatccgctatgaaaataaagagtattttttgtcaactggcggaaagctcacttccagccatcattttgtacatgttctcacaagggaagaattaaaacagatgatggaatatatcagcaattactccctttatgcctatgaagaccagttgagacagggatttttgacggtcaaaggaggacaccgggtggggattgcgggcaaagtctccattgaggacggtgagattaggacgatgaagcatattacattcctaaacatccgggtggcccatgaggtcatcggctgtgcggagtctgtgtttaaactctgcacagaacatggacatcttctgccggtgctgatcgtatcgccgccgggcaggggaaagacaacgcttctaagagatatgatccgtttggcatcagacggcggagagactgtgggtgtggtggatgagcgcagtgagatcgcagcttcctatatgggagtgccgcagaataaggtgggtatccgcacagatgtcatggacggatgtccaaaatcagagggtatgatgatgctggtgcgttcgatggctcccaatgtgatcgctgtagatgagataggaaaaaaagaggatgtggatgccatgctgtacagtgcctactgcggctgtaccctgatggcgaccatccatggaaaagatatggaggaattaaaaaaggtgccgtatgtaggggaaatgattcaaagaaaagtgtttcagcgttatattgtgctcagtgaacagggagacgcagggtcggtcaaagaagtattaaatgaggagggggtgaagctgtatggttaagctgtttggggcggccattgtaataatatccgggggcatccttggattctaccgggcatcccgtgagagaaaaagactggagcagggcattgagctcaaacggcttttgtatcttttgcagggggagattcgctacgggctgacaccgcttcccgatgccatagggacaatagcggggaagatgaattcggagttttctgtttttttgacggatgtatcgaaaaagctttcctcctaccaggaagaaacattttcccaggtgtggaagagctcggtggaacaggaccttgtaccctatgtccaggaaaaaaagatgctggagccgttttcagccatgggggatacaattggatatttggacaaggacatgcaggtgaagacgattgatttcaccattgagcagattgaggagaggatgtatcagatcaaagaccaggtgatcaaaaactgtaaactatatcagagccttggattatcctttggacttctcgtagtgattattttattgtaaggaggatcttatgagcgtaaacattatctttcggattgcggctgtgggaatcctggtcacgattcttgtccaggtactgaaacattcgggaagggatgaacaggcatttttgatcacactcgccgggctaattcttgtactgtcatgggtgatcccttatatctatgatctttttgagagtgtacagacactgttcacgatatcttaggaggcagcaatggttaagatcgcacttttcggcatcatagccagtattttgacactgaaaataaaatccataaggccggaatacggcctggtgatcggcctggtatccagtttgttcctggccatttatgccctggatgagatgggaaagatcatagatctgtttgataccattgagtcctattcaggcattccggggacatacatacaaatcctcctgaaactgatcggtatttcgtttttgtgtgagtttgccgccaacgtctgcaaggatgctggacaggcaaccatggcaaaacaggtggagatggcagggaagctgtccatacttgtggtgagcctgccgattctggaatccctgctgaccacactagaaaggctgatgggatgagacaaaagattatattgcttgcatttatctttgtactgatgtttactgcaaaggtgtctgcaaaagaagaggaagacttaagcgattattcatttgagcaggtagaaaaaaccctggagaaagcgcaggttcatttttcttatgaggagctggtgaaaaagctgatcacaggaaatataaaaggcgctttttccatggtgacagaaagtatcggggaccagctgttttcgatcctctcagaaaacaaaaatttcatgaagcagctgattgtggtggccattattgcggcagtgttcaagaacttttcggatgctttttttcaggggaatactggggacacggcattctatgtaacctacatgatcctgatcgggctgatggcaaattcttttttctttttgaattctatcacagaccaggtgatctccacgcttattgattttatgaagggcctcatcacggcatattccattgcggtggtggccaccaccggggtatccacgtcggtggcactttatgagatgtatctgtttgtgatctatattatctcacttttggttcagagtgtgatttttccggcggtcaaaatcctgtttgtcttaaagatcgtcaaccatatctctctggaggagaagctttccaggctctgtgacgccttagaatgggcagtcagggcgcttttaaaaggacttctggccgtagtgctgggaattcagatgatacaggctatgctgcttccggccgtggattccgtaaaagatggaatcttaaaaaagggagtctccatgatccccggagtgggacagggagtcagtacggtgacaaccacactgatcggatcggcggtggtaatcaagaacagcatcggggcggcagggatctttgccctgtgcgtgatcattctcgtgccgctgctgcagatcggcgggatcttactttcttacattgggacagggatcctgctccagcctgtatcggataagcggatcacaggatctctggatgcggtgatcaagagcggcaagctgctcataaggacggtatttaccttaagcatcctgtttatcctgtcgatcgctatcgtggcattttccacaaacattaattactacacggggtgacggcttatgcagtatatcaaagcaatcgttttttttctgatacttatgacactggtaggccagctgtgccagggagacaaatataaaccatatatccggctggtaactggatttatgctgctggcgcttatgatgaaaccggtggcctatgtgatgaatctgggaccagaagatatcactgtattttctaatatggcatcggggagcacggagtcttcgttccgtagcaaggccgtggacagttataaaagcagggaggaaaagaagatcaaaaaaatccttgcatcttataagattgaggctgaggaagtggaagtcgatgtggatgacacaaaggatgagacggaaatcagtgaaatatccgtcaaagtgaaaaatgagaaattagaaggaaagaaagtaaaaacagtacttttgaacttctataatgtagatgagagtcatatcaatataagtgagtaggaagtgtatgatggacaaaaaggaactgattcaaaaaattgaatctatgggtacaaaaaaaatcgtcttgatctttgttctgggcatcgctttgattgtgttttcctttccttcatccggaaagaaaacttcaaaaagcgccaagagcacggaaagccaggaggatacgtcatccacggacgcctatgtcaaaaaacaggagcagcggctcatggctgcgttaaagcaggtggaaggtgtgggaaaagtcaaggtgatgattactctaaaatcttcaaaagagtcagttgtcaacaaagatacaccatatgaggagagtactaaaaaggacgaaaaaacggtaaaggaagacgaagagaccgttttgattgataaagacggggaaaaagttccttacatagtgaaagaagtagaacctgaagtggaaggagttgtagtggtggcacaaggcggaggaagcgatattatcaaccagaatatcgtcgatgcggtgagtgtgttgtttcacatttcatcttataaaataaaggtgttaaaaatggaggactaaggaaatgaagaaaatcgtgaaaaaaaatcaattaatcatcacaactctggctgtaatcatcgcagtcgcgggctatgtcaattatacgggacagtacatcacgacttcaaaagataaagcaaaaaccgtgagcaatacggcaaagacggcatcccagagccaggccaaggatgacatcaccgatgtaggagaggcagtgctcacaaacgcccaggtaagcaattatgtggcaaaagcaaagcttgagagagaacagacccacagcaaagcaaaggataccctggaagagatcatcaaagataagaccgtcaaggacagcgtgaaacaggatgcagttgacaaactctccacactggcagagcagatggagatggagacagccactgaaaatctgttgggcgccaaaggatttttaaattccattgtgacaattcaaaacggaaacgtggacgttttggtaaacttaaaagacatctccaaagtggagagaagccagattgaggatattgtcacaagaaagaccggctgcaaacttgaaaatgtggtgatcacgtcaataaaaacagaagattaaagattcggtgtgtaaattccatgggaagggatttgcacactttcttttttcttgcataacatcaataagttttggtataattaacatactgtatatatgaaggatcatagaacagaagaaaaagtttttagaagcaatcagcaggaggctttttatggagaataaaagtagtagttataagattcaggaaaaagggctgctcggagaggtgaagatcgcagacgatgtcatcgcgatcattgcgggactggcagcgacagaagtcaaaggagtcgcaggcatgtgcggcaatatcacaaatgagctggtgagcaagctgggtatgaagaagctttccaagggtgtgcacgtcaatgtggagggaaatcatgtcagtgtggatctggccatagaactggattacggagtcagtattgcacagatttccaagaaggtgcaggagaaggtcaagacagccatagaaaatatgacagggatgaccgtcgatgaagtcaacgtaaggatcgccggcgtagccctggaagaagaataatcaaaagagacggagctgtgaaaatcagttccgttcttactgtaaagagaaaggaccgtaggatgacaaggagtaaattaagagagcagatgttccgtctgtgtttttccattgattttcatgcaacagaggagtttgaagcgcaggctgacctgtacttggaagaaaatgattttttcaggaacaaagaaaaagagtacatcaagaaaaggacgcttgacatgctgtcccgtcttggtgagatcgaccagaagatcaatgaaaacagcaaaggatgggatattaagaggcttggaaaggcagagcttacgatcttaagaattgcggtttatgaaattatgtttgatgaggatatccccaacaaagttgccatcaacgaagcagtggaactttctaagacctactgcaatgaaaaagcggcatcctttgtcaatgggattttaggaaagattggttagatgaacaaggtattttcagttgcgcagatcaatgcgtatatcaaaagaatctttcagagcgattatgctctgaatcggatttatatcaagggggaagtctccaactgtaagtatcattcctcggggcatatttatttttccctgaaggatgataaaagccagatctcctgtgtgatgtttgccaaccagaggatgaacgggctggattttgatatggagaacgggcagacagtcattgtctcagggagcatcagcgtgtttgagagaaacggtacttatcagctctatgccaatgagatttccctggacggcatcggaagactctatgtagagtttgaaaagctcaaggagagactgtatcaggaggggctattcgatcacgagaagaaaaagccgatcccaaggaatcccaaatcggtaggcatcgtcacggcgaagacaggagcagcgatccaggatatcatcagtgtggcaaagcggagaaatccctatgtgcagcttgtgctgtatccggctcaggtacagggggacggtgcatcggataccattgtaaagggaatccagacattggaccgttacggcgtggatgttatcatcattggccggggcggcgggtccattgaggatctctgggcatttaacgaagaaaaggtggccagagccgtctatgcggccagaacaccgatcatttctggtacaggccacgaggtggacacgacaatcgcagattatgcggcagatttaagagcagccactcccactgcggcatgtgagcttgcggtgccggatctcagggagacactggaagccattgatgttagaaagcgcaggctttttgcacagatgcagtatgtcacaggcaattaccgtctcaaggtagagagataccgaaggaagatgcatgggtttgatccgaggcttaagctccaggaacagaagatgatctttgcggaattagaagaacggcttcatgggcggatggatcacctcaagaaggactaccgccacaggcttgagatctatatggaacggcttcacggaatgtcacctacagcgaagctgatcgggggatatggatatctgtcagtgggagacaacgagccactcacatctgtgaagggggttaagatcggggaggaagtgacgatcaccatttccgacgggcagctcaccacagaagtcagagacattagagatatttagataacggagcacttttacaaatgagacatgtagaagtgctttttctttataaaaatttaagttgaatgaacgtctgttctgaattataataataacaactgaaaataaggaaaagataattcacagaaaatatgatataatctaaaaaatagatgcagaaaggatatgaggtaccacagatatggctaaggagaaatttcagatagatgaaggatttatacagctggatgagatcatcaagcagctggagcaggaggacgtgaagctgtctgacgcagtagctctatatacaaagggcgtggaagtgctgaaggaatgcagggattccttggacaaggtggagaaggaactgatcattttagagcaggatggagaacagaatggatcattttaaacaagagatggcaaagagaacagaacacattgagagtgtgctggatatctatcttcccaaaccggaaggactgcagaagacagtgcttacggccatgaacacaacagtccgggcaggggggaagagactcaggcctatgctcatggaggaaacctataagatgttcggcggtacaggcagggtcatagaaccatttatggcggcgatcgagatgatccatacctattccctgatccatgatgatctgccggcactggataacgatgactaccgcaggggacagaagacctgccatatcgtctacggggaagatatggcggtcctggctggagatgcgctgttaaactatgcttttgagaccgcatccgcagcttttgatatggaggacgcagatcttttaagaactgcaaaggccatccagatcctggcaaggaaaccgggcatttatggtatgatcggcggtcagacagctgatgtggaactggagggcagagagctatcattagatgagatcatgtttatccaccacaataaaacttctgcgctgatcgaagcgtgcctgatgattggtgcagtgcttgcgggtgcttctgatgagcaggttcaccatatggaacagtgtggaaggaagatcgggctggcgtttcagattcaggatgatattctggatattacagggacagaggaagagatcggcaaacctgtgggcagtgatgagaagaatcacaaaaccacatatgtgacgttaaaaggtattgagcaggccaaacgagatgtagagcttatctctatggaagcggtctctgtgcttaaggattatgatgaggcagacggttatctgaccggtctggtggagtatctgatccacaggacctattaagcaaaaggaagacattgaaggagtcaatatgttagaacagataaagcatcccaatgacataaagagtatcaatccgaaagattacagacttctggccaaagagatccggaagtttttgcttttgaatgtaagcagaacaggaggccatctggcttccaatctgggagccgtggagcttacaatggctctgcatcttacgatggattttccgaaagaccagctggtttttgacgtagggcaccagtcctatgtccataagattctcacaggcaggatggaaggatttaaaagtctgcgccagtacggcggcatgagtggttttccaaagcgcacggagagtgactgcgatgcgtttcacagcggacacagctctacatccataggtgttgccctgggtcttgcacaggccagggacctgaagggaacggatgagaccatcgtggcggttctgggtgacggggctctttccggtggtatggcttatgaggctcttaataacatggccagactcagggaaaagaaacaaaagctcatcgtagtactcaatgacaataagatgtccatatcggagaatgtaggcggaatgtccggctacctgaaccgggtgcggtctaaaaaagaatatgtagattttaaaggaaatattgaaaaatcattgatgcagattccattagtgggagaacccattgccaaaggcctaaagaaatccaaggattccatcaagcagctgtttgtgccggggatgatgtttgaagatatggggattacttatatcggacccattgatgggcacaatgtaccgcttttggtggagacctttgagcgcgccaagaagctggatgagccaatcattctccatgtagtcacaaaaaagggaaagggatataagtttgcagaacaagatccttcccgttttcacggagtaaatcccttcaatgttcggaccgggaaagcgctgaaaagcgggggaggtctgtcctatacagatattttttccgagacagtcaccgctcttgcacaggaagatccggagattgtggctgttacagcggctatgccggaggggacaggactttcaaagttccgtgagagattcccggagcgtttttttgacgtgggtattgctgagcagcatgccgtggcattctgtgcaggtatggcagctaaaggactgaagcccgtggccgctgtttattccacatttttgcagagggcatatgaccagctgctgcatgatgtgggcatcggaaggctcaacatgctgatcggcgtggaccggtccggcctggtaggagcagacggtgaaacacatcagggtatctttgatgtgacttatctgtcttccatcccaaattttacagtgatggccccgatcaacggaaaagaattaaaagaaatggtcacctgcgctctcaaagaatttgatggacccgtggctgtcaaatactcccgtggctccgcatccaatttgtttgaagagcagtatactccgcttaaaaaggggaaaggatgtatcctaaagcaaggcctggacattgcactgattcctctcggcaacatgatggaggaaggaattctagtatatgaagaactgataaaggacgggtatacgcctacactggtcaatccaagatttgtaaagcctctggacgaggagttaatttgttctctcatggatagacaccgtctgatcgtaacgatggaggagggggtcttaaatggaggattcgggcagcaggtgacacagatcctcaccgagcatgattacaaaggaaggatccggaatatcggtattgatgaccgttttgtggagcacggttccgtaggtgaactcagaaagatgctggggcttgacagcgcgtcaatgacacataagatcaaagagtggattggagataaagcatgaaagaacgattagatgtgcttctggtaaaaagaggccttgcggcgtccagagagaaggcgaaggccatcatcatgtcaggcgtagtttttgtggacggccagagagaagacaaggcaggcactatgattaaagaggaactgcccattgagatcaaaggaaaaacactaaaatacgtaagccgtggaggattgaagctggaaaaggcaatgaaccagttcggtatccgcctggacggcagggtgtgtatggatgtgggggcatccaccggaggatttacccactgtatgcttctgaatggggcaaagaaggtctattccgtggatgtagggcacgggcagctggactggagcctgagaaacgatgagagagtcgtgtgtatggagcgtaccaatatgcgctatgtaactctggaggatattgatgaaccggcacagtttgtttccattgacgtttcctttatctcattgaccaagatcctgccggcggtttacgggatcctggagaccggaggtgaagttactgccctgatcaaacctcagttcgaggccggcagggaaaaggtcggaaaaaagggagtggtaagggatccggcggttcatgaggaagtcattgaaaagatcacagagtttgccagcggcaatggctttgaactccttcatctggattattctccgatcaaagggccggagggaaacatagagtacctccttcatatgagaaagacggaagaaaagcagcatgagaatgtcctaaaaggaaagataccggaagtggtgggggcatcccacggtgacttggagaaggcaaaagagtagaagaaggtagacaatgaagaattttttgattatgaccaatgaagtgaaggaccccggttttgccgcatcgaaccggatcaaggaatatcttgaggcaaagggcgggacggccgtcttaagagaagattttacggaagatacccagacttactccaatattcccgatgatgcggaatgcgtgatcatcttggggggagacggaacgatgctgcatgcatcccggctgatcgcacctcatgaccttccagtggtgggagtcaatctgggtacccttggttttctgacagagatcgaaatgtcccatctctcagaaggtcttgacgatctgctcaatgaccggtttcatatcgaggagaggatgatgctggagggatgtattttccacagggatatttcctgttaccggctttccgccctcaacgacattgtgatcaccaggagcggtttttccaggattatttcgtttaagatcattgtcaacggtgagctcttggatgtgtatgctgcggacggtgtgatcatttccacacctaccggatccacgggatacaacctctcggccgggggacccatagtcaatccggaggcgaatgtcatactgattactccggtatgtccgcattctttgcaggcaaagagtattgtgctgggagaatgggataccattgagatccatatacagaaggtgcgcaaaacacagcttgaggaggctctggtcacctttgacgggcaggtggcagaacgtctgaaccctggcgatatcataaagatcaacaagtcccggaaggtggcgaaggttgtcaaagtacaagaaagaagtttttatcatacactccgtgcgaaagttggtggaaaagcatgaaaaaaaagagacagcaggcaatcattgaactgatcgccaaaaggcctatcgagacccaggaggaactgacgaaccgtctgaatgaacagggctttaaaacgacccaggcgacggtctccagggatatcagagaacttgagctgactaaaatcccgcttccggacggaagacaggcatatgggctgctggccgccagggaaaaagaagtagcaaagtcctaccagcggattctaaatgacgctattgtttctatggagacagcgggaaatcttctggtcattaaaacggcggcaggtatggcgatggcctgtgccgctgctctggatgatttggatcttccagggcttttgggatccatcgcaggggatgacacaattttctgtgcggtcagagagcaggaaaaaggcagcgatatcatcggagagattcgtctgatgatggaaagcacaagtgataagtaggtgaactatgttacagagtctgcatgttaaaaatttagctttaattgatgagatagagattcattttgatgagcatttaaatattctgaccggtgagacaggtgcggggaagtccattatcatcggctctattgagagcgctcttgggaagaaggtttccagggatatgatcaggcctggggaaaaagaggccctgatcgaactcttattctatacagaggatgatgatatcctcagggatctaaaagagaaagatctgcctgcagaagacggcatgatcctgatcaaaagggtgatctcagaaaaacgcagcgtcaaccgtatcaacgactgtatggtcacattgaaaacacttcaggaggtttcagaaaggctcatgaaccttcacggacagcaggagcaccagacacttttaaatgaaaaaaatcacaaatcgattttagaccattttttaagccaaaatgggaaacaatatgtaaaagatacaaaaacgtcttttggacaccttcagaagcttcagaagcgcaagagtgagtttgcggtagatgaagcccagagactccgggagatgagctttttaaaccatgagattcaggaaattgaggatgcgcatctcgttaaaaatgaagatgaagctctggatgagcactatcagaggatggtacacagccaggagatcatggaaggcatgaaaagtgcttatgagtgtactgggaatgaaacagaagtgtcggtgggaacgctgctctccacagccttaaaggaccttcagggtattgtgaatctggatccggcacttggagattcctatgaacagcttcttcaggcggaagacatcatcaatggatttaaccagcaggtttcagaatatatgtcatccatggaatttgatgccgaagagtttgcccgcacagaggagaggcttaacctggtcaacagcctgaaggacaagtacggcaggaccattgaggatgtgttaagctaccagtataaggctcaggagaagcttttaacttacgaacattacgaggaggaaaaggagctgctcctgaaacagatcgcccaggcagaaaaggagttttatgaaaaggccggaaaactgtcaaaagagcgcagaaaggccgcaaagattttggaacagcagatttttaaggctctctcagatctcaattttctctctgttaagttccagatcaaggtttcaccttctgagacggccaatgctgacggagtagatcaggtaacttttttgatctctaccaatccgggccttccggtgcggcctatggcagaagtggcatccggaggtgaactctctaggatcatgctggctgtcaaatccgttcttgcggatgtggatcaggtgggaacgttgatttttgacgaaatcgacacggggatcagcggagagacggcaaataaggttgccaggaagatggcagtcattgcgaaggaccatcaggtattagccattacccatctgccgcagattgcggccatggcagacgctcactattatattgagaagtatgccgataaaacaaagaccaccaccaccatacaaagactttccgaagaggattccctgagggaattaggacggatgatcaacggcgatgatctcacggaagccgttttaaaaaactcaaaagaaatgaaaagtttagcaaatgacgcaaaattatactgagtgcttttcttaggtttcagacataataaaaaggatgtatcgcataaaagcatacgtccttttttaaatcatttatgatttaatctgtttaggaggaaaccatgagaaaatactactaccgcaaacttctcattgctctgtttgtcataaacatcgtaggaatctgtgccgtttatttcaaatactgcagaaatgtactgcccaatgccattgagctgaccatgggagaaaaagcatgtctaaagtatgacgtgccggcggttgggatggtcaaggatcaaaagatcaagctaaaccaaccgtttgttctgacgaaggactccgttggacaggatgagatcaaagcaaagctgtttggaaccattccgttaaaagacattaaggtgaatgttgtcaaacaaaaaacactggtgcccagcggaaagatcgtaggtatctatgtggagacaaatgggatccttgtattggaaacagatatgatcacaggcgtagacggaggcaaccatactccgagcgcaaataagctgtatcaaggtgattatattctgtcagtcaatggatcaaaggttgagacaaaggttgattttatgaaaaaaatcaatgaatgtaatggtaaggaagtcactctgcaagtgatccgaaaccataaaaaaaccaagatcaaggtgcagcctgtccagtctgtcaccgacagtcaatataagatcggagcctgggtcagggataacacccaggggatcggaactatgacctacgtggcaggaaatgagtttggaggcctggggcacgggatctgcgacatggacaccggaaaactgatggatatcaaaggcggatacctgctcactccgcagatcgatacgatccagaagggaaaatccggctccccgggagagattgtcggaagcatttattacaaggaggcgaacctgctgggaacgatccgcaaaaataccaaatatggaatttacggaactacccagtcggataaaaaagacaaagcctaccgtatcggttataagcagtcagtaaagactggaaaagcgcagatcataagctgtatcagcggtaagagggagacctatgatattgagatcaaaagtgtggatcaatccaaccatgatgtactaaaggggatggagattgagattacagatccaaagctgttaaaacagaccaatggtatcgttcaaggtatgagcggaactcctatcattcagaacaaccacattataggtgctgtgacccatgtctttgtggacgattcgacaaaagggtacgcaacctttattgaaaatatgctaaattcctctaaataagatgattttgttgttatttacaaagaacttgcgaaggataaggggtgtttgtaaagtttgcaaaaatatataattatattgtaaataaaaacagaatcggaggacttaacatgagcaaaattaatgtggcaatcgcggatgataatcagaaaatggtcagtatgatgactcagcttttaaacttagatcaggatatcgaggtcatcggaagtgcaggcaacggtgaagcagccgtggagattatcaaagagaaaaagccggacgttgttcttctggacattatcatgccgaagcttgacggaattggggtattggaaaagcttcgtgatgagcgactggaaaaacagccgacggtgattatggtgactgccatgggacaggagagtgttgccgaggaagcaatggagctgggagcatcttactttatcttgaaaccatttgattcggaaatggtaatccgaaaaataaaacaagcaaaattagacaaaaaagtacagaagccttttgtcgcattaaagaaccaggaagggctaaataaaaaccagctggaaatcattatcacaaatattatccatgaaataggtgtgccggctcatattaagggctaccaatatttaagagattccattatgctggccatctacgacatggatattctaaactcaataaccaaacaactatatccaacaatagcgaaacagtttggtactacatctagtagagtggaaagagcaatccgccacgctattgaggtggcctggggccgtggaaaaatggatacgatcgatgctttgtttggatatacggttcatgcgggaaaagggaaaccgacaaattcagaatttattgcactgattgctgataaaatcagacttgagtatggagatcgaatcgtgtcgcaaaaaatgtctgaaaatgatggaagatagtaaatattgtttgattatgcgattgacaaaggggaatatgcttgatatatttctctcttagaatggttagatttggatggaggggtatacataatgtatgataaacggaaaattttgatagctgtcagcagtcaaaatgaggctaaggaactttgcagagaaatggaaaatgaaatgcaggtagtgggagttgcctatgacggtgcctccgcagttaagctaattaaggaacaagagcctgatgtagtagtgattgatatcgtcctcccggttttagatggactgggtgtgattgaacagtgcaacggtaccatagccgatgacaaaataccttcttttattgcaataacctccataggaaaccagagactgatcgaatgtatcagccttatgggtgtagactactgcatgatgaagccgtttcatacaaatgtgttaattgacaggatcaatcaaatgatgagaatgaaaagggtgaacaacaattacccaaagacatttgaggtaaaaagtgaacccgctcaaaagacgtttacggaatatgatattcaaaaagatgtgacaaagatcatcagggatcttgggattcctgcacatataaaaggctatcaatatatcagggaaggcatcataatggcgatccatgatgttaacatgatgaattacataacaaaactattatacccaaccatagctcaaaaatataaaacaacttccagcagtgtggaaagagccatccgccatgccatcgaagtggcttggagcagaggaaagatcgaactgctggaagaaatgtttggatatacgatcagtgccggcaaaggaaagccgacaaattctgaattcatagcactcattgcggataaactcagactggaatatcatatgaatgcctcttgattcagtagaaaaccgccagaatgctatttcggttacaattctttgatgcctgaaatatcaggaatgcacatcattgaataattagtatggtaaatgacaaatccaggctttgctttcggcggtttttttaattcttttctctggatataatcaatttccacttttggagcctgacggccgctggaataaaaagcggcaagccggccggcttcttcaaaagtagcatccggcagagtatccgcctgttcctttttgactatgacgtgtgatcctggcatattttttgcatggaaccaccagtctcctccgttagcaaacttaaaggtcaattcatcgttttgataattatttttgcctacgtacatatgaaagccgtcagaagatacaaagtggagaggtttcgatttggctggtttttttaccccttttgaaccccgttttttcaagtagccgtaatctgagagttcctgcttgatggatgcaagatcctgttcattctctgcaagggtaagagaagacgcaatcgattccagatgcatcaagtcatcctttgtctccactgtaagctcggagagagcctcaaaggtccttttcagtttgttatatttggtaaagtatttctgtgcattctcctgaggagttttcgcaggatcaagagggatcgtgatttcctcgttggtgtaatagttcaggcacgtgagggatttggattcaggctcaagcccgtatccatatgcctggatcaattctccatatattttgtatttatctcttttttctgtatcgagaagctgttttctctgcagatcatatttcttgctcgtacgttccatagaagtctggacgatttttctcagatccgcagacttctgtttcattcttgtatacttttctttttctgaataatagctgactaaaacatcgctaatggaaggaaatatcttcacgtcataagatgtctcataggatgtcataggaaaacaggaaaattcttttggttctccattctgataaataatatttggcacatattcgtgcttttccacagcaagagccagtttcttaagctgagcgtaaaggtcagagcactgatcttgtgtcagagcatctgtgggctggtttccgtccactccggcgcggtaacagatctcgtttgccaaaaatgaactcatgcctgtgatggaagaataaagagccttccccatggacaccggttttggtttgatatcgctgaggaaatcctccagagtcagagactcaatatcctttttatgctgcgttggaggagtacagtactccattcccggcagaacttcccgcttggaactcatattggcccccacgtgccggatgctgtctaggatcattccgtcctgtcctacaaagattaaattgctgtgtttgcccatcaattcaatgatcaatttttttcgacatacatcgcctagttcatccagatgttccacggtgatctcaatgatccgctcatagcccggctgttctacagaaatgatccggccattgctcagatgctttctcaaaagcatacagaaattgggggcctggatgggattttgtttgccctgtcctgacagatacacgatcggcaggctgggactagcggagagatgtagccttaaagtctcacggttctgtttgatcacaagggtgatctcatcagcctcaggctggtatatcttatagattcttccgtttaaaatcttttcgtttaattcatttacaatatttgaaatgacaaatccgtcaaatgccatagttgcacctccattttttagacactcgtattatagcacgtcgcaccttgttttggttgattttttgctggcaaagcaggtataatggaaaggtaatttgcagaatatggaggaccgagtcaatgatagatgaacaaaacaaaacatggtcagaccgcaggcatctgatgtggtggccgattacctttacaaaatacagggttgagaaccaaagattatatacggagacgggacttttgtcaacacatgaggaggaatgcctgttatacaggatcatggatgtatcctatgagaggagcttcggcaaccgcgtgttcggtaccggtactatccgccttacgaccaaggatgcctctactccggtcattgaactcaagaatattgcggattccagaagggtcaaggatctgttgagccagtggatcgaggaggaacgcatcgccaaacgggtggtgggacgtgacatgtacggcgcaagcagccacatggatgatgatatgccggatagagatatgtaaaacaaatgctgccactgtggagagaaatttctgcggtggttctgtcatatatcagcactgaaaaggttgacaactaaaggatagactggtatgattactaaagtgtttaatgtggtagcgaattagcgctttaatttgttaaagtaaagaaggagaagaattatgaatcagaagagggtccatacgccggaaggagtaagggatatatacggattggaatgcaaaaagagactcaggttaaaggacaaattaaaccatgtatttggactttacggctatgagaatatcataactccgacttttgaattttttgatatttttaacagcgagaagggaacagtttcttccaaagagatgtacaaatttttcgaccgggaggggaacaccctggtacttcgcccggatatcacgccttctgtggcgcgctgtgtagcaaagtactatgacagtgaggagcggaatctgcggtttgcctatacgggaaatgttttcttaaacaactccagctatcagctgaagcttaaggagacctgccagatgggcgcggagctgatcaatgagacatccagccgcggggatggggagatcattgctatggccttggattgctgcctcaatgctggacttaaggacttccgcctgaccatcggacaggtagagtattttcaggggcttgtggagtgcattggggatgaagacgtgaaagaacagctgagagagctgattatcaacaaaaacttctttgggctgatcgaatttgtggaggggcttgacattcctcaaaatataaaggatgtgtttgtccagttcaatgaactgaatggtgatgtggatatccttgataaggctgacgcgcttgtgtccaacgagacttcaaagaaagccatccagaagctgaggaaggtataccggatgctggaaatctacggactggaacagtacataagctttgatctggggatgctcagccgccataattactacaccggggtgatttttaaagcctacacttacggaacgggagatgcggtgttaaaaggcggacgttacgacaacctgatcgaacagtttggcaaaaaggcaccgtccgttggatttgccattgtactcgataatctgatgatggctatggagcgccagaagatcgaaatggaggctgataccgcggatatgctgatcatctatgaggaagatgccatggaagccgccattcctgctgctgtgggctacaggaaggaaaacaagacagtcatattggaaaaacgggaccggggccttgaagagtatcaggctatggctttggaccagtctatcggatgtattttatattatgaaaccagggataccgtcagggatttaacgaaagggcagtaacatgagatatataacatttgcactggcaaaaggaagacttgccaagaaaacattatctttgctggaacagatagggatcacctgcgaagagatgaaggacgaaaaaacaagaaaactgatctttgtaaatgaggagctgaagcttaagtttttcctttccaaagccagtgatgtgccgacttatgtggaatatggcgcggctgatatcggagtggtcggaaaggatacgatactggaggaaggccggaatctttatgaggtactggaccttggattcggcaaatgcaagatgtgcgtgtgcggacctaaggacgccaaaaagtatttaaacggcagccagctgatccgtgtggcatccaaatatccgaatatcgcaaaagaatatttttataacaaaaaactccagaccgtggagattgtaaaactcaacggatctgtggagcttgcgccgatcgtaggcctttcagaagtcattgtggatattgtggagacaggatctactttaagggaaaacgggctggaagtgttggaagagatctgtccgctctctgccaggatggtcgtgaaccaggtgagccagagaatggagcaggagcgcatcagtaagattgtcattgagttgaaaaagttattggacgagaaaaaacagaggtaaggctatgagaacggtaaagatcaacaaagattccattgcagacattttgaatgatctgctgaaaagaagcccgaatcactacgagggatatcaggaacaggtggatgctattgtcaatgacgtaaaggcaagaggcgatgaggcggtgtttgagtacaccgagaagttcgacgggaccaagcttacagctgacacgatcctggtcacggaagaggagatcagagaagcttatgacaaagtggatccgtctcttttagcggttataagaaaggccattgtcaatatccgtgatttccaccagaagcagaaacagaacagctggttcgatacacaggaaaacggtattctgttgggacagaaggtgacgccccttgcaacctgcggtgtctatgtaccgggaggaaaagcagtttatccttcctctgtcctcatgaatattgttccggcccatgtggcaggagtaaaagagatcatcatggtcacacctccgggcagagacggaaaagtgaatccgaataccttggttgcagcaaaggaagcaggggcagcgaaggtatataaagtcggaggggcccaggctgtggcggcattggctttcggaaccgcctccatcccaaaggtggataagatcgtgggaccgggaaatatttatgtggcgctggccaaaaaagcggtgtacggcaacgtgagcatcgactccatcgcaggaccgagcgagatcctggtgctggctgatgacagcgccaatccgcggtatgtggcagcggatcttttatcccaggcagaacatgacgagatggccagtgccatcttggtgactacaagcgaaaagcttgccaagaaggtttcgaaagaagtggatggtttcctaaaacagctttccagaacggagatcatggaaaaatccctggactccttcggctatattctcatcgccaaggatctaaaagaggcagtggatgtggcaaattctatcgcatcggagcatttagagatcatgacagaaaacccgtttgatgttatgaccagaatccagaatgcgggggcaatcttcatcgggcagtacagctgcgaaccgctgggagattattttgctggaccaaaccacgtacttcccaccaacggaactgcaaaattcttctctccgctgagtgtggatgattttatcaaaaaatctagtgtaatctattactccagagaagccctggagccggtccacacagatattgaaacatttgcagaacaggaagagttgacagctcatgccaattctattaaagtgagatttgaaaacgattaagagaaaggaagcaatatgagccgcagtgcagaaattatccggaatacaagtgaaacaaagatcaggctgtccatcgatctggacgggcgaggagcctctgaggtagatacaggcatcggtttttttgaccacatgctcatcagctttgccaagcacggttttttcgacctgaaggtaaaagtggatggcgacctgcatgtagacagccaccacactatagaagataccggaattgttctcggtgaggccatcaagcaggcagccggcgacaaaaaaggaattaaaagatacggctcctttgtcctgccgatggatgagactcttgtgctgtgcggtctagatctgtcaggacgaccttactttgacacggatcttacctttacggcagacagggtcggtggatttgatactgaaatggtacgggagtttttctatgccgtatcctatgccagtgccatgaatctgcatatcaggaaattggccggtaccaacaaccatcatttgatggaggcggcgttcaaggcattcgctaaggcgttggatgaggcatgcagcatcgacccgcggatcacagatgtgctttccacgaaaggggcattataaatggaagaacagataaaaattatcccatgtatttatggggaagaactttcaaaggcggcaaaggcttacgaccatgcgggggcggacgctgtcagctattatgacacaaagatcacggcggagaccgtaaaagagatcgccaaggacatagatattcctctgtatgcagggggaggcatagaggatctggaagacgtaaaaaagatcctgtacgcaggagcttctaaggtctgccttggaaagagtgttctcgtggacaaagagatcgtaaagaaggccagtgaccgatttggaaaggaccaaatcatcgtgtccatagatctggatacccaaaaagacgcagcggcatttgcaaaagagatggcaaggctcggggcaggagaactgctgctggtgacagataagggatatgatggttatgcagagctgattgggcagatcaaagaggtatccgggcttccaatcatggtgagtattcctgatgctaaagaagcagtcagggtattaaagcttaccggggctcatgacctggcggtggcgtccgtagattcttttcctgtcatggaactgaagcatcaatgtaaagctgctggattcgcagtcaatacttttgaaagttctatgagctttgatgaatttaaattaaacagtgatggaatgctaacggtagttacccaggattataagaccaatgaagtgctcatggttgcttatatgacaaaggaagcgtatgaaaaaactgtggagaccggggtcatgacctattacagccgcagcaggaacgaactttggacgaagggagatacctcaggacattatcagtacgtgaagtctttgactattgactgcgatagagataccctgttagccaaggtagagcaagtgggaaatgcctgtcataccggaaattattcctgctttttcacggatcttgtgaagaaggaatacaaagatgacaatccgatggaagtattccagtctgtctatgatgtgatcatggaccgcaaggaacatccgaaggaaggctcctataccaattatttgtttgaaaaaggaattgataagatccttaaaaaggtcggtgaggaagccacggagatcgtcattgcggctaaaaatcccgatgtggaagaaatgaagtatgaaatatctgatttcttataccatctgatggtgcttatggcggaacggggcatgacctgggacgaggtgaccaaggaattaattgaaagaaaataattgtcatacgctgtccgatttgatataattgccacatgagcaaaccaaagaactgtggtttgataaaggaggcaggacatgcacgcatatttatcagagtttatcacatatctgatcaagtttatttttttgcttgctgtatcggtaggcggtgtttttttcggaaagaagctggctgtcggtaagatgcagaagaagtcgcagaaagcaaaggaacaacagggaccggatcagcaatagatgtgtaagatagaatggaaagccttctgaatgtaacagaaggttttctttattccataggaaagttctccctatggaacaaaaaagccctccgggcatgatgcgcacgatgtgccaaggaaggctgctttgcagccgcacatcggcgcgcaaagcggaacaagtccctcgtgattgagggattgagggagttgaagcggacttgtccgctttgttcaatgtaataagtgtaatactaattttaggaggatggaaatttgaaggcatatggagtgaacgaattgaggaagatgttccttgatttttttgagagcaaagggcatttggtgatgaagagtttttctctggttcccaaaaacgataagagccttctgctgatcaatgcaggtatggcaccgttaaagccgtattttaccggacaggaagtgccgccgaagaccagagtcgcaacctgtcagaaatgtatccgtaccggagatatcgagaatgtaggaaagactgcaagacacggtaccttttttgagatgctcggaaacttttctttcggggattattttaagactgaggcaatccgctggtcatgggagttcctcacagaagttgtaggacttgatccagaccgtctgtatccttctgtatatctggatgatgacgaggcatttgagatctgggaaaaagaaattggcattgccccggagaggatcttccgctttggaaaagaggacaacttctgggagcatggagcaggaccctgcgggccatgttcagagatctactatgacagaggagagaagtacggatgcggaagtccggactgtacggtaggctgcaaatgcgaccgctacatggaagtgtggaacaacgtatttactcagtttgaaaacgatggaaacggcaattatgaagagctggaaaataaaaatattgatactggaatgggtctagagcgtctggctgttgtagtccaggaagtggattcaatctttgacgtggacacaatcaaagcgatccgtgacaagatctgtgaactggcgggtgcgacttacggtgcggatgaaaaaaatgatatttccatccgggtcatcacagaccatatccgttctgcgtcatttatgatctctgatggggtcatgccatccaacgaagggcgcggatatgtgctccgccgtctgatccgccgtgcggcaagacatggaagaatgttaggcttgaaggatctgtttttggcgggcttaagcaaaactgtgattgcggaatctaaagacggatatccagaactaaaagaaaaagaagaatttatctataaggttctcacaaaagaggaagaacagtttaaccgtactatcgaccagggactccagattcttgccgagatggaagaagacatggaaaagaaagggaagaagcaactggaaggaaaggatgcttttaagctctatgacacatacggattcccactggatctgacaaaagagatccttgaggaaaaaggtgtctccgtagatgaagacggattccaggaagctatggaacagcagagaaagcaggccagggcagcaagggagacgacaaactatatgggagccagtgctacggtatacgaacagctggatccatctatgacatctgagtttgtagggtatgacacgctgacctgtgagtctgagatcattgccatgacaacggacaaggaagtgacggatactctggtggaaggccagaggggaaccattatctgctctaagacaccgttttatgctaccagcggtggccaggaagcggaccagggtgtcatattaagcgagaattcctcttttgccgtagaagatgtcataaagctttccggaggaaagttcgggcatgtgggttatgtcaacgaaggaaatttaagtgtcggtgaaaaagttctcttaaatgtcaacgaaagaaaccggcgtcagacagaaaagaaccacagtgcaacccatcttttgcagaaggctctgcgcactgtcttgggaagccatgtggagcaggcaggttccagtaacaatgcgaagcatttaagattcgactttactcatttctctccgatgacaccggaagagattaaaaaggtggaggatatcgtcaacgaagagattgccgcaaacctggccgtggatacaaagctgatgtctatggatgaggctaaaaatacaggagctatggcattgtttggtgaaaaatacggagacgaagtaagggttgtctccatgggagacttctcagtggaactttgcggaggtactcatgtacctaatacaggcgcgatcactgcatttaagattctatcagagaccggtgtggctgcaggagtcagaaggattgaagcgattacagacaaggcagtttttgaatattatgagaaaatggagcaggaacttttagaggctgcaaagatcgtaaaagcagctcctgcaaaactgatgtcacgtctggaagctttgatggcggaactgaaagaactgcacagtgagaacgagtctttaaagagcaagctggcaaaggatgcacttggggatgttatggatcaggtgcaggaagtgaacggagtgaagcttctggcagcaaaagtggcggacgtggatatgaacggtctgcgtgaactgggcgattccctgaaagacaagcttggggaaggtgtgatcgttctggcatcctccatgggaggaaaggtgttccttgtggctatggccacagccggagcccagaaagccggagcccatgcgggtaatctgatcaagggcatcgccggatgtgtcggcggaggcggaggcggccgtccgaatatggcgcaggcaggcggaaagaagccggaaggtattgatgaggctattgctaaggtgaaggaagaactggaagggcaacttagtaattaaataaagaaatgaattattgagaaagattcatagacgagcagaattattgctgtctatgaatcttttttctctaacataaaatatatagttgattattttatactaatagttgactttataaaagattaaatatttaaataattaaaaaagaagttgaatatatgtagagaaagagttataattaagaaaaataacaataaattccataaataaaaaataaaggtggtgatagtttgaatgttttaattcaatttaatcatgtagtttgagcaatatatgtttaagggcaatacgaggaggtacggggatgaaaaaaaacaaattaatgttaagtacatttttgggattatgtttgttggcaatagtgctatttgggattagtaatagcaatataaaggcaaaaaagctttctaataaacaacaaataaaaaacattgtaaaccattattttacagatttttatgattccttagttacttataagcttccggcaaataccgaagattatattgaaaataatgagaacacttatctctacaaaaaaatactggaatttgattcaaaaagcagtaaaaatattggttctggttttcatgattacaaattgaaaactaaatataagaaattaaaaatttttaagaacaaggcagaggttaaacttttattgacagttgattatcattataaggaagcaaaagatatggattctgcttattataatattaaatatgactttaaactaaacaaaaaagatggaaaatggaagatttattttatagatactaacaatgagaattatgagtattttaaaagtgaagttcagcaaaggaaaaaagtattaaaaagaatcaaaaccagaagtaacgcagatccagtacgtcaaagtatcgaccagacctgcgaagaaatgacagattcatcagaaacgcaaaatgaagaattgaagaatcttacggagactgtagatgaaaatcgacagacaccggaatttcgctctgtttccaaatcatattcatggaaaaacggaattgattatgcgttaacatatgctgaaaaaaagcgtattttctatgtggtcccgaatgaaaatgactgcactaattttatttcacagtgtgtatgggcaggatacggaggatatgtgaaaggggacaagaaaaagacaaaaagtaatatgaaaaataaagttcgtatggtatcgggagtttggcaaggaggagaaggcggaggaactggaaattgggaaagtgtaaaatcgttttggagttatgctatcaaagataaaacctatggaccaaaagggaaaggatataacaataataaacttgtaagaacattgactaatataagctttggagatgtaattcaaagcaaaaacaataagacaaaaaatgattacaaacatagtgcatatgtgtcttcaattgaaaaacggttaacttatgttagccaacataatagaagaaggcgatcattatccagttggataaactataatggaggtccaggaaagtgttatatgcgaagaatacacttttcaagtgctaaatttagtaaatagatttatgaataggagaagaattatgaaaaaaacaaccaaagtaagcactctactcttgtttattatgatatgtttcttatgtcaaggctgtacaaaaaaagagaataaggttaagaacaacaataaaattttaaagttaagtgtccatgaagaaaagaagttaatcaaggatgctgaaaagcggctaaaaaatgacatgaatgagactttaaaagaggttaaatatgatcccgagtattataaaaagattaattataaatccagagatcaattcataaaagagattgtaagtgaaaaatttcaaaagaagtattcaacagatcagattgtcatactacaagcctattataaagacactggagaagtagattctatgatctatgggaaggattctaaaactggcacgtggaaatatttacaacgatttcgttaaggtcaaaacaagttgaatcaatgatatatagggaaagggaggtgaagttcttaaaaggtttaattaatatttgttgatttatggtataataaagccaacaagtactttataaatcaactctggacttcagtccgctggattcaaaagaaggaggactttatgcttcgaaaaaagaacttaatctatcaggggcgatccgtaaagaagtttaatgagattagggatcttttggatatctatcgcgtaaaatatacatatcaggtgaaggatacagttaacgatgctggaagtgactctctgctttcttttttaggacggcagcagggaatggcacccagagccttcaccggaagcgctggaatttctggggaagatttaaaaaattatatgatctacgcatatgagactgacattgaggagaaggtgctcaaaagcctgtgggaagaagtttgtcaggatgtttagatatcagaaaagaaatctcttttttcagtggaaacatcatttttactattgacgaatatccgaattatggtataataatctagtgcaagaaagtgcccaaacagtcataatgcacaatataaggctggaggggaggtcaggaattaagaatgtcaaacgttattgttaaagaaaatgaatctttagacagcgctcttcgcagatttaagagaaactgtgccaaagcaggtattcagcaggaaatccgcaaaagagagcattacgaaaaaccgagtgttcgtcgtaagaaaaagtctgaagcggctcgtaaaagaaaagtaaaataatagaagcaagcatcgtatacttgaggtatacggtgcttttcttttgcatatattaaaacaacgatagaatgctttagtgtgcggctgcgccaaaaagcatagtgagggtcagtatgaagaaaaagccaaaggaggcattagccaaaggtttatcccttccaagagatgtggtctttggcgattttattattaccttgacaggcaatgaacaggtgatgattgaaaattataagggaatcctatcttacgaagagaatcagattgtcgtccagggaaaccatgtggttttgaggattgtagggacaaatctcgtcattcaatattattccatggaaattatgaaggtgaccggtgaaattacacggctggaatacgcataaaggagaatcagaatggtcagattaatacaatatttttttggaagcatctttttagagatttcgggtccctccgtggaacgttttttaaacctgtgtgcaaagcaaaacctcgtgttgtggaagttgaaaccaggagggaagggatatcagtgttcgatacaaaagagagcctatgaaactgttttgacactggcagaaaaaactggaactacggttcagattctggggagaaaagggcttcccttttttttattgcagcaccggaagagaaaaatgttcttcttcggtatcgggatggccttagttttgatgtttttaatgtcacagttcatctgggagattacgatttctggaaatgagcgttattcaaaaagtgatatgctgaaatatgtaagaaacaatttttatcagattggcacctttaagaaaaagattgactgcaatcttttggaagaacatatcagggaggaccacgaaggaattgcttgggtatcctgctccatcaacggtaccagattacatattgatatcaaagaatcgctggacagaaagaccaaacagaatccgaagaagccatgtgatattgtctccaataaaaaagggaccataacagccatgtcggtgaaaagcggtacaccgctggttcaggtaggagataaagtaaaaataggtgatacgctgatatccggaatgatctactattacagcgatgattatcaggtgacggaaaccagcaagatcaaggcggacggacagattattctgagaaccaatgaggaatataaagagaccataccaatcgctacctatgagaagaaatttgtatcaaaaagtaccagggtggaaagtatacagctgttaaactggcagttaaagcttccaattaaagaacaaaaaggcgattttgatgtacttggagaaaaaaagctgttgcacatcggagatctttattttccaatcggcattactacaaagaagtttgaagggtatgagcccgaacgcagggtgttgacagaggcccaggcccagagtcggttaaaaaaacgtcttgcctcttatctggagaagaaaaagaaaaaaggaatcaaagtcataaagaccaatatccagtatcagagacagggaaacgattacattgccaagggaaccatccaggtggaggaaccggtgggaaagatcagaaacatcaagtcactgacaaaaaaacaggtggagaagattacaccaacaacagcaactccgcgctgattctgtcagacaggtgaccacaaattgttgaaaagatttaaggcaaatggtaaactactagtaatataagaaaataataggttgaggagaaactatgaatccgatagaaatagatgtggaattcccttctgaacatggagggaatgtatttggacagtttgatgtttacatgaagaagattgaaaaaacgcttcatgtaaaccttatcttaagagacgggcagcttaaagtggtcggcagcgaagaagcggtgaaaaaggcacagtccgtgattggagagcttttggagctatcccgaagaggcaatattattacagagcagaatgtcaattatgccttatctctttccatggaggaaaaaagcggccatctgctggaattggataaagatgtgatctgtcacactgttcaggggaaaccggtaaaggcaaagaccctgggacagaaaaaatacttggagcagatctcagaaaagatgatcacgttcgggattgggccggcaggaactggaaagacctacttagccatggccatggcgatcacggcgtttaaaaatgatgaggtaaaccggatcattttgaccagaccggccatagaggcaggcgaaaagctgggatttttgcctggggatctgcagagcaaggttgatccgtatttaaggccactctatgatgctctctatgagatcatgggagcggaaacttttatgaagaatatggagaaagggctgatcgaagttgcaccgctggcctatatgagaggtagaaccctggataattcctatatcgtgctggatgaagcgcagaatacgacaccggcccagatgaaaatgtttctcacaagaatcggatttggctcaaaagctatcatcaccggggatctgacacagaaggatctgccgtttgacagtgtatccggtctagaagaatcggtgagagtgctcggaaagattccggatatcgggatctgccggctgaccagcaaggacgtggtacgccatcctcttgtacagcagattgtcactgcttatgaaaaatatgaagagagcaaaaaccggaagaagaaagagaaagccccgcggaaacgaacgaaagataggtaagattatgagtgtttttttagaaaatgagtacgaaggaacagcggatatagattgtgaaatgattgcccggcaggtgatcgaggctgctgtggattatgtaacatgtccttttgagtgtgaagtaaatttgatgcttgtagggaatgaagagattcatcaaatcaatctggagcagagggggattgatcgtcctacggatgtcctttcgtttccgatgatcgagtatgaaaaacctgcatgctttgatggtttagaggaagatttggctgcttttcatccggactcaggtgaactgatgctgggtgacattgtgatttccatggacaaggctaaagagcaggcagatgcttatggacacagcttaaagagagaatatgcttttttgatcgcccacagtatgctccatctgtttggctatgaccacatggaggagaaggaacgtgcggtgatggaacaaaaacaggaagagatcttgcagcaggtccactacacgagagattagaggtaactatggggaaaaaacaaaagagcagttttttagtacaaggaaccattttagcagcagcttcattgatctgccgcgtcatcggccttttataccgcagacccttaaccgccattatcggcaacgagggtatggggtactatgggtttgcgtataacgtttacagcattatcctgctgatcgcatccttcagcataccgctggcagtttcaaaatcaatagccgcaaggcttgccatgaaagaatataaaaatgcccagagggttttccatggagctttagtatatgtagtgatcgtcggagggggcgctggcctgatcactttttttggtgcaccggcatttcttccgaatcagccaggtgctgttcttgctttaagaacgatggcaccgaccatttttttatctggtattctgggtgttttaagaggctactttcagggacattctacaatggtgcccacttctgtatcacagatattggaacagattttgaatgctattttcagtgttctcatggcttatgttctggtagcaccatatgtaggcatcagcggaaaggtagccacatataagctggccaaatatggagctgcgggaagtgccataggtacaggagttggagttcttacagggctgcttttctgcggtattatctattgggtctaccggccaaaggtaaagcgtcaaatagctgcggataagacaaagaagatagagtcttatcagagaatattaaaaattttattgctgacgattactccggttattttcagcacggcaatatataactgcagcgcgatcattgactctaccttgtttagtacgattatggtcaacaaaggcatggcgtccaggtcagtggctgctttgttcggcattttttcaaaccagtataatgttttgatcaatgtgccagttgctatcgcctctgcgttatccaatgccattgtaccggatattgcaggagcatacgcagtcaatgataagcagcggatgaatgaaagtatcaatatggccataaaatttacgatgatcatttccatcccttgtgccgtgggcatgggcgttcttgcaaaaccgattgtcggccttctatttggtcctgctaaagcatttggacttggtccgaagctgctgatggttggtgcggtctccattgtattttactgtctttctacactcagcaatggaatattacaggggatgggcaagatgaaagtgccggtccgacattcggcagtatctgtagtgatcaatgtttttgttttgatcgttttgctttatacaacgaaggtggatacttatgctttagtatttgctactatggcattttcgtttgtcatgtgtatcttgaatgcccgttccattaaaaaatatactggatatgaacaggaagtgtccaagacatttataaaacctctgatcagtgctgttgcaatgggaattgtgatagggattataggatttgtttttcagagattcatgtcagggacaagtcttggctatgctttgtgtctgttgatagcagttcctcttggagcattggtatactttgttgctatcattggattaaaggtttttgaggaagaagaacttcagagagtaccaaaaggtcatttgatattaaaaatggcaaaaaaattgagattattatgagtttttctccattgttctcagtcggctctggaaaggcctccttccaacaatgaagaaaaactatcggccttctttcttgcgttatctttattgaggtacatggaaaggaggctttttgttcatttgggaggaactgacacatgctgaaatgttatgctttctgacgcaaaatgaatccttaaagatttttcaaaaagatgaattgtttctatctaacaacgtttgatataggaaatctgattatgctcataaataacaaaacaacagttttactataaattctctacattcaaatgagccttgatatgactgattaatgttaaaaaatacaagaaaaccgtagtgtaccaattataataaatatgaagtacgctacggttagtgttgaatttatagaccacgccttggacaatgacaattctgtttcttatcctgcgttaagacataaggaaatgagtatcgggacgaagaaagaacagataatgccgttcaaaacagacagcacgaccgtttcctcattcgtatattttaatatgacagggagcgtcgtatcttcactcgttgcaccagcaggagcgatacaggtaaaatgattgaaccgcaacgccagaaacggaatgatgaagaaagagaatatctccctcataaggttgctcataaaagcaatgcttcctaattccgctccttctaatttgctgattgttgcccctgcaaggctgtaccagcccagaccgcttgtaaccgcagtcgcatgacccgcaggcattttcaagattgctgaacagaacagtccgcccagaagcgagcctgcaataattcccgcagggataatgaaaatcttaatgtggtattccttgattttctgtatgataccgtcgtgcataccgatactgataccaacagaaaacatcagtatgtacaggacaatgtttgaatgttccgtaagaatggatatgagaacattgtccatatcagaacagccataagctatcccgaaagtcaaggaaagtatcgtcaaaaggactatcacagttcttcactcctttccgcagaaattcccctgtctttcttcataaacctttgtgtcagatagtagaccagaacgacagaaagcaaagtaggtatgaaaaagaacagaaagctcgttatccccagcgacgaaagttcttcaaagaaattctccttttctcccagcgtgacacccatagaaaagattaagacaaatgtgcatagcagggaaacagattcatttttctttttcaagcgtcgcaggaaagcaagcctgcctatcaaaatgccaatacacatgatgataagtatatccatattcaaaactcctttcgctaaaatttacacacttagacactatatcaaataattaagattccgtcatcatgttccaagaaatatcggcatttttgcggtacgaaatcattgatcgcctttaatgcgccagattagtcgtggacggcaaggctttctgtttcaatccgaaaatacacggacaaaacggtactgcttcataatcggactgcacagccctttgatttttctacaagctctttgtcgggtgaaaacaggaatatatccttgaccgcccgccatagaaccttcatgctttctaaacgatccgtgtctctttacaattttgataattaattataatctgtttgcttttctgctataatataagaaaaagcggaggatagggcatgaatcaaatattagaacagatgcagcaggaaaagaaactggtcagcttatatcactttgtcggaggcagggaaaagattttagaaggttacattctgtacataacagaacaagaacttctagcggcgaagatttcagaaagaggagaatacgacggttttattctggaacgaccggatcatttcttcagggcacagactgacggcagcagggagaggcggattggaacgctgtatctccacaagaaaagaagtcacgggaggattataaagaaggatcatcagtcctgtatggaggcacttttgagatatgccaaggaacagagactgctcgtgagtttttatatggatgaagacagaagatattccattctcggatccattctggatttcagcaagaattttgtcaaagtccaaaagattgataccgatggttttgaagacggttttgtgtatctggatattcagaaagtaatttcctgccgatgtgatacggcaaaagaacaggatattttgctgctgaatcatataaattgctaaatttgattttttttgaataggacggttgattttgggaacgcttaaggaaaaggagtgtttcgtatgaacaaaatcaaccgttttttattaatatatatggtggtcatcaccaccctctgtggatatatgtgttatgtagctttttatcagaaggatacaagccaggacaagctggtccatcaggttcagtctactattatcaaagaacagaccacaaaggagcaggcagccaccaataaaaaagaaaagatcacatatggtttggaagtacgcgatggcagtttggtcatcctcaacaatcagacaaaagaaatctttgaatatactgatttaaaaaagagtgatcttccagatgagatcaaacaaatgctcaaggagaaaaagaaatttcattctgtagaagaagtttatcatttccttgagtcttacagcagttagcactataatctaaggtagaagaaaaaattcattacaaatagattgaggtgaccggaatgaagagagtttttttaatcgtactggacagctttggcatcggggaagcgccggatgcaaaggatttcggagacgagggcagcaatacactgcgggcagtttccaaaagccagtactttgacctaccgaatctaagcaagctgggattgttttcgattgacggcgcagaaattgacggtgagaggcaggagatcattcctatcggcgcctatgggcggatgacagagcagtccaagggcaaggacaccaccattggccattgggagattgcgggaattatttccagacagccgctgcccgtctacccgaaaggatttccaaaagaggtgacagagctttttgaacaggagaccggaagaaagattttatgcaaccgtccttattctggcacagaggtgatcaaggattacggagatgagcatgtaaagacaggagcgctcatcgtatatacatcagcagacagtgtgtttcagatcgcagcccatgaagaagtggtgccgccagaggaattataccgatactgcaaaatagccagaaagattttgacaggcaagcatggcgtaggccgggtcattgcccgcccgtttgtcggcgaaagcggaaattacacaaggacatccaaccggcatgatttttctatcgaaccgccgagggtgaccatgctggatcaattaaaggaaaaaggcctaagtgtgatcgggatcggaaaaatccatgatattttcgcaggaaagggattgaccgagttttcgttttctaaaaataacgaagacggaatcgaacagacaaaagaatggatgaaaaaaaagtttgagggtctctgctttgtcaatcttgtggactttgatatgctctatggacatcgcaatgatgtggatggctatgcaaaagctctgacctattttgacaagcagcttccgaagctgattggacttatgcaggagggtgatatcctgatgataacagcagaccatggatgcgatccgtcgacaccgtccacagaccattccagggaatatacaccgtttcttatgtatcaccacggacagacaaaaggggtaaacttaaaaacgagaaaaacatttgcggatatcgggagcactgtgttagactattttggtatagaatcaaaattagacggaaccagtgttttggaggaaatagatgaaatatgatgtaatcatcgcaggaggcggagcatctggtatgacggcagctatcacagcggccggcagaggatgctccgtccttgtgctggaacggatggaaaaactggggaaaaagatcctggcaacaggcaacggacggtgcaatctgaccaacagctttctggaccaggactgttaccggggagaaaaaccgggctttccctattcgatgctggaacaattcggggtacctgaaaccctggatttttttcagtccatggggatgcttaccacggatttagacggttattactatcctgcatccatgcaggcatccacggtagttgacacattggccggtaagataaagagcctggatattgatgtgaaaacagaggctttagttgaggaaatcaaaaagattaaggatacattttatataaaaagcggaaaagaccagtaccagggcagaaacgtcatattggcagccggtggaatggcacaggagaagcttggaagcaacggaagtggctacggattggcaaaaagcctggggcatacagtgacggatctgtttcctgctctggtggcgctggagtctggagaaccattttttaaatatttggcaggggtccgcaatggatccagcctctctgtttatgtgaacggtcagaaaaaagtctcacaggagggagaggtccagtttaccaaatatggaatatcggggataccggtgtttcaggtcagcaggtacgctattgacgctctcagaaagaaaaagaaagtggagatcattttaaatctgatgccggaacagatcacattgaaggagatgatggaatatttccgtaaggtgggaagttacaagacggcggaggaatttcttcagggatttatgaataagaaattggcatttactgtgcttaaccgtctaaagatccgccctgaaaccagtgtaaaagaacttggacagaaggaactgagacagatccgcacgatgatacagaaatttacggttcctatttcggggtacaaagggtttgatatggcacaggtcactgcaggcggggtctctgtgaaagaagttatggagggaaccctggaatctaagatccacaggggactgtattttactggagagatcctggatgtggacggtacctgcggcggttacaatttacaatgggcttttacctcagggtacatagcgggaaatcagataaaggcgggaaatcaatgatcagaatcagtcagataaagcttccggcagtacacacaaaaaaacagctggaacagaagataaagaaggaagtacattacgcgcagtttcaaacctatgagatctttaaacgttctttggatgcgagaaaaaaagatcagatcagctatgtgtatacagttgacgtagaaatggagcgggagcaggagtttctgaaaagaaacaaaaattctaaaataacaaaagtagaaaagaaacagtatcatatcccggtgtgcaaaaaagaaatcccggcacgtcctgtggtgatcggcatggggccggccggattgtttgccgccctggtactggctgaagtcggattaaagccggtgcttgtggagcggggaaaacccgtggaggagcgtatgaaggatgtggatgccttttgggagaccggggtcctgaatcctgagtccaatgtccagttcggagaaggaggtgccggaaccttttctgacggtaagctgaataccgcagtgaaagataagtttgggcggaaccggtttgtgctggagaccttcgtaaagtacggagctccggaagaaatcttatatgacggaaagcctcatatcggtacggatctgctctgtaaagtggtggcaaatatgagagctgccatctgccatgcagggggagaggttttgtttgagagtaaggtgacggacatccggacagaggatcacagactgtctggcctggtcattaatggcgcagaattattggagtgtgaagcggcagtgctcgcggtggggcacagcgccagggataccttcgaaatgctgtatgacagaaaactttttatgactccaaagtcctttgccatcggcgtgcgggtggagcatccgagacaaaggatcgacgaatcccagtatggaaaagcggcagagagcgggaaactgcccacagcgtcatataaattaacgtaccgggcatccaatggaagaagcgtttattccttctgcatgtgtccgggaggatttgtggtcaatgcatcctctgaaaatggaaggctgacggtcaacggaatgagtaaccatgaccgtatggcagagaactcaaacagcgcgatcattgccagtgtgacaccggaggactttggcgacgaccatccgcttgcaggtgtcagctttcagagaaaatgggaagagaaagcttatcaggctggcaggggaaggattccggtccagaagctttccgatttcagggaaaacagggcgagcgagtgttttggagccattcttccgaatacaaaagggaaaacggcatttgcaaacataagggagtgtctcccagatgaaatttctgaagcgatcttggaaggtatggatgcttttgagaaaaagatcagaggattctcagatggggacactgttttaagcgggattgaggcgaggacctcttcgccgctcaggatggagagggacgaaacttttcagggcagtatccctggcatttacccgtgtggagaaggagccggatatgcaggaggaatcacgtctgcggccatagacggcataaagacggcagaacaattaatcgaaaatatgggtaaaaaatacaacatattgtgatagaaaatatctggacacacaatatatataggtttataataagggacagaatatgtgaaagggtgaagataaatgaaagttattaagagaaatggcagtaaagtggagtttgatccggctaaaattgaacttgccatcttaaaagcaatgcggtatggaagcggagtggtagacgagaaatgcgcaaaagatatttcctttgagatccatgagcagcatcagggagatgaggatatcagcatttatcgtattgaggaccaggtttttgaaaagctgatcgaaaagcagcagattctcacagccaaagcttacgaaggctaccggaaggtccgggagttccagagagagaccaataccattgataatgaggtgtttgggatcgtgacaggggaaaaccaggaggccctggatgagaactccaacaaggatccgaatatcctggcaacccagagagacttgatcgccggagaattttccagggactactgccggcgaatgatgctgccgcctaaaatcgttcaggcacatgatgacgggatcattcattttcacgacatggattattatatccagcagatgcacaactgcgacctagtggacttaaaggatatgttcagaaacgggactgtcataaacggaaaactgatcgagacgcccaagtctcttcagacggcatgtacggtggcgacccagattgtacagcaggtggccaacggacagtatggcggccagaccatatctttggcgcatatcgctccttttgtgagagtcagctttgaaaagcataaggataaggttagaaaagaaggagagatgatcggcaaagcatatacggagcaggaagtggagctgatcgcaaatgaccgcctgcacgatgaaatcgtatcgggaatccagacgatccagtatcagatcaacaccttttccaccaccaatggtcaggcgccgtttttatctgtatttatgtacataagcgaagagccggaatatgagaaagagacggcaatgctcattgaggagatgttaaagcagcgctatgaaggtatgaaaaatccggtaggggcctatgtgacacctgcatttccgaagcttttatatgtactggatgaaaataatgttccgaaagacagtcagtaccggtatctgacggatctggcagtcaaatgtgtagccaagcgcatgatgcctgacttcatatctgcaaaaatcatgagaaagaattaccagggggaagttttcccatgcatgggctgcagaagctttttggctccatggaaggatgaggacggaaattataaatggtacggaagattcaaccagggtgttgtgaccatcaatttggccgatgtagggctgtccgcagaacaggatatggacaagttctggaacattcttgaggaaaggctgagcctttgcagagaggccttgatgctccgccatgaaagcctcaagggaacattatccgatgtgagcccgatccactggcagtttggtgccattgcaaggctgaagccgggtgagaccatcgacaagctgctggaaggcggatattccactctttcccttggctatatcggactgtatgagtgtgtgctttctcttcttgggaaaagccacacaacaaaagaaggggatgagttatctgtcgagatcatgaaacgtttgagaggcgcatgtgatcaatggaaggaagagacgggacttggattcagtgtatacggaacaccagcggagtcaacaacctatacattcgcacgaagcctgaagaaacggtttggtatcgtggaaggcatcacagataaagattacatcacaaactcttaccatgtaaatgtgacagaacccatagatgcttttgaaaagcttggatttgaagctaaatttcagagcatttcctctggcggagccatcagctatgtggaagtgaccaatttgaaccagaatccagaagccctttccatgctgatcgactatatgtatgacactatccagtatgcagaaatcaataccaagtctgattactgccaggaatgtggatttgacggggagatccttctggatgagaattacgaatggtactgcccaaactgcggcaataagagccacaagaccttaaatgtctgccgcaggacctgtggatatctgggcgacaacttttggaataagggaaggacccaggagatcggggagcgctttgtacatttggataaccagatgcaagaggtgaactgatatgcggtacgcacagatcagaaaaattgatatttccaacgggaccggcatccggacgtccctgtttgtgcagggctgcagaagaatgtgcaaaggctgctttaatccggaaacatgggattttaacggtggattggaatgggatgagcattcagaagaacaattccttacgctgaccggaggagaacatatcacaggcgccaccattctgggaggagaacccatggagcctgaaaaccgtgaaaccgtcaaggaagtattaaaaaaactgaaacagcggtaccccgaaaaaactacttggatgtattcctcctatttatacgcggagatcatggattttgatccggaggttctcaggtacctggatgttttggtggacggtcctttcgtagaagaacagaaggatttgaacttaagattccgcggcagcaaaaaccaaagggtgatcgatgtgcaggcatccctgaaaaatggagacgtagtgcttcttgatttctaaatataaacgaaaatccagtagattatggatgaatggctccagagcattttgctttggagtcatttttcgagatttaatggacacgttgaatcgcttttccaattttcacgctcaaagtgctgtccgccggaagtgagaacaacgtcgaattttcagccatagaacattgattttttttagaaaaaggattacaataacgataaactgcgctgatggaaaatcagcaggagaggacaggatcacttcgcatggaaaacagagaaaaactaaagaataagaaacggattatagtaaaagtagggacatcttccctgattcatccaaagacaggacagctgaacctgttccgtctggagaagctggtgagagttttaacggatctccacaatggcgggaaggacgtcattctagtgtcatcaggagccattggggtcggatttaaagcactgggcttaaaggaacggcccgattctctgccgatgaagcaggcatgctctgccgtgggacagggacagctgatgatgatctaccaaaagctgtttgcggagtacaaccaaggctctgcacagatattgatcacaaaggaaaccatgctgaacgataaacgcaggtttaatgccagaaatacattcaaccagctgctcagtttaggcatcattcccattgtaaatgaaaatgacacggtatccacggaagagatcgagttcggagacaacgataccttatctgcggtggtcactgcggtggtggaaggagatcttttgatcctgctgacggatatcgatggattatataccgatgacccgcataaaaataaaagagcaagactgatctcagaggtgcctgtgatcaccgaagaggtggaaaacatggccaagggcgctgtcaccaaagtggggactggaggaatggcaacaaagattgcggcggctaacattgtgaccgactgcggggctgatatggtgatcgccaacagccgggactttaatgatctgaataggatcgtggacgggaaagacatcggaacactgtttttggcccataagagagaacattttgatttcagaaagtatttgacagaatgtccgtacttaaattcataatttttactggaaaggaatagtatgaacgaagacaagattagaagaatcaatgaactgtatcatctggaaaagtccgttgggctttcggaagaagaaaagaaagaacaaaagaaactgcgcacagagtatatccagtctgtccgggcgaatctgcgcggccagcttgataatatcagtataaagaatgaggacggaagcgttactccgctgaagccgaaaggaaagcactgagataaagcagggaggttgttatgttagagcaattaggaaaacaggcaaaagaagcatctgtgattctggcccaggcagccatgaatgacaaaaatgaactgctccgggaagcggcagaccagctggtcacaaaccagaattacattttatctgagaatgtaaaggatgtgaaggcggccatggagaggggcatgtcagaggcattggtggaccggctcaccctgacggtggaccggattgagggcatgtcagaaggccttcggcaggtagcggacttagaggatcccatcggggctgtcacagagatgaagcccaataagagcggactgctcataggaaaaaaggtggtacctcttggcgttgtggggattatctatgagtcccgcccaaacgtcaccgcagatgcgtttgccctgtgttttaagacggggaatgcatgtctgctccggggcggcagcgatgctatacattccaatatcgctataacaaaagtcctccaggaagccttggaaaagaagaagatgccgatatccagcatccagcttctggaagatacaagcagggagactgccacaaagatgatgcagatgaacgaatatatcgatgtgctgattccaagaggcggggcagggctgattcagagtgttgtaaagaacagcaccgtgccggtgatcgagacgggaaccggcaactgccatacctatgtggatgagttcgcggaccctgagatggcagtaaatatcgtggtcaatgccaaaacccagagactgggaacttgtaatacctgtgaatcccttgtcatccataagaatgccgtgcagactcatctgccggctatcgtggaggctctgctgcaaaaaggtgtgcaggtcaggggagacgagagagtcatggcggtcaatgaccaggtgttgaaagcttccgaggaggactggggcacagagtatttagatgctgtgatctctgtaaaggtggtcgacagcttcgatgaagcgattgaacatatcaaccgctacaacacaaaacattcagaggctatcatcacagactcctattcccgtgctcaggaatttttagacaggattgatgcggcggccgtttatgtgaatgcctctaccagattcacggacgggtttgagttcggattcggggcagagattggaatcagtacccagaagatccatgccagggggcctatgggactgaacgcccttacgaccaccaaatttattatttacggaaacgggcagacaaggcgttagacaaaggataatttcaaaggaggagtttctcaagaacgggggactccttttagattgataatatattcacatataaaatccctgattgtttattttttagtgcaaaatatagaaaaaaagaaaagaatggacatattatagtgaaatttatgttatttcatgggattttgattgtgaaaaaaatgtcgagagttgattttgcatgctaaacaatttatcataaagtatatggaaatttaagaaaagagaaaggaaggcttaaaaatggcattgtttacatttagcggcggagttcatccggatgacgggaaagaatacgcaaaaaattccccaatcacggaatatctgccaaaaggagatgttgttttacctgtcggccagcatattggagcacctgcgaaaccgatcgtacaaaagggtgaccaggtactggcgggacagaaagtagcggaagcaggcggttttgtatccgcaaatattttcagctctgtttctggaactgtaaaaacaattgagccgagagtgactcctgccggagcaaaggtaaatgcaattgtaatcgagaacgacggagagttcaaagaagcggaatttaaggcaaagccgtataaggaaatgaccaaggacgagatccttgccgccatcaaagaagcggggatcgtgggacttggaggggcaggattccctacccatgtaaaactagctccgaaagatcctgatgccatcgagtatatcattgtcaacggagcagagtgtgagccttacataactggagattaccggatcatgatggaaactccggaggtcctcgtggaagggctgaatatcgtactggatttattcccaaaagcaaaggggatcattgcggtggaggacaacaaaaaagatgccattgccaaagtgagcgagtgtgtcaaaggagattccaggataacagtagccgaattaaagactaaatatcctcagggagcagagcgttccctgatctatgccaccaccggaagagcgatcaattccagcatgctgccggctgacgcaggatgtattgtggataatgttgcgaccattgttgccatcaaggatgcggtgaaagaaggaagacctctattcagacgcgttgtgacagtgactggggatgccattgagagtccgaaaaaccttcttgtgcgtaccggaaccaatgtcaatgaactgatcgaagcagcaggaggattcaaaggacagcctgaaaaggtgatctccggaggaccgatgatgggaatggccatgtttaccacggatgtcccggcggtcaagacattttcctctctgctggcatttacaaaagatcctgtatcagcagtggagcctagcaactgtatcaactgtgggcgctgtgtcagtgtctgtcctcagaagttaatgccggcaaggttgtccgttctggcagataacaacaattttgaagcatttgaagcgcttcacggagatgagtgtgtggaatgcgggtgctgttcttttatctgtccggcgaagagaaacctggcacagtcaatgaagacaggacgtaagcaggtcttggcaaatcgtagaaagaagtaaaggagaggtacatatgaacgaaacattatatcgtgtttcagcaaacccgcacgtaagggacaaaagctcaacacaaagcattatgctggacgtaatccttgcattactcccggctacagtttttggtatctatatcttcggtgcatctgcggctgtgactattgcggtttctatcgttacctgcgtagctgccgagtatatctatcagaaattaatgaaacaaaaagtatcagtaggtgatttaagcgcggtcgtaaccggccttctgctggcactcaacctgccggcaggcgttccattctggatgccggtactgggcggtatatttgcgatcatcgtcgtaaaacaggttttcggaggattgggccagaatttcatgaaccctgcattgggtgcccgttgtttcctgatgatctcctttgcggcaaggatgactacatttacctatgacggagtgaccacagccacacctctggccctgctgaaagcaggaaagagcgtagatcttggaaggatctttacaggatttattccgggtacgattggagagacatctgccgtacttctgatcttaggcggcatttaccttgtattaaagaaagttatctcaccgatgatcccatgtatctacgtggcaacggtggctgtttttgtattgctttttggaggacatggcttcgatcttacttatatggcgtctgagatttttgcaggcggactgatgctcggcgcgatctttatggcaaccgactatgtgacctcaccgatcacttccaagggcaagatcatcttcgccgttctgtgcggacttctgaccggtattttccgtctgttcgggccgatggcagagggtgtttcttattccatcatcattgcgaacctgattgttcctctgattgagaagattacagttccgacaccgtttggaattgtgaaggcaaaaggaggcaaagacaatgaataaaagtttagtaagcgattgtattaaattatttatcatcactctggctgccggcctgatccttggtttcgtctacaacgtgaccaaagatccgattgcaaagcaggaagaaaagacaaaacaggaggcgtacaaagcagtattcaaagacgcggaccgttttgaagcagtgaaattaaatacaaaagagatcagtaaagctttgaaggcaaaagaccttggacagaatacaatcaacgagatcgccaaagcagttgacaagaacggaaaagaacttggatatgttttctctgtgacaaaccctgacgggtacggcggtgacatcactctttctgtaggtgtgaaggatgacggtacggtcaacggatatgagaccttaacgatctccgaaaccgcaggtcttggtatgaaggcaaaagaagatgaattcaagagcaactttacaaataaaaaagcaaaacagtttgaagtcgtaaaagacggttccgggaagaatgacgactctaagatcgacgccatcagcggtgctacgatcaccagccgcgcagtcacaagcggagtcaacagctgtgttgcattgatggatacattgaaaggaggtaattgagatgaaaagtaatccagtagaacgtttgatcaatggtattgtcaaagaaaatcctactttcgtcttaatgctcggaatgtgtcctacccttgcggttacaacatccgcgatcaacggggcaggcatggggctttctactacagccgtgttaatgttttctaacttgatcatcggtcttatgagaaatgtgattcccgacagagtccgtattccgggttatattgttatcatcgcgtcattggttacggttgttcagttccttttacagggctatgtgccgtctctaaatgcaagccttggaatctatatccctctgatcgttgtaaactgtatcatcctgggacgcgcagagtcctttgcatccaaaaacggagcaatcctctctttcttcgacggtgtcggaatgggacttggatttaccattgccctgacggtgatcggagctttccgtgaacttctcggtgcagggacgatcttcggtgcaaagatcatgccgagcgcttacgagccaatcacgatcttcatcctggctcccggtgcattctttgtcctggcctgccttgtagcggcccagaataaagcaagaagcaaaaaaccgaaaaaagcaggagagcctgagtcttccggctgcggcgattgttccagctgcggaaacggtgcctgtggaagccggtttttcgataacagtgtggatgacaaatagggagggtgaacaatgtcaaatttattattagtcgcaatcggtgcggcattagttaataacgtagttttgagccagttcttaggcctttgtcctttccttggtgtatccaagaaggtagagactgccggcggaatgggtgctgcggttattttcgttatcaccatcgcctcagcagttacatatttcgtgtatgccgggatccttgtgccgcttcatctggaatatctgcagaccatcgcatttatccttgtcatcgcggcattggtacagtttgtggaaatgttcttaaagaagtctatgccggctctgtatgagtccctgggtgtatatcttccgctgattacgaccaactgtgctgtacttggtgtagctttaaataacgttcagtatgaatataattttatcaccagtgttgtcaatggattcggagtggctgtgggattcaccatcgccattgtaattctggctggaatccgtgaaaaattagaatacaataacatcccggaatctttcaaaggaatgcccatcactcttgtcacggcaggtttgatggcgattgctttctttggattctcaggaatcatatagggaggtagcaaaaatggatattacagcaattatccttgcggccgttgtggtcggaggaattggtttggtcattgctattcttttaggaatcgcttctgagaagttcaaggttccggtaaatgaaaaagaagtagcagtccgcgcggaacttcctggaaataactgtggaggatgcggatatgccggatgtgacggacttgcaaaagccattgcaaacggtgaggcggcagtaggtgcctgtcctgtaggcgggccttcggctgcagaaaagattggtgctatcatgggtgtggaagcaggtgactttgtgaagcaagtggcatttgtaaaatgtgcggggacctgtgagaaggcgtcaaacaaatatgaatacacaggccagatgagttgtgtagaagcgatgaacgtacccggagaaggaccgaagggctgctcttttggatgtatgggattcggaagctgcgcccaggtctgtcctgaggatgccatttccattgtcaacggcattgcgtatgttgacaaagaagcatgcatcggctgtggaaaatgtaccgatatctgtccaaagggcttgattgaactggttccttacgacaaaaagcatttagtacagtgtaattcaaaagacaaaggaaaagatgtcatgtccgtgtgcaaagccggatgtatcggctgcggtctctgtgcaaaggaatgcaagctgggagcaatcaccgtagaaaataacattgcccatgtagattatgagaaatgtgtcaactgcggtctttgtgcaaagaagtgtccgaagaagatcatcactgcataataatagaatcagaaaaggctgtatctgtgattcagatatggcctttttttgcacctttttttatcacgggcatacactattataactatttttctggggtggcttatcatgaaatttttagagttgagggagaaggatgtcattaactgccggaccggagataaactgggatgtgtgatagatctggaatttgatcccggatcaggacagatcttatgtctgatcgttccgaaggctacaaaggtgctttgctttgcaaaaggggaattttattatattccgtataaaagaatcgtgaaaataggctgtgataccgtattggtggatataattgaaaaagaatgtttgaagtgatttagaaaaaatgatatacttcccttaatgaatggaaatttttgaggcagacatgttctgcctctcacaaaagaacaaagtaaacatcccgggaggtagaaaagatgaggtgcccttattgtggaagcgagaattccagagttattgattccagacattcggaagacaataattccatacgcagaagaagacagtgtgatgactgcagcaagcgttttacgacttatgaaaagatagagacagaaccgctgtcagtgatcaaaaaggacaaaaccaggcagatgtatgaccgctccaagatcaaggccggcattgtgcagtcctgccataagctgcccatctccatgggacagattgaccagctggtggatgagattgagacaaagatctataatctcggacagagagaagtggagagttctgtcatcggaggaattgtcatggacaagctcaaagaactcaacgaagtggcatatgtgcgttttgcggccatatacagagagttcaaggatgtgaacacatttatgagtgaactgaaaaaattgctcaaataattgtaaaaatatagaatatatgataaaatagtacatattgtaggttgtaaggcttccggagagaaggaggctttatgttttgttcgatgatcagcggcattgtctcaggtgccgcaggcgttatcatacaggttgaagtggaacttcggagcggtctcccatattttactatggtgggccgcctttctaatgaagcaaaggaatccaggcacagggtagaatctgccctgcgggctcttggatgcccgcttccgcccatgaaggttacggtgaacttatctcctgccgatatcagaaagacaggtaccgcattcgaccttcccatcgcagcggccgttttggctggtcttaactatatcccaattaataaagaattgaagatctgtatcctgggggagctgggccttgatggcagtgtccacgggatccgtcagtgtcttccgattatactggaaggaaaaaagcagggaatccggcggtttatggtaccctatgacgatatggagacgcttggacacgtaaaggatgtggaactggtcccggtaaaacatctgtctgatgcggcagatttcttccgccggggaaagatcctttcttatgaatattcaaagaaacagaagaaccttacaaaaaaagcttttgatttctctgaaattaaaggacaggtgttcctaaaaagagctctggagatcgcagtcaccggaaggcacaatatccttttgatcggtcctcccgggtgcggcaaaaccatggcagtcaattgtgtttcttctattattaatagtttgacagaggaagaatacttagaggtacagtcactctaccaggcagctggaatctatagggatgcggaggatttctgcccgcctttcaggatgccccattcctctatctcaaaaggggcgctgattggtgggggagcggttccaaaggtcggagagatcacgctcagccacaaaggctgtcttatattagacgaattatcgcagtttgactccaaatgtctggaagctctgagacagcctttggaggaccgccagattattttaaaccggcttgggagagactataccatgccggcagactttttcttgattgccgacatgaatccctgtccctgtggcaacagctttactccggaggcgtgccgctgcagtatgagtgagaagcgttcttattatcataagctttccggccccatcctggaccgttttgatctggtcattacggtgaggcaagaggcaaaaacctcagatgctgtttcggagaattcggctttagtcagagccaggatccggaattctgtggcagaggagcagaaggaacttttgggcacaccgtatgcatactatagtcaggtgaaagcggaggatttgaaaaaaatctgtcctttaaattcaaaatgcagacagattttaagagaagaacagaacaaacatcatatttctatgcgtggtgttcataagatgatgagaatagcaaaaaccatcgccaggatggagaataaaagaaggattgaggaggcacatctcatcgaagcactatccctgagaaatatggagtttttatcggaggtggctgggtgtgaatgagaaactttcttggttttggtttacatcccttctggagatgaaccggaaaacacagggggagatcctttccgtggcagtccatccggaggaacttcggaaactcagcggagaaacagcaatgacccttctctcaaagagacagtaccagttgtttcttaagaccagggaggagtcatatatctgtagaagatatgacagattaaaagagcagaatgcagattatattatatggaaagaaccggattatccggaaaggctcaggcagatttatgactaccctttcggtattttcagaaaaggccggccggtcgattcaagcctttccattgccatggttggagccagatcctgtaccctgtacggaagggaaatggcagagtatatggcgggggaactgtcaaaaaggggtgtactcatcgtcagcggtatggccagggggatcgacggtgcgtcccatagaggtgcactgcagggtaagggaacaacggcgggtgtcttaggctgcggtatcgaccaggtttacccaaaagaacaccgaaaactgtaccagcaggtgcaggagaggggagtcatctactctgagtatgggctgggtgtggagccgttttcatttctttttccgcagagaaacaggatcatcagcggcctggctgacggtatcttagtggtggaggccagggagagaagcggatctctgatcacagcagactgcggattggaccagaacaaagaaatttttgctattccgggcaatgtgacaagttctgcatccaagggctgtcatcacctgatccagcaaggcgccaagctggtttccactccggaagatattctgaatgaatttccaaaattcagagatatttcacataatgtctgtcaatttgataaaaattcacttgctagaggtgaaaaaatggtgtatgatgttttgagtttggaacccaaatgtctggaacagatagcccaggagtcaaaactgccgattccggaggcagtgacatctttgtattatttagaacggcaggggttggcagaagaaatactgaaaaattattacataataaaatataattaagaggtgcaaaaatgccaaaatacttagtaattgtagaatcaccagcgaaagcaaagacgatcaataaatttttagggaaaaattatacagtcattgcgtccaacggtcacgtgagggatctcccgaagagtaccatgggaatcgatctggaacataattttgaaccaaaatatatcacgatccgcggcaagggagaagtattggcagcattgcggaaagaagtaaaaaaggctgataaagtttatctcgcaactgaccccgaccgggaaggggaagccatctcatggcatttgtattatgccctgaagctggagaataagaaatgcagccgtattacatttaatgagatcaccaagaatgcagtcaaggaatccttaaagcacgccagggagatcgatatggatctggtggatgcccagcaggcgagacgtgtcctggaccggatcgtgggatataagatcagtcctcttttatgggcaaagatcaagagagggttaagtgcgggccgtgtacagtctgtggcgcttaggctgatctgtgaccgggaagaagaaatcaacgcattcataccggaagaatactggtcgctggacgcttttttgaacgtgaagggaagcaaaaagcctctggaagcaaagtttgcaggtgataaagacggaaagattgagatcgaaaatgaagaacagctgaacgagatcctctccaagcttgagggggcaaagtttaaagttgacaatgtgaaagttggagagcgtatcaagaaagcacctctcccgtttacaacaagtaccatgcagcaggatgcgtccagcaagctgaattttcctacagctaagaccatgaggattgcccagcagctgtatgagggtgtggacatcaaagggaaaggcactgtcggactgatcacctacctgcgtacagactccacaaggatttctgaagaagcagacaaaaatgccagagagttcatttccgaaacctacggaagtgattttgtgggaaacggacaagttgcgaagaaagacaacaaaaatgtgcaggatgcccatgaagccatccgccctacttacatcgaaaacaccccggccagcttaaaagaacagctttccagagaccagttccgtctataccagctgatctggaaccggttcatggccagccgaatgagtgcagcgaagtatgagactacatcggtaaagatcgacgccaacggatacagatttaacgcttcagcatcaaagattgtttttgacggatttttgaccgtttataacattgacaatgaaaaatcaaaaggaaatgtcatgctgaaaagcattgatacttccacggagctgaaattaaaagagtttgatcacaaacagcatttcacccagccgccggcacactatacagaagctacactggtgcgtacgttggaggaacagggaatcgggcgtccgagtacctatgcgccgaccatatctaccatcatcgccagaaggtacgtggtaaaagagaaaaagaatctctatgtgaccgagctgggagaagcagtcaacaccatgatgaaaaaggcatttccgtctatcgtggatgtacattttaccgcaacaatggaagcgctgctggatatggtagaggaaggaaaagtccactggaaatcagtagtggaaaacttctaccctgatctgaaggaagcggttgaggctgcggaaaaagaactggaacaggtgactatagaagatgaggtgacggatgtgctgtgcgaccagtgcggaagaaacatggtcgtcaagtacgggccgtacggtaaatttctcgcctgtccgggattcccggactgcaggaatacaaaacctcactttgagaagatcggagttccttgtccgctgtgcggaaaagaagtcgtcctgaagaaaacaaagaaaggccggaagtactatggctgtgaagacaatccagaatgcgaattcatgtcatggcagaaaccttctactgtcaaatgtgaacgctgcggcaaatacatggtagagaaaggtaaaaaactggtttgttcagacgaacactgcggatatgtctgtgatctgccgaaggaggaagaagttacagaataataaggagtagctatgagtgtacaattattagataaaaccaggaagatcaataaattactgcataacaacaactcgcaaaaagttgtatttaatgacatctgccaggtattgatggaagtcatggattctaatgtgatcgttatcagcaaaaagggtaagatcctaggcatacagaattcagacgagatcgagtccatccaggagatgatcagcggcaagatcggagattacattgacacagatttgaacgagaggcttttgaccatcttatccaccaaagaaaatgtcaatcttcagactcttggctttgaaagtgacattcaccactactgcgggatcatttccccgatcgacattgcgggagagagattcggcactctgtttatgtaccgggtggaagacgattataccatcgatgacattatccttgcagaatacggaaccacagtcgtgggactggaaatgatgcgttccgtcagtgaagaaatggaaagtgaacgcagaaaacggagcatcattgagtccgcgttccggaccctctcatttaccgagctggaagctgtccatcatatctttgatgaactgagcggaagtgaggggattctggtcgccagcaagattgccgatcggtttgggatcacccggtctgtcatcgtcaatgcgctgcggaaactggagagcgcaggggtgatcgaatcccgctcttccggtatgaagggaacatacatcaaagtggtaaatgacctgatttttgacgaattaaacagatccgggcgtatctaagctgaaattgcgaagtttttcttgcaatcaataaaacagatgtgctatactgtcaaaggtaaaaataaacacgccgttggaattccggtaggtgccggaaggtttgccggggtaatgacaatggtggaagcataaccaaaggagatttttttatgagcgttatttcaatgaaacagttattagaagcaggtgttcattttggacatcagaccagaagatggaatcctaaaatggctccgtatatctacacagagcgtaacggaatccacatcatcgaccttcagaaatccgtaggaatggttgacgacgcatacaacgcagtaaaagaatgtgttgcagaaggcggaaagatcttattcgtaggaacaaaaaaacaggctcaggattctatccagacggaagcagaccgctgcggaatgttctatgtaaaccagagatggttaggtggaatgcttacaaacttcaagacaatcagaagccgcatcgatcgtttaaagaagatcaaaaagatggaagaagacggaacatttgaagttcttccgaagaaagaagtattagaattaagaaaagaaatggacaaattacagaagaacttaggcggaatcgaagaaatgaacgacattccggatatgatcttcattgtagatcctaaaaaagagaatatctgtgttcaggaagcacatgcattgggaattcctctggtaggtattgctgatacaaacagtgacccggaagatttagattatatcattcctggaaacgatgatgcgatccgtgcagtgaagttgatcacatccgcaatggctgatgctgttgtagaagcaaaccagggaatggatgctgctgatgtggaagcagaagaggaagctgcagaagaataagatttagatctcagtgataatttttatttggaggagaaatcatggctattacagcaggaatggtaaaagaattaagagaaatgaccggagcgggaatgatggactgtaaaaaggcattaaacgctaccgacggaaatatggaagcagctgttgagcacttaagagaacagggacttgcaaaggctgaaaagaaagcaggacgtgttgcggctgagggattggttgccacaaaactttccgatgacggaaagaaagctgccatcgtggaagtaaactctgagacagacttcgtagctaagaacgagcagttccaggcttatgttgcagaagtggcagagcaggcactcacaacagatgcagcagatatcgacgcttttcttgcagaggaatccaaagcagaagcaggaaaaactgtgaaagaagtattagacggcaagatcgccatcatcggtgagaacttaaacatccgtagatttgcacagatggacgcagcagaaggttttgttgcctcttacatccatgcaggcggaaagatcggtgtattggttgaagttgagacagatgttatcaacgacgagatcaaagaaatgggtaaaaatgtagctatgcaggtagctgctatcatgccgaaatatacaagcagagatgaagtttctaaagattatatcgatcatgagactgaaatcttaaaagctcaggcaaagaatgaaaatccggacaagccggacaacatcatcgaaaagatgatcatcggtcgtctgaacaaagaattaaaagaagtttgtctgttagaccaggcttatgtaaaagctgaagacggaaaacagtccgtaggcaaatatgtagaagaagtagcaaaagcgaattctgcaaagattacggtcaaaggattcatccgtttcgaaacaggcgaaggaatcgaaaagaaagaagaaaactttgctgaagaagtggcaaagcagatgggaaactaatccgttattgattggattaccattgtagataaagggtcgttgtgaaaacaacgatccttttatattacctattgtaaacagaatgtcttgacagcatcaatccttttaagttagagtttatttgaaacaaggattttttagtagtgcagggaggattataatatgcaaaatttctttgagtcattgatatgtgaaggtaaaagtacgacactgcctgaagaatttaattattttgaaaagcttatcggcagttggaacatagattatgttgacagtaacaatgctagtgtgataaaaggcgaatggcatttttcatgggttcttgagggaatggcaatacaggatgttattattctgccagattatgaatacggaacatctcttcgcatctataatcctgatacacatgcatgggatgtcgcttatgggtacacgggaaatataattcggctcgaagcaagaaaacaagatgatatgatcgttcttacctacattaatgatgaaagaagaaagtgggtttttaccaagattgaggatcaacacttctcttggaagaatgtcactgtaaaagatgatggtaaatggcacataaatgccgagatatatgcagagcgcatttgagcactgcagaaaatgtgaaaaactcccttgcgataaatttgaactgacccccaatagttagacctaaaaatctaacggttggaggtcagttttttgttctgctataggaaattcctccggaatcccctatagcataaaacgctccgcgaggatgcacacgatgtgccaaggaaggctgctttgcagccgcacattggcgcgcaaagcggagcaagtccctcatgattgagggatacagggagttgaagcggacttgtccgctttgttcttaaaaaagtcaaaagcctgtgatttcttcgaccccatcaacgccgatttccaaaagggtctgttttgccgaagcaaaattattctgaaacagagtctggaacgtttcggaaagcttttcgtagtctgcacaggcacagctttttttgattgatgcggaaatctctggccacccggcaacggactccgcaccggtttcttccaatcgcaggatactaccttttaataacaggagtgtaagtttgctgtaaatctcccgtatagcagccaaaggactgtatctgattacagcctgcagtccgacactgaccgtttgtaccagagacttcttttcttgggttatggacgcggctttggaaagttcctgtaatgtttgatgcgggatatgtgggagtgctgaaagcataaccggtctgctgatgatcgccagaatctgcagggcttctaaaaaatctctcatattatcatccagagtcaggtcctttagtttgtatgggatctcaggaccgccccgggaaacaacaaaagttccgacgccgttgacggtttctgtgacacctaatttattcagaagagcgatggtgcgccggacagttatcgcagaaatatgataaatctctgctaaaatatgcccgtttggaaggcgagaaccaacaggatagaccccttggttgattttacagagtatttcgatcgcaaccacatcacagtagcgggtacgtcctttacggggttcccagctgaagggttcctgttctatagaagatgtatcgcattctataagataatcttttatggcatcaaaaaatgtgctgcttaatccctcaagcttttcttgaagagcagagacggagtccgggtgttgatcctggatacagtgtgcatattctgaagcgatatgctgtaaaaaggaatcacctttttcttttccatatttcaaagataaaatatccaggaatgcactctcagaaaacgaactgatatcataatagagactgagtacggtcttgttgccaaacaggtgcaaggaacggtcaaactgctgatagagactgagacccgcatgctgtccctgggcaatttttcttaaccagagggaaggaagcgtttttttaaaatgctgaaggttgtaagtacagagtgcaggagagatcagctctaaactctggcataaatccaatagtgattttatgtgccgtttaaatacgtcgctttctagataattttcatagggtttctttaggactgctgtggcacttccgcggtgaagttttatctgtccattctgttcaagcattttgagcgctctctgggcaggacagtaagagacatggaaccggtcagcaatctcctttgcggaggggaagcgttccccgttatcgtaaaaacccatctgtatcttacccgagagattacggtaaatgatctgttcctgactgtggtaattagacatatcctgattcctttctcgctgatccgattcgtacataattatgctgttattatcatatcacagattattttgtacaggatgatattttacctgaacaaagcaatatatgatataatatgaacaaggtcggtgcattcgtattatttgatgtaagggggaaacgaaaatgacaaacaaagaaaagttcggttgtcttacaactggtggggcccctatggattcgtcagaagtaatgatttttgaatgggatatagaacaagataggattacgtgttcacagagtgatggagtgcaggtccattccatggacgtacattttgacgtggacaggacgttcgatacatctatccgcattcatccggatgatattccggttctggctgaattcagggaacgggtaaggcagggagatctttattctgtgtcggaattccgttgcaaaaattctgaggaaaactatacatggtgcaggatatatgctattacccagtatgacagtcataaaaaaccagtaaaggcagtcggaacattctggaatattcaggaagaaaagcttaggatccagaaattacggcacagggctgaaaaagatgccttgacaggagtttataaccggaaggagacagaagagcgggtaaaaaagtatcttgaggaatacccggaagagcagtgtgccctgtttatgatcgacacggataactttaaacagatcaacgacacaaagggacatatgctgggagatgtggtcctcatggaaatggcttccggtatgaaaaagctgatgcgaaaaagtgatattgtaggacggatcggaggagatgaatttacggtcttcatgaagaatatcccttcaccgcacaccgctgaaaataaggcgggagagctgtcaaaaatgtttgcgcatctatttgcgcatgaaaaacaggcagttcaggtgacctgcagcatcggggtagctctttacccaagggatggtaaggattttaattccttataccaatgtgccgatcgtgcactttatcaggcgaagaagcaggggaagaacaggtacgtgctgtataacagcgctgaatctctttacgtggaaaagacaggatattcttccttggggacagcgatcgattcggagaagcagttttccgacgggccggacaatctggcccgttatgtgttccggattttatatgatatggaggactttgaccaggctgtccagatgattcttgaaattgtaggaaaacagtttgatgtgagccgcgcttatatttttgaaagcagtgaggatggagagtactgttccaatacatatgaatggtgtaataaagggataacctcggaaaaagagaaattgcagaatgtctcatacagccaatttggagattataaaaaactgtttgcggatcattctgttttttactgccgggatactcatacattacagcaggaacagaaggaaatatttgaggaacaggggatttactctacgcttcagtgtggcttttggagtggaaatatattcagcggatttgtggggttcgatgagtgcacaggtgtccgtctgtggacgaaagatgaggtcaatgccctgtcactcatctcgcagatactgactacctttctgcaaaggaaaaaaatcttggagcggaacaaaagaatagaacaggaactgatatttgtaagagaagcaggatttcctgtaaactgtgatgacgaggattaccatgttgtagcagagaagagtattgtaaactgtatccattgtcttacttcttcagaatatctggaagattctattgagtatgtactggagatcgtcagggattattaccagtcagaccgtgtctacattattgagacagaagaggaacggggtgttgccagtaacacatatgagatctgcggcagaggagtagaaccccagatggcatttctacaggatattcccattgaaacgattgctttctggctggaaggatttgagacaagggattatatcaaggtagataatgttgagacactgagggaagaccggagactggagtatgagatattaaaagaacaggggattcagagtctgcttgccattcctttgtatgtccaagggacgataaaaggttttcttgggatcgatgatcccaaaagatataaagggaacatccgttatctgaaagagctatcttattttttggaaaatgaaatatccaaaaacgccttgaatcgaaagctggaacagatgagctaccaggattctatgaccgggttggaaaaccggaacagctatacacaatactgcgaggactttgcggaaaaaagaccggtccctgtaggggtcatctttatggacatcaatgggctgaagatcatgaatgatgataaaggccatgtctatggggatttgctgatcacgtatattgcagataaaatgaaacagttctttccagagagccggaaattccgtttcagtggagatgagtttttgatcgtaacagaaatgatagaatacgataaattcacagcaaaactcagtgccatggaaaaaagcctgtctgaggatgaccggtgcattgtatcggtcggaacatcctggagcgatgtacaggcggatctgccagtgctggtcaataaagcggaccggctcatggcgattaataagcaagattattataggagaaataagaatattgccgcagagaaagtaccgctgttaaaggaattgatggaatctattgtcaataaggagtttgtgatatatctgcagcccaagtatcatgtgaaaacaggcgagataaacagtgctgaagtgctgatccgctacaaggaaaaagacggctgtatcgtatcgccgtttaaatttgttcctctgttggaaagtgaagggctgatctcccatattgatttctttgtcatggaagaagcgtgcagactgcttaccaagtggaaagataccagtctgtctgatatgaaacttgcattaaatttttctagaattaccttatttgaggatcactttttcgataagttttgtgagattttccacaaatataatctcagaccggcccagcttgagctggagattacagagacccaggagaccttgaacaaaaagcagatggcccgtcttcttgagcagctcaaacaatatgggttttgcgttgttttagacgactttggagtagaatactcttcctatgagtttttgatgatggctacttttgatgttctgaagatcgacaaaggaattgtacaaaaatatcaaaaatcggataagggagatattttaataaaacatatcatcgaaatgagtcatgccattggaatccagtgctgtgcagaaggagtggagacagacgaacaatttgagtttatgaaacaggccggctgtgattatatccagggatatctgatcgacaaacccgccgcggcagaacagtttgaggcaaaatacatgaaatagcaggcagaaagccgtagaacaagtgtaatttctgatgtcatcagattatgtaaatctgttgtaaacagaagtgcactttggtataatcaggatatataatatgagcaaggtagggttatacttgagagaaattgcctcattgaaggagaatatgatgatagatcagaatacggagcagaaagcagaatactttaaatggatgctggatgaatatgtgggaaatgtttatatagcggatattcatacatatgagcttctatacctcaataagtcttcctgcgctactttgggcttttcggctgagcagctgataggcaggaaatgttataatgccattcagggccggacgtctccctgccctttctgcaacaatgattgtctaacggagaatgagttctatgagtgggaattttacaatccggttttaaagcgttcatttctgataaaagaccgaatgatcgattgggagggacacagggcacggcttgaactgtccaatgataatctgagtccagaatataagttagaaaaaagggacagggagagagaagctattatacggacgattcctggaggttttgcccgtgtggatgcaagggacttaaggactgtgatctggtatggcgggggatttctgcagatgatcggttacaccaaagaacagtttgaaaatgagcttcattccaaatgtgactatgtacacccggatgacatagagcgtgcggtggagatcatggagaactccaggagaatcggagaagatacagcggtagagggacgcattgtgaccagggacggaaagatcaagatccttacgatgacctttagttttgtcagtgctaaggacagctgggatggaaaagattctttctacagtcttggaatcgatatcacaaaggagagggaagaacaggagcgtcagaaaactgcgttgcaggacgcatatcagacagcacgggtggcaaatgcagccaagacaaattttctctcatctatgtcccatgatatcaggactccgatgaacgccattatgggtatggcagcaattgcgcaggcgaatctggaacatccggacaaaatacgggactgtctggataagatcaacacttccagcaggcatctgctcagcctcatcaatgaggtattggatatgtctaaaattgagagcggaaaggtaaacatttcattggaacagatcagtctgccggaaatgatcgatgcagttatggatatgtgcctgccgttaattaatggaaaacatcaacagttccagatgagtatcggtcatgtgattcatgaaaatgtgattgcagacggcgaccgcctccgacaggttttgatgaatctgctttccaatgctgtaaaatatactcctgagggcggaacgatcacattgcggatcaacgagctgtattcaccgaatccaagaaaaagccagtatgaatttatctgtattgacaccgggatcggaatatcccaggaattcctgccccacatttttgaaccattttccagggctgaggataccaggatcagtaaaatccagggcacagggctgggtatggcgattacagacaatattgtccggatgatgaatggtacgatttgtgtggagagcgagattggtgtaggaagtaagttcacggtctctgttccgcttgaagtctgcggggaagaggaaccctacactgaagagttatcaggccggccggtactggtcgtggatgatgaccagatgacatgtgaaaatgccgccgcacttttgattgagttaggtatgcggggagaatgggtgctgtcagggagagaagcggttgaaagggttatagaagcacataacgtggaagatgattattttgccgtgatcctggactggaaaatgccggagatggatgggctggaagccacaaaagccattcggaaaagcttaggaggaaatgtgccgattattgtcatctctgcctatgattattctgaaatcgaagaacagtttctagaggcgggagcagatgcatttatcacaaagcccctttttaagtcaaagatcctgcaggtccttcaactgtttgtctctgcagtcaaagaagaggaaacagaagacaacgagaaggaaaaacagtcaggaatagaagggaagagagtactgttggttgaggataacgatatcaacagagaaattgtcatagagcttcttgagatgaaccatgtacatgtggattccgctggaaatggactgcttggcaaagaagcgtttgaggcatccgcgccgggtgactattgcgccatcctgatggatattcagatgccggtcatgaacggatatgacgccacagctgccatacgcagtctggatagagccgatgcgtatgaaatcccaattatagcattgacggcaaatgcgttcactgctgatgcggcaaagggttatagtgcagggatgaatgattatcttgcaaaacctgtggaaattgagcgtctattgaatgtgctgaaaaagtggatagattagaattcagcacagagtttcatatgcaatactgccggatggcaggcctatatgggcctgtcatcttttcaaataagatatcattaaaaccaaatctaaaccaagatatgttgtgctaagtctgcaatttgagcagacagggaatcagctgatggttcctcacggtattaacctcccgcagttcaagatattgaaataactctgccaatcatcgctacggacagtaaaaatgtaagtccgaaattgtataacctttttatttcctgtataatatcaatatcaacctaatttaaagttatcctaattgcgaggtgtccatatgaccattcataccgatctaaataaatattttgaaatcatcggcctgctgtattgctgtgcccatcctgagtttgaagaaaaagaatcgtgggaaaaggctgcaaaagattataatatcaatgcggaggaactgtataaaaaggtcagcccggttttgaaaagatatgtttcaacattcaaaaggggcatgtttaaagggaacgaagaggattataatttctttttttcagatgatgacgatgaatttgtcttacttattcagtttgtctgcgcaaatcatccagagtggtttgaacatccattagattctgttggggaaaaagaaatcatgactgcgtttgccaaaatgctggcagaggatacaggctgcggctttggtaaaacaaccggggagttggttcgccttctgaagcagacagggttctcgtcaactacgtgctggaagcttatggtgtttctgcagtcacccaaagaacacatccaaaaactttccgatatgataggctgcaataaaaaggcatatgaggatgcgctggcagcagtccgggcaccattaaaaaagctgctggaggcatttcctaaaggaaagcgtatctgtgaaaagatccacgaaggctctgtattgacgcccacgctgatctatgcggcatcagaactcatagatatggatgaggcctccgcaagttcctatattggagtttatacggatgaagtttataagatgctggaacaggaaagatcctcacaggaaaagcttctgccgatccttaaagcattaagtgaccacagcaaatttgatattctgctgtctctgatgaagactcccaaatataatctggagttagcagaagaattaaatttatcggctgcaacggtctcccaccacatgaatgtactgcttgggcaccggctagttgatgttgaaaagagagatgggcgtgtctactacacattctcgaaagggaccgtaaagaaggttattcaaaagctgcagtctatgttctccatcgattaaaaaaagaagcaaggcaagggtcttgcttctttttcatatttgacttatatctaatatagatatatactattagatgaagaactgatttaatgcaccattatattttttttggcattaaattagataatcatctaataaatttgaatgatatggaggagaaatgaaaaatttattttcaaaaaactttacattacttatcatcggccaggccgcatcgctgtttggcaactgtattttggattttgctttgtctatgtatgttttggatttgacggggtcagctgcggcgtttgcaggctttctgatgatcgctatgatacctacgattattttatcaccattgggcggtgttcttgcggatcgtgtcaataggcgcaatatcatggtattcctggacctttcatcaggtattgtggttttgtcagcggcatttaccattgccaggggagatcagcttgtgatcatcggaaccgttctttttatcctatctgttttgggagcatttgaatcaccgaccgtgcaggcctgtgtaccacaaatgcagagcggcagcaacatcatccgggggaatgcggtggtgagccagatcaacgctgtctctacactgattggtccttttgtggggagtatactctatacagtgtttggactggaacttgtaatgtatgtgggagggatttgttttatggcgacagcagcccttgaatattttataagattagaacatcatcctgcccagcggagcggcacggttctgaagactgtgatggacgacctggcaggcagtacacattttatctgcaggaagaagccatctattctcaaattattatttcttgtgacactgatctccttttttatacagggagccgcgacagtaggttttccgttccttgtacggaatgtgcttggtttaaatgcaaatttttacggtgcagcggaaagtattcttggatttgccagtattgcaggcggtatcctggccggtctgatggtcacgaaatttagtatcaggaagctgaatcttcccatcttcgggttaggattgtttttgcttcccataggcctattatttttgttttcgattcatacatatgcaagatatattgcactggtggttttcttctcttttattcagatttccgcctgtatcttttctatcttcggtttatccatcatccagcagatgacccccgaacacatgataggaaaagtgatggcttacactgcaacgatcactctgtgtgcccagccgctgagccaggtgatctatggtattttgttcgaccatttttctgcggctgtctatattgttgtgctgcctaccggatttatattgtgtgtcattggtcttgcagtcaagggattttttctgagactggcagaagaaacatcaatagatcgtacacctgacatcagctgattctggaacaaagtcaaaaaatcacaagaaaggcaaagttttttgacttcgcctttccgtcagatattataagaattttcactcatttgaatcctgcaggcaatcctcaagctggcaggatactgtttgaagctttgactggagtacgacttcaagcctggtggcagacccaattaaacgtgttactgcactattaagatgaaaaagctgagtacttgttacaccttccatgccggcactgatcctgaacaagataaaatccattttgttattctggcggcagtcataatgccggttcctggattgcaaatcttaatgaggactatattgtatttacttgacaatatcaactaaatggaatatagttgatattgtcaagtaaaggggggagggttgtaatggactcgtttgctttctatatatcggttctccgaaagaaatttactcaatactgttctggcagactagccgagatgaatgtcacttatggacagctgtttattctaatctttgtaggaaagaagggaaaatgctcgcccaaagagatttcgatttctctggggttggatccgggacatttgaacaggacaatatcgaagcttgaggagcatggtttacttttacagaagaaaaatgaacaggacagaagagcgaagatcttaagtttaacagacaaaggaagacaggtgtttgaaatgagccacgatctgttctatcagtgggatgagatcgtgttagaagcgctttcagacgcggaacggctggaattactgcggcttttaaaaaagacagccagccatcgttagaaaacaagatgatatcagagattggaggatacccatatgacaaaattacagagttttatgaacattttgacaggcagttttcataacatggaacaatatacggatctgaaaaacaaaggggtggaggatttcccatacgctgaacatgtcaacacagtatgcaatgataaaataaagaatctgcccgctgatttcggaggaatctttttgatcgaagagagccgtttcaagttaggtgaaaaaacgcatcatgcgccgcatttattcttgtttacagaggaagaagagggaatcaaattaacctcttacgaaattccgaagggatataccagggacaccttttcctatgaaaatttatcagaagcagattattatgagctggagctgtcagaaaaatttaccccggcaatttttactctcaaggacggaatatgggagggaggaagtgtcagcatgttctctcctgtactgaagtttacgttgtctgagcgtttttcagaagagcagcttgaggtttctgagactatggaagtaaacggaaaaagaacctttggctatgatgaaccgatcatttataagagatgttgaaccgcccatacatagtctatgaccggtcggaacttccattctaaaataggacagagaagtctgcttttgaacttctctgtcctgattgttatcaataagagccttatataaacttgggagcatccccgctttctttgctggtgatatcccagatatcatcaaaggcgatctcctcttccccgacaaagatcttgcggaacaccgtatcaataaaagctgcaattccctccgttgttttgtatacgccgtttttataatggaggatatgcacatacgtccctctttggatgtttgccatagcgttatttaaccgtctggcatcctcttccgtcaactcatgctttggttcggtctcccgttcgatttcccgaagcatttcatcaaaccctttcaatgcggcaaacgggagaaactgccttgcccgttcagctctcattgtggcctccgatcagctgattgcgtttccgggcagtggccttatcgtagaggctcattccccgtacaacagcattttttccgaagcgttccttcatcgacaggacagcgtcctgaaggcgtgcttctttttcttttgcctcttcatcagagaatagatgcagctggaggcaggcgttctctcttacacggtttgcacccacagcaatccttcggatcgggctgtcccttcggactgtctggcggaagaaacgctcaaaatgacaagaaaggtcttgataagaatccgtccggtctggaagtttcctggtacctccggatgacggcccttcaccctttgcgtatccgatggacatggagatagagtctgtagtcagatggcggctgcgaagctccagagtcagagagtccaccatctcttttaagaccaagagggcgttgtcataagaataattttcaaaaaggatctggctctgggtgaccgaatgatcctttgcctcgtaggcatggatgtcctgaatggtgcatggctccctcccgtgtgcatggtcgatgaggaattccgcattgacgccaaactctttataaagaattttttcatcgatatgggcggctccatagagatcctggattccatagtgcatcagacgttttgcgatcccttttccgatgttccagatatcggtgatgggacggtggtgccagatggtttttttgaagcgttcctcgtcaaggaaaccaatgtggtccggagagtgttttgccgtgatatccagagcgacttttgcaagaaaaagatttgtgcccacaccggctgtggcacagatgccggtctcttgatatacggcatccatcagcataacagccatgtctttggggcttttttcatacgtggcaagataaggggtgaaatccataaaacattcatcaatagaataaacatgaatatcttctttgctcaggtatttcaggtaaatggaatagatccaggcggaatattccatataaagtttcatccttggttttgccgtgatatagctgacggactccgggatttcaaaaaggcggcatcggtttttgatgccaagggccttcatggccggtgtcacagcaagacagatagcgccccggcctctggtgggatcggcaaccacaagctttgtctcaaaggggtcaaggttacgcttgacggcttccacggaagcataaaaacttttcagatcaatacaggcataaattttctctctcataaatgtctcactcctttctggttagagtatagcacagtcaacacaaggaaagaaacatatgttcgataaaatccaggcggtaatttgtggaaaccaatcagtttatttcatacccttcgtagaggccgatgtatttgattatatagcagaaagtcaatacaacgcaatttacatagacatttgagactgcatcaataaggatatttacagaaatcaaatggggtcctctgctaaagaaatatgaaaaatttcttattttaaaagaagttaaactaaacagatggatggattgttggtgcaggtgccgggcaaagtatgagataagaatatagtaaagctatgatcacagatgctaagaggtatgtagttaagaaaatttaaggtaaagaaaaatttcgttggatattatttgaagatattgtataatgggacaaaaggagaatcgttatgaataagctaattgacagattgttaatcgaacgaaaaattagagatcgttctggcatctatggatatacacagagatctctggcatataactcaaataaaatcgaaggctccacattgacagaagaacagacggcatcgctatttgatgaaggagtgctgccttctacagatgattattatcgagtcaaagatgtagaagagatgaatgggcattttctcatgttcaaccggatgttagacacattagatcaagaactaacatctgatttgatgaaagagtttcattatgaattaaagagtggcgtatttgaggatcgtgcaaatggatatgccataggagattttaaaacacgccccaatatgattggcttatatgaaacggtacatcccaaagaggtgtcgaaagccattgatgatttacttcattggtatcagatttctagaaaaaatctgaaaacgattgtgctttttcatgtaaaatatgaatctattcatccttttcaggacggaaatggacgaactggcagaatgattatttttagggaatgtcttcgaaatggattgctgccattgattattgaagacgaaaataggagcatttatctgaaaggattgaaagaatatagggaaacgaaagaaataggtattcttacagatcttttcaaaaaagagcaagagcaatacaaacataaaatggattattttgaagtacagtaaacttttaaatggattcgtatttttcgagagaggtttttcctctctcttttttgtttgccatactattaagaaagaggagcaatccggcttgttatacagcagactcctgtgaaaaatggccataccaggttgatcttcattgtgaaggatacgggaatcggtatgagtgaggaattctcgaaaaggctttttcttctctttgagcagggagatagttctatattatggaactacggcagaacatatccgttccagtagctgggaagacgcacagacagtagcgatccttgccatgacagccaacgcattccgtgaagacaaagaagcagccttagcttcagggatgaaagggcatcttgcaaagccggtcgatatcaatctcctttataagatgatatttaatgcattatagaagagacataacagtggattatacgttcagtaaaatgaatgaaatatgttaaacaaatatcctactataatgatcccgatggtgcagatggagataaaaagagcaagaagttttggttttactgcttttttcagcataatcatagacggtaaactcagtgtggtgactgccatcataaaggcaaggatcgttccaagctgagctccttttgcaagcagcgcttcggcaataggaatcgtgccgaaaatatctgcatacaatggaaggaatcaggaacatggacttcggggaaagccttattttagatgtcccgaacctggatgaagtatataggctccatgatatccactttagacagtaaaaaagaatcccctgtattcttgttgaatttattgaaaaaaataagtacaatagtaagaaggaatcaatgatgtttaaacaagaaaagaggatttatgaagaagtacagaggggccgtcttctttgattatgacggaacgaccatagacgagactgacaagatcaatggagccacagaaacgaccataaaaacgttaggaaaattaaaggataacgggtatttaacgatgctgtgttccgggcgcagcaagcgttttctggaggcagatattgataaatttgaaggagccatcacctgcaatgggtcttatactgagatcggtggggaaactatggatgacatccatatcccggaggaattagtgcaggaagtcattggacggtatttttcggaagacacagctctgcatttagagactcaggacgttacatattatatgcactataaccaaaaattctatcaggatttccgagattttttaggattcccagaacgatggtttgctccttgggagagacgcaaaaacgaacatatcacaaagatcgttgtgaattatcataaagaggatctgatcgaagaattgcaggcagagtttgaagacgtactccagtgtgtcaaaccatttgaggacagacggatcttagacattacttcaaaaggtgtgacaaagggggatgccattacaaagcttttagaccggctcggtattgatcgaaaagacagctacgcattcggggattctgacaatgacattgagatgttaaagaccgcggggacagggattgtcatggggcggcacagcaaggcagcaggcagggccgcaaccatgataacaggaacagtcaaagaggaaggaatcacacaggcgttagaaaaactaggcctgatctaagaaaatgatcagatgattacaagaagaaacattaggtgcgcctcagtcccagtccatctacgggacatcacaaagacagatatcaaagataaaacatcctggcagatagaaagctgggatgttttttaattttacctaatttttcaatgtcttcgttatcttatctggtatagataggaaactacctttatggtagaattcttctcagaggtgatgttaagatgaaaaaaattgctattatagaagatgatttagatatttgtaaaatgatgagccggtttttacagaacaatgattacatagttaagtatgcattacaaggcaatgagggtgtattattatgtgagtcatttattcctgatttaatcgtattggatatcatgctgcctcaattaaatggtcatgatgtgttaagaaagcttcgagaatttacgaacagacctgtcattgtagtatcagcaaaaacaatggttcagtctaaaatcgaattgttaaaattgggtgctgatgactatataacaaaaccatttaatttatatgaacttcttgcgcgaatagaagcaaatttaaaacgtatgccaacgaaccagaactttgaatacaacagtataaaatataaagatatagagattaaaaattttactgtatccataaaaaatactgtagttccatttacgtcaacagaactaagtattttacagcttttaattcaatatccgcaaaaaattttttcaaagcagaatttatatgaatctatttggaatgaaccgtatgcttacgatgacgatacaattaacacgcatatcagccgtatacgaaaaaaaattaaagctattgccaaagaagactatatacagacggtatgggggattggatataaaatcaaataaatagctttagattttatttagatttgttatatatactggcatagaaagaagggagtgttgaacatggctagaacaatatgtgaaacaaaaaacttaagtaaaaaatataaaaatttctatgccttaaaaaatgtaaatttaacaatacacaaaggtgagatttacgggttaattggtgaaaatggagcaggaaaaacaactttgatccgccttttgacaggtcttaattttaaaagcggcggtgaaattgtcttatttgggcagaacagtaatctgcaacaagagcgactgaaaattggctgtacgattgaaatgccggctttatataaggatatgaccgcaaaacaaaatcttgaggtacaaagaatacaaagaggcattccaaataagaaatgtgtttcagatactttgggatttgttgggttagcccatgttggcaataagcgagtttctaatttttctcttggaatgaaacaacggcttgcattaggcgttgccttgctgggggaaccagaatttttgattttagatgaacctgtcaatggattagaccccactggaattattgaattacgagaattgttaaaaaagttggtaaaagaaaaagaaacaaccattttaatttcgagtcatattttaagtgaattgcaccagcttgcgacttattatggctttttgcataatggggagcttttaaaacaaatttctgctgaaaaattaaatgaagaatgtaaacgacatatatgtttaagaacagatgatgttcagcgaacagcggttatcttggaaaatcaattaagtatcaagaagtattctatataccccgacaaatccattcggatatttgatgatttagataaaacccgtgcaatttcgaaagtgctgtcagataacagaattatgattgatgaaatttcaattcaaggagaaagcttggaaacttactttgaaaatctgattgggggtaggaaaaatgtttaatcaaatcaaagcagaattttataaattatttcatacaaaggctctgtatttaatgcttgttttgatcttatgtgtttttggtatattttccataggtggagaacagcaatttgttgtgtcaagttcaagtgtagacaataaatgggaaattggaaaaacagtaggatttcttgcaagggcatatagtgataccttgcacccttttctaggagaagtaataaggacggctacttcatacacagtatttttttggctgattattttgatattttcggtaacctttttttcaagagaatatcaagactcaacaataaaaatcgcgattgcaagtggtcaaagcagacttaaattttttttagcaaaatatcttgtaattacaattaccagccttgttttatattttttatttataatgactgcatttataatagaatgtataaagtttcatgtgtcattggaattcctaaatattatgccaatgctgaaaattgctattttaaattgtatggtgatgtcaggatttatcagtataactcttatgttttgtattatttttagacatacagccgttgttgttggggtaatgtgtttattcacatttagcgctcctatgatttatatgatgacatgggaccgtatgtctgtacaatcatgggaggttttactatatttaaaaatcaaatccaatgtattattggatgaatacgtgttcttacaatatacttcctggtatagaaaattccattatcctttattttataggagtgatgatttttacatctataatttcatttgcaatattacgcaaacaagaaatacgttaaaaagagtggaaaggggatggatgaagatgtggtatgttatattggttttaataattttcatattagtaatctacctctacacacttatcacacaaattcgtaatttaaatgggcagattcaagaaaaccggccaatccgcatttcattatttagtaaatatatagaagaattggcttctcaaatcattgaaaaagacatagaacataaaaaattgcaaattcaaatcaaacaagaggaagaacagctgaagcaatccatttctaatatcagccatgatctaagaacaccgttgacatcaatgcaaggctatctaacactcttacaagaatgcaaggatgaagaagaacaaaaacaatttttagatattattaaggtaaaagcagattatctaactgaattaatacaagaattttatgacttatcccttttagaacatgctgaatttgacattgaaatacaaagagtggatataaacaggattgtgaccgattgtgtgctagaaaaatattgtgaatttaaagatgttcagccaataatccaaacagaaaataatcctgtttggattattggaaatgacatagtttgtaaaagaattatagaaaatttaattgtaaatgccatacgttactccgatgattatatcgaaatatccataaattccaacggagtatttacaataaaaaattcaacacacctatcagatgatataaatgtagaatcattgtttgagaaattttatactgcggataaatcccgaacacgaggaagttcgggtttgggtttgtatattgtcaaggaacttcttaataaaataggcggagttattggaaacgtaaattataaagataaagttttaataatttcaattcaattttcaatggcaaattaggtgtgtgatctaagaaatgcactaagttttgaaagaaaaataaatagacagttgacattttccaaaaagcgtcatatgataccatatagttcacaaagtaaactaagagatgtggagggtgtgatgaaagatgaaaaatggctggaatctatggaaaagctaggaactgtacggctgttttccagtctgtatgtaaaaaaatcacgcaaaggggcattgacttcagcccaggagattgacctgctctttcgcacagcactggcagaagaggccctgacgcctttggacttaagttatgccatgggcatcagaaagaatgcggtgagccgtctgatcgaagatctgacaaaaaaacatttggtccagaagatagagtgcaaaaaggataagcgcagttattatttaaagattaccgagaacggcaaaaaagaactggacgacacctattattactatatggaaccgttctatgaactgcagagaaatctgggagaagaagattttgatacattaatgaaactgatccaaaaggccaatgacagtgctatggacaagaaataaggaggaatttttttgacagtatatcaggaattacagttaagctcaacaggatcaaaacagctgatccataaaacagaagataagaaggaaaaaaggcgtcacatcctgatctataatgtaaaagtatatctggttgtggcattttgttttgcggtggtcactgtttacagccatctgttcggctctgcaaacagtgtcgtgggcgttaccgtgctgctctctctgctggtgttacgtcaggcggattttgggattaaaacatcccatggagttggagtcatctttttgatctttgggatcttggcagcagggccgaggctgtcaaatatggcgtctgaccctgttccggcattttttattaacgtgatatgcattctgggaatcgtgctctttagctgccacaatgtgctcatgtcaaaccaatccacctttgtactgggttatctgctcctgcagggatatgatgtgacaggacatgagttctatctaagagttgcgggcctggccgttggggcagccgtgtgtgcggcggtcttttacatcgatcataaagacagatcctataaacgaagttttgcagacctgttcagagaatttgacctgcgatctgcgcgtaccagctggtacctgaggctgactttcggcatctccactgcgatgctgatcgtatcactgctgaacattccacgggtcatgtgggtcggtatcgcttctatgtctgtgctgcttccatttacaaaggatatggaatacaaagcaaaaagacgtgctccgtttaatattctgggatgtggtatttttctgctgttatactggatccttcctaaaagcatgtatcctttcattggattgctgggagggatcggcgttggatattccgcaggctacgaatggcagacagtatttaatacattcggagcgttagccattgctgccagcgtgttcggtttaaaagcggcaattatcctaagaattgtgaccaatgtagttgcttccctttatgcggctgtatttgacaagacattcagaaaagcctccgcatggcttggcgagatggcagacagccagaatgcaatggaagatggtatctgacagacatggaagcgttttacgaagcctgcatgtggggaggacatacctgtgtaagggggagaccttattgataccggatggtacgggtatgctggagttcaaaggagaaatggatctattcccggcgtcctacagaaatgaaaaatagagaaaaaaacctttctgcggcagaagactactgccatagaaaggccttttttattctgacaaggcatttatttaaaggtacttttctccatacccataattctcaactacatagtcgatgtctttgtcgccccggccgcttaagcataccaagatggaaccttttttcatttcctttgctttttttgtggcataggctaaggcatgggagctttcgatggcgggaatgatcccctcatagcgggataactcaaagaacgctttcatggcgtcctcatcgtccactgttttatagtccactctgccaagatcatttaagaatgcgtgttccggtcccacggaagggtagtcaagtccgctggcgatggaatagaccggcgccggctctccgtccttgtcctttaacatgatgctttcaaatccatgcatgacacctttttcaccataagtcatggaagcggcgtggtcgccgagatttgatccgcgtcctaacggctccacgcctacgatgtccactggctcgttgatgaatggaatgaacataccgatagagttgctgcctcctcccacgcaggcgcatacaacatcaggaagcagaccggtcatttctacaaactgatcttttgcttcatagcccaccacggactggaagtcacggaccatcagcgggaacgggtggggtcccagggcggatccaatgcagtagatggaatccttgtagttcttagcataagactcaaaagctgaatccacggcttcttttaaggtttttaacccgtgagagacagggactactttggctcccagtattttcattctagtgacattcggtgcctgtttggcgatatccacttcgcccatatgtatctcacattccagcccgaaaaaggctgccgcagtggcaagggccacaccgtgctgtccggcgcctgtctcagcgatcaggcgttttttgcccatgaatttggccagcaggccttcccccatacagtggtttaacttgtgggcacctgtgtggtttaaatcttcccgtttcaggtagatctggcagttgccgtacagcttggaaagccgctcacagtgatagaccggagtaggccttccctggaattctttgcggatccttctaagttcattgatgaactgggaagaatggcagatagtctggtaagcctcggagatctcttcaaaggcagggcgcagttcatctgttaaataagctccgccgtaagggccgaagcggccctctgaatcaggatagtttctaaggtatgttctataatccataatttcctcctgtgttattgttgttaagctttattttatcacgaaagcttgtctttatcaaaaccaagctgtagaaaaagatttctacatacagcaaccccctctgagatatgttcggaaagtgcatctgcaaaaccgtcaatattttgcatgtggacttctctcagaagccttgcggcatattctgtatagaatttgctgttttccagctgctgaaagaatatgtgaagggtgtgtccccagagcagcaggtggtacagctgatgataagtttcccggatcatggcagagggacttttttcgcctatgaactgaagacatgtttcatccagaagataaagggtatctccagatatacatttttgaatccggtcatccagcgcttgaaaatctgtatcatccaacacagaaaaagtgtggtatgatacgtttttgcaggtcagagcacacatttggagagcccggaaaaagaaaataaggttggtctggatctgcggcatagaaaaatcaggagcctccagattttttttagaaatgacttttgtcccgactccgtttaaggtttctataacccgcatatttcccaaaagttcaagggttctacgcatagtgatcagagacacatgatattccttggcaagggtctggcaggacggtaacaattcttcctgtctgtaaattttattatctattttacttaaaatatcagcggcaagtgaatagcagagctggggacgctttctgtaaatgtgccaacggaagggtacttgtttgacccgcattccttttttctgcaagttagacagatattcaagaaactctgccaataggatctcgtggaatttttgagcttcttttgatatctcatcggcctgtccgtgttcaaacaaattcaacagacgttgatagtgggaaaagacctgctggcctgcattgtcaaagtctgcaggacggtggagatatgggatgcggagataacggatgatttcccagtatagtagattaaggaacaggggattcttaaactgctgggcaatctcagcataaaacaaggttatctgtttggctgcatgtccccctgtctttttgagctgccagcggatacgttttacggattcatggttttgttccttgaaatacaggctgttgacaggatcaaatatgatgctggcagaccgtgcaatgtcttccattccgtcttttctggaaaggaaataaccaatatactgttgctcagactgtttaaccggggtataggtaactgtggcagcctttcgtgctgaagtttcaatatactgccgttctttcaatttagataatgcggacctgacggtgagtgtactaacttgaaattgtctgcagatattgctgatggaaggcagacgctctccatacacatagtaaccggactggattctggaagtaaaataatcgtaaatgatatcgctcatgctggtatcctgcattggttggggcctcctttttgaaataatctatattatatcatatttctctgttaaacaaatatattggcagggctgtcattccatattgaacactccaggtggccaagcatattcggagactttacaggaagaaactttcgattctcattatctatgcttatgattggagcgatattgaaaaagaggctcttgacgcaggtgttaggatttctgttaaagccggtctttttctgttctgacagtcacaaatctgtgattgttgggatttttttagtgtcccggcattccgtatgataaaatagaggggaactaatacggaggtggaggatgcagaacatatttgtgatagaagatgacagagaactaaatgaggggatctgctatgctttggaaaaagagggatacaatacaataaaggcttattctctaaaggaagccagagatttgtatttaaaagaaaaagtggatttagcgctattggatgtcaaccttccggatggggaaggattttctttctgcaggtggatcaaaggccagtgtgacattccggtattgtttttgacagcaagggacttggaagaggatgcgttgatggggtatgagctgggtgctgaggattatatcacaaaaccgttttccatgaaaatactgaagcagaagatcaaagtggtgttaaaaagggtaaagcagggcggacaggagttgtttgacgacggatttttaaggattgacttttctgcagcaagggtatgggtctcaggaaatgaatgcatggttacacccacagagttccgtctgctaaaacagttcgtccaaaacaggggccagctgcttacctacaccatacttctagagcgcatctgggatacaggagcaaattttgtggacaagcacgctctggccgtcaatataaaccggctgagaaagaagattgaagaccaggagcatcagtacatatcaaatatttacgggatgggatatcaatggatgaaatgacggttttggcagcagctctggtcctgatctgtatttatctgggctttagcaggcggcgtatgaaaaaagagatctatggctttaccagccgcctggagcggtgcctcgatgccatagctttgggaaaagaaatggaagaaaccctggaggaaggagataccctgtggggaaaggtatatgagaggcttaaacggctggaccagatctggcataaaaagaatgcagaaaatctgaaggaaaagaaaaagatcaaagagctgatctcggatatttctcatcagacaaagacacccattgcaaatattaaattatacgtggagcttctccaggaggagggaaatcagcaggaagcagcccggtttctgaaaaagatcagcgcacagacagaaaaactggatttcctgcttaagagtatggtaaaaatgtcacggctggagactggtgtgatcgagatccattgtaaaagacagcctcttttaaagaccctcggcagagctgtatcatccattgtgccgaaggcggaacaaaaacagattcggctgtccatggactgcgacagccgaattacagtcctgcatgacagcaagtggacagaggaagcattgtttaatattctggacaatgcagtaaagtacactgggcgtggagggagcatccagatctcagtgactgtccaggaaatctttacaaaaatcagtataaaggatacaggaaagggcatcgtcctggagcggcaggcggaaatttttacaaggttctaccgggaaccggaggtgtccgatcaggagggcatcggcgtagggctttttctggcaagaaatatcatgacacttcagaacggctatattgaggtccggtctgaaccgggagcgggggctgatttcaggctgtatctacccaacagatgatgtttatcacagttttgtgaatgtgatgctttgtgagcagtttgtgatttttatgagatatgctgataccatcagagaaaggagataaaacaatggaaacagaaattgtaaacacacaggcattaaaaaaatattacaaactgggaaacaacacggtaaaggcgctggacggagtggattttaaggtaaaagagcgtgaatttatcgcaatcatcggaaagtctggaagcggaaaaagtacacttcttcatatgatcggaggcctggattctccaacagcagggaaagtattcgtaggtggcagagatctgggagagatggacagagaacagcttgccatcttccgaagaagaaatatcggctttgtattccagaattacaacctagtgccggatctgaacgtctatgaaaacattacactgcccgtggaactagacggcaccccggtggaccgggaattcgtagatgagatccttaggctgttaaatctggaagaaaaaagagaggcgatgcccaacactctgtccggcggacagcagcagcgtgtggctattgccagagccattgcttcaaaaccggccatcattcttgcggatgagcccacgggaaatctagatacggcatccgggcatgatgtactggggcttttgaggtcagtggcaagacagttccagcaaaccgttgtgctgatcacccatgaccaggatatcgcacagctttcagatcggatcgtccatattgaggatggcaggatcgtgagaggaagtgggaactatgctggaaaataataatcataaaatcatcacaaaaatggcggtgtcctctctcaaaggcagccgtcagaagtttgcagtaatgactgctgcggtcatgctctctgttttcatgctgttcagtgttctgaccgtgggaaccacctattttcaaatgcagaggatacaaaacattcatatgcagggagccgattatgacggagtgctgatgggcggatttacagaaaggcagaaggcttactgccaagaccaccgggatgtattgtcagcagggatcagtgcatatgcgggatatgcgcaaaaaactgatgcggatgacactctgcacaccggactggtctggtacgatgagacatcctggtcacgtcagatgaaaccggccagggaaaaggtacggggctactatccgcatagagaaaatgaactgatggtcaccaaggaggccttaaaagactgcggaaaggagcatttggatgtcggggattcttttgaactgacttatgcggacaaaaagggaacacatacaaaaacttttcttatatccggtatctgggaaggttatggggaacagcagatgttcggtgtatcagaagcattttacaagaaaacaggatatcagctcagtaacatgggtgtgctgcaggtgaagtttaagagcaagatcctctctgatagagaacagaagaagtttcaggagggacttcatctgagcggccgccaaaattttcagtttacggggcaaatggaaaagtccattggagtcctggcaggcatggccgggctggtgctgatcacctgtctgagtgcgtatctgctcatttataatatcttgtatctgtctgtctcaggaaatatccgttattacgggcttatgcggacggtgggtatgacctcaaaacagatttatcagtatttgcagaaacagatgctgattgtgggtgcagcaggaatcggaagcgggattttgctcggactggcgacctcttttctgatcatccctcatattgttaggaccctcggtatccgggaaagttccatcaatatttctttccatccttccattttctttgtgagcatttttattgcggcagtcacgatatatttgggaagcctgaagccagtgaagattgcagtatctgtctcccctgtggaggctctgggttatcaggtctcaacagggaaaaagagccgccgcagggagggcagaggcaatcttctttggaaaatggcaagagagcagtttggaagggataagaaaaaaacaggaattgcggttttctcccttgcagccagtttatccatatgcctttgtctgattacgatcattgacagccatggggccagaacgattgtgtccaattatatggacacagatctggtggtgagaaatgacacggctatgaaggaaaacgggaaagaatggaagcacatcataaagccctcagttgtaagagaggtcaaagaaaatgaaggagtgaagaaactttacaccatgctgggaacaaatatcgtggtgccgtgggagccggaattctctgatacatggatgagaaaattttatgaaatgtggatgtatacgtcttataaagatgatatcaatgactataagaagcaccctgaaaaatacggatcagtgatggtgggtatcggtgatgatgaatttgaataccttaacgaagggttggaacatccggtagataaaagacaatttatcaacggaaatacttgtatcatctatagaagcggcctggaattggacccaggtaagacaaaaagagtaaaataccgcctgccggggcagaaaacaaaagatcttcagttgaagatcgccggatttacggacgatgattattatggaggatctatgggaaaagggccggttgtcatcgttagcagccgttttctaaagcagcaggtaaagaacccttatatcatgaagttaaatatccgctatcggaaggaatacgatgaaaaaacagaggctcagatcaagaaaagtctggaacagggaactgcctcaaaggacctttattttgattctaagatcgaaaacatgaaggaaaccagaaaagcacagggaaatatgaccggggtaggtgtggggatcgccgtgatccttgcgctgatcggtctgatgaactacgtcaatactgttttcggaaacatccagagccgccgggtgtcactggcggtcatggaaagcgtgggaatgaccagaaagcaggtgaaggttatgctcgtgcgggaaggagtgttatatgcagcatcctcaattctgatcgcagccacggcagggctggctgccacttatctgtgttaccagtccatgaactacatgggcataccgtttagggttccgtggataccagtactggccgctgtgctgatatctgtaacggcatgtattttgatccctctggcagcatatcggattctggaaggggaagcagctatcgcagagagaatcaaaggttttgaataaaactctggcgcctattgttggatttcgatttagacatcatgtttataagacatttgagcgtgcgatggcaaaggcaagggcagagatcgattccggttttccggtcgtgctcggtaccctggatatgtttcatttatcctattttgagaagttctatcacagggagcatatcccattccattatgtgctgatggccggatatgatgacggggagcagacggtttccttatatgactgtggacgcagagagaaattaaagttatcctatatggatctgcgtcttgccatggactgcagctgccctggcctgagccggcccaatacggtctgtaccatccggatggagtctcaaaagaataagtatcagatcgcaaaggaggcgctggctgtaaaaggggatctttttttaaatcctccgatgccgtttctgggatacaaaggttttgaaaggtttatcaaggagcttcctcagtggaaaacagacctgtgccgggaggattatgataagatattgaagaatatggtcacattttttggaacagtgcctatggtgccaaatgtgctgagaggcattgacctgcctgatgaagttgaatttaagggcggatttgaaaagatgggaagcatgctttctcaaatgggagaagaatacgacagagatgattggaataaggccgctgtcattttttatgagggagcggatgtgatggaacagatctcgggtattctgatccgttacctgtccggtcaaggggatgaaacagaaaagcttcctgaaaagtttgggcatgtacttacaaaaatgaaggaagggtatcgtatggctgcagaaatttcttcttgacaagattggattaatgtacaacaattgttatgtaacataagtaacataacgatatgattacgaaggaagtgtacacaaatgccgccgaaagcaaagataaccaagcaaatgattttgaacactgccctggatctgacaagggaaacaggttttgaaactgtcaatgccaggagtatcgcgggtaaactacaatgttctacccggccgatttttacttgttatgaaaatatggatgcattaaagaaagattttctcgcatttgcatatgaatactacgagtggtatgtggaagattaccgcaatagagtcaatatcagcccctgtttagtcctgcccctctcttatattgaatttgcccgggaagaaacacacttatttaagctgctgtttgtaaatgatatggatttggatatgacagaggcaaaggatttttataaggaggcggacaatgaaaaaagggcggaagagttttccgaaattattgggatagggcttgaaaaggcaaaagtaatatttttggatttgtttctctatacccacggtatagcagttttgacagcgacaaaaaaattaacgctggaccggaagagtgctgagaaaagggtagtaaatatcttgtcactttttatacgggaagaaataccaggttgggatatatgcaattgaggcatgcggatcatgacaaaaggggtgctattatgaaaacaaaccagtatttaattgacttttacaatcaatacgacgaagacagccggctggtgttaagacacggttccgttgagttccttactacaatgcgctacattaaggaatatctaagaccaggtgaccgtgtgctggaagttggcgcgggaacaggtcggtattcccatgcgctggcacgccaaggatatgctgtcgatgcagtggagttagtagagcataatattgacgttttccgtcagaatacacgatccggcgagccagtcaccataacccagggtaatgcgatggacttgtctgctttccctgacaatgaatatgacattacgctgttgctggggcctctgtaccatctttacactgcgaaagataaactacaggctttaagtgaggcaattcgcgtgacaaagccaggaggcgtgatctttgctgcgtatgtcatctctgatggctgcctccttgatgaaggcttccaacgtgggaatatcagtgtcacagaatatatcaaaaagggattgctggatccttccacgttcgcggccaagtccgagccaaaggatttatttgaattggtccgtaaagaagacatcgatgaattgatgacttcgtttcccgtagacagactgcattatgtggcggctgacggctgtgccctatttatgcgggaagccatagatgctatggacagcagcacgtttgaattatatttaaagtatcatttctctgtctgtgagcgggaagatttattaggtattacgagtcatgctgttgacatcttcagaaaagtatcctagaaaacgtttcacaaaaaatcatcacaaatacgcccgtctggcacaaaaccagacgggcgtatttctttcgtttcggctatatcctgtcttaatacttcattttcttcgtcaccacatagataaattcttctggtgtaggcgtgctgtttccaaaatacttttgaaactctgcctgtttttccggatctgggttattttttgcgtcctcaatggtctgctgcatttcttttctgacctcggcaacagaaatcccatgtgcgcgggcgacttcttttattaaacttcttgtatctactcttttaaatccaatcatatgtacacctcatcttaaaattatcactggaacgtaaaacggatatcgactataacttatagaatgatttattttgtgacaccattataatacattttgggaaaggttacaatatataagaatggttttgaagaaaggagtgtgccgtctatggagcttgattttaaagccataggaaaaagaatcaagatcgcaagaatcaaacaaaatttgacgcaggaaaccgttgccgataaaataggtgtcactccacagcacgtcagtaatatagaaaccggaaattccagcgtaagtcttacgacacttgtcgcgatttctaatcttttgaaggtgtcagctgatgaattgctgtgtgatacaatcctaattgcaaaaccagtctttgaaagagaagcgaatgagctgttcagcgattgcagtgaatatgaagtacgtattttggtagatgttctgaaggcaacaaaggattctataagaactgtaaaactatttgaaaccaaaattaattgagaatgaataaaaccgtagtctgtagatcacaatactgtgaattacagctacggtttttgtttgtgtcagatcaaagaatcttctttttgtttgatgaatgtctcaaggctcctctgatcgattagggcaggcacgacaccttcccgtgagacgcagaaacctgccgcgtaagtggcaatccgtactgcccgttccagagaatatccataaagcagataggccgccagggcgctgataaaggcatcactggcgccagtattatctacggacggaaaggaaaccgccgggaaatgcttttctagttcgtttgtccggacatagcagcccttttcaccacgtgtgacgatgatgattttgataccgcattccagcaggaatgcggttttttgctgcagggtagaagatcccggacataagtcattcaattcatcttcatttgggatcaggatatctactccggacagcacctcactgggcatctgtccgtacacggaaggcttcaggatagtctttgccccatattcatgggcaatccggcaggcctcagcgaccgtatccagtgggatttctgattggatcaggcagtagcctgtatttttaaagaaacgctgccgtttcctgatatcctctggagccaggatgtcgtttgcgcccggcaggatcgagatgatggactgtccgccggattccacaaatataaatgcttttcctgtatcagcctggctgcatcttttcacgccgaaaggctctaccccgtactccttgagcgctttatagatcgaggccgagtccaggtcagatcctacatttccaatcagagttacacggtgtcccagttttgccgcgccgatggactggtttacgccttttcctccgggatagataaaggaggatgaagtgctgaccgtcttgccgctgtggggcagctgcggtacattcaggtaagtatcgatattgatactgcccaccacggtgatcttcggagcgtttaggttaaaaggcacactgacggtagtctgattgtccagatgaaactcctggacaaaagaatgcaggtcatctgtccgtttttcaatttcggcgatcatcttattgcataaataggagccaaaatctgcattcagcatcgtataggtggagatctcagaaatatcagggaaagccagatcctccatcgtgtcatttttcagggagatgagtgagatatcctccggaattctatagttcagcgtgttcatgagctgatggaactttaatgcctcacggtaatgagatgatataacagcactgatgctgtgggagtttactttgtgtatcagagactcgtccagatcataaaagatcagatccttgtccaattttctgtgattgtcaaacaggcattttttatatccgttcaggaaagcggaggtccggcggccttctttcaggatacaagcaatatcccggtggcgtcggttgatcaattcctgggtgatccggtatgcagcttcttcgtatggaatcatatgagaatgatcaccgccgttgggtccgatggtcatcatgggaatgttcatatcctgaaaatgggaggtataggaaagactttcagcggtcaccggctcccagataatgccgtccacattgttcttgcacaaagaagttatatttttaagttcctgctccatatcggagtaactgttatatacaagagtgctgtatccattggcctgggcagtctgcatgatcccgtccagtgtagaatccagggaaatggaagaacggagcaggacaccgaggatccatgtcttcgcaggacttacagtggcagcggcataaggagtataattgtactcttttacgatctttaaaactctttctctagtctcactgctgatgctttgatccttttgattgacgatttttgaaacagtggaagcagagacacctgccagctgtgcaatttcttttatgttcatatagttacctccagttttatcctacatcccataatagacaaagaaagaatagatgtcaatatgtccaaatgtgcaaaatatacaacagaataacagaaaaaaaggcagaaataacaaaagtgataaaaatattgacaaacgatgatctgagtgataaattctaaataggaaaatgatttcggaaaatagtttcttaaaacaaaatgatgcagatacaaagaggaaacagagattgtgagacaaagctatggaaagaggaggagaaagctatgagaaagaaaaagaccacattagcagaaagggttaaggcgcaattttcgaccaagtccttagtgctgatccctattgcagtcgggatcaacctaaccggcgggatgctgtgttctgcgctaaagctgccgctgtttctggatatgatcggaacaatcgtcgttgcatgtctctccggcgtatgggtttctgccttgtgcggactgctgacaaacatttttctggcactggcggccaatccggtctatctgccgtattctgtcgtgagcgttctatgtgcggtggtgacaggatgcatggtgagagcagggcttttccaaaaggtctggggagccatactgacatggctggtctgtacattgaccaacaccgtttccgcatctattattacgatctttgtatacggcggagcaaccggcgtaaccggcacctctgttttaacggccacattgaccgtagccacaaaaaatatcataacggctgttttgtctacgtccatgcttgaaaatcttgttgacaaagggatcacattcctgatcgcctttgtcatcatgcaaaaaatacctaagagattcctgagccagtacgcgccggacagtggcggagatgattgggaagatgatgaggactaaggaggagcgtatggcgaagatatcaaatacatttattccgaaacatacagtgattgagcagattcatcctatgacaaagattctggctgtgttttctttgggacttggcacactggtttttccatatttatggatcggaccggtgatcgtcataggattgtttgctgttgcctggctgggccgtatcttaaaagaatttacaagggttatgtttggatttggcataccggtcactgctatgcttctgttcattcagggatgctactatccgggaaatgtgacggtgattgcggatttagggtttgctcaggtgggacttgaaggcatccgctatgcggcaaaaatcatatgtacgctttttgtattcctggggacattctatatcatgaacaaaacgacttactcagggaaactggtagctgcgctgacacaaagcggcctgcccccgaaagctggatatctggtgcttgcaagcctgaatgtggttccccagatgcagaaaagaatggcggtgatcaaagaagcacaggaggcaagaggcgttgagaccggagggaacctgtttgccagaataaaagcttacatacctttgctggggccggttgtcatgtcatctctgacagatgcacaggagagaggaatgacactggaaaccagaggatttgggattcagggagtcaagcagacaacttatgttgaggtttccaagactcatacagacaaagcagtcaatgtatttttggtcctttttttcatcgttgctttggcggcgtcagctctgatgaaatttggacttatatagaaaagaggagaggaaatgggcaagatagtactagaagtcagagatttttcttttaaatatagacagacaaaacgcagagcgttaaagaatgtcagctttcaggttgaaaaaggaagcttcttctgtgtgatcggtgccaacggctcggggaaatctactctttgcaatgcactgaccggtctggtcccccactattttatgggaagatcgtcgggagaagttttggtagaaggtactccagtgcacgaaagctctgttgcggagttgtcatctaaggttggctttgtcttccagaatccgtttaaccagctgtcctacacagcaggtacagtggctgaggaactggcttatggtcttgggaaccgggggatacccagggaaaaaatgttcgagaaagtagagtatgtggcaaagttgatgaggattgaccatattctttccaaaaatccactggagttgtctggaggccaggtccagagagttgcgtttggctcagcgtttatcatggaaccggagatcctcgtgttagatgaatgtactacacagctggacccggcaggaagcgaggagatttttgatattgtaaagcgtctgaatcaaaaggggatcacagttgtcatggtggatcatgacatggaacgtgtggccagatatgcggacaagattcttgtcctggatcaggggaaggcggcttttgttggtaagccgaaaagcattttcggagaccccctcatagaaaatcatggtattggaataccagattatgtcaagcttagccgggctatgaaacagcggtatgataccgtctctgatattgagatcactgaggagccgaccataaaactggcaaaggaggttctcggaagatgaagattgaactgaaaaaactacgttatgtgtatccgtccggggaagaagctctcaaaggtgttgatcttataatagaaggaactgatcctgtggcactcattggacagaatggtgccggtaagactacggttgtaaaacatttgaacgggattttgaggcctgtctcaggggaggttcagatcaacggggaaaggattgaaacgcgttccacggcacagtgggcaaaacagattggctacgtatttcaaaatcccgatgaccagctgtttctggaatcggtaaagaaagaatttgaattcggtccaaagcagatcgggctgccagcaaaacagatcaaagaaagaatggagtggacggcagagttggtcggtttgtccgaaaaactggatatgcatccctttgatctgaccatggcagagaaaaaattctgcaccatcggggccgtgatcatgatggacccagacgtcttcatctttgacgagcctacctgtgggcaggatgtacaaggaaatctaagactgcacaggattcttcagacattgaaagagagaggaaaactttgtattactatttctcatgatatgaaatttgtcgcagataattttaatcggattgttgtcatgcgcagaggggaggtgattctggacggcagtgccgaggaggtgtttgcgcaggttgatatattaaatagaagttttgttttgcctccgccgattacaagagtggcgcagggggcgggattacaacagacagtttttacgacagaagcatttatggaagcattagaaaacgaaaggatggtttaaggaaatggcagatgtaaaaattcagatttatgggatcagaacagtggaagacgcaaggatggttgtggagatgggaggacatcatcttggagtatcctacggaaagatcaagaggactccggggcagctgagctgtgagcgggcaaaagagatctttgagggtgttcagccagaagcggtgagaatcggcctgacagtgtcagaggatattgatgagatcacagaggacttaaaagccgcattcccggatgtgatgcatttatccggagatattgagggaatcaccccggctcaggtgcaggaactgaaaaacagatttccaggacttaaaatcatgcaggcaatcccagttttggcgggtgtacctctggaagaacagaaggtcatggaatacatcaaggattatgaaggggtgtcagactttttcctgatcgacacgaaagcgccagctgcaggagatatcggggctacaggactcactcatgaccgggatattgataaaaagatcattgagagcacgaaggtaccttgcatcattgctggggggctggaagcgtccaatgtagcggaggccatccacatcacacatccatacggcgtggattcctttagtctgaccaactatgatgatgagcgtgctgacacagaacgctgcaaagatccggcaaaagtgcaggcgtttattgaggcggcgctgaatgcataatgtgatcgttgtcggcgatgccaatgtggacatcatcgtaccttatccccggttcttgaataaagagagaaccctggtagactacccagagccttctcttttgggaggcggaacctcagccaacacagcggttgcgctggcgaggctcggtgtgggaactagtctgatcggcactgtcggggatgaccagtacggaaggtacattcaggatgatcttcagaaagaaggcgtagatatctcagatatgattgttgagccggaactgaacacagtcggagtatttgcgtttattgatgaaaacggggaacgctatctatggggatggccgagggtggaccagtcctttaaagtgctggatgcgggcaaagtaccctttcaaaagatccagaaagcagactgggtacactcctctgggatgtgtctggcctatgacacttcagcaagggaaactgtgatcagaattttcaaagagagttttcaagcgggagttcccacgtcctttgatttgaatctaagagtggatgacggtatcctagatccagaatatgaaaaagcagtccgcgagattatccaatataccacatatctgcttggatccgggacggatgaatttgcttatcttggtacagagcgggattggatggaaaatgccagatcgtttgtctccgaaagccgtgtggtggtcgtgagaaacggaaaagacggttcttacggattttctttagaggaagagacagaggtgccggcatatcaagtcactgtggaggacaccgtgggggctggagatgtatataatgccggatttatcagtgcggtactggaaggcaaaaatctgagggaatgtctggctgccggaaatgcagtgtctggatatactgtggaacgaaaaggagccagaacctgccctaatctggaacagttacaaacgtttttaaagaaacatcagtagaagagaggagagacagtgatgaagaaagtaattttagattgtgatcctggacatgatgacgcttttgctatgatgcttgcggtacagcacttggatgtgctgggaatcactaccatcggcggaaactgtacgcttgaaaatgtgacaaaaaatgctctgaaggtactggaagtgctgggaagaactgatattcctgtatttgcgggacattcctgccctacgacagtaccgctggtgactgcgccccagtttcatggggagacaggtctggacggcccggtccttccagagcctgtcacaaaagcccaggacaaacatgcggtggattttatcgtagagaccgtcatgaacacagaggacgtcacactgatcgctacaggccctctgacaaacattgcggcggcgatcaacagagaacctgggatcgtagatcgtgtcaaagaactgagcatcatgggaggctccgttacctatgggaactggactcctgccgcagaatttaatatttatgtggacccggaagcggcttacagagtctttaattcaggcattcacgtaaaaatgtctggcatcaatctgaccagacagtgctgtcttacggcagagcatgttgcaaaattccgtgagatcgggacaaaagcggcaaattttgcagcagatctgacagaattctttatcgatacgactgtaaagagtgcatctctttctggagccaacatgcacgatgcctgtgcggtggcatggctggtggatccgtcattgatcaaagcggcggatatgcatattgatgtggagttgaaaggggaacttacaaggggaatgaccgtatgcgactatcggcatttaagagggacagatccggcagtggatctgtgcagagaaccccagatggactacagaggagaacagccaaatgcggaagccgctcttgagttggatttccctggatttatggaacttttatatcggacgctggagcactataactgatgaaatatgaaatgatcctatgggattttgacggaactctggcggatacgggaaaggatgtatggaattctttggaatatgctgcggcaaaatgcggcggacagctgccaaaagagtttaaaagcgatgacagcaatctgggaaaaaccgttaaggatgtgttcctccagatttatccggccccaaaagaggaacaatatgaatggtatgaggagctggtccgggtccattaccggacggtatgtgaataccaacatacatatctctatccgggtatccgcaggctgatccgggaaaccagagaggccggagtgaggcactatatcgtcacaatgaaagcagaggaagcgctggaaaggatccttgagaaaaaaggctgggcagaactgtttgacggctggatttctccggactctctcccgggagaggaaagaacaaaaggcgaaatgatcgcccaggtactgaaggaaacggggatacaaaccagcgcatgtgtctatataggagatacatggagcgacgtaaaagccgcagacgaaaatgggatagactgtatcggggtcacatacggagacggggatgcgaaagcggtctgttctctaaagccccggtattgcgcggagaatgttactgagatccgtagaattttaaaagaaagggtgtaaacatgcttcaggattttaacatatgtatcaatacaaactttgtgtttggaaaagatgcgcaaaatcagattggaagtaaattaaagcagatgggcatccaaaaggttttgatccatcatgataacgggaagtttttatatgacggcggccttctggatcagataaagaagcagctttcacagaagggcattgagagcctggagctgggcggggtcctgcccaatcccagattatctcttgtacgggaaggcatccatctggcaaaaaaagaacaggtggacatggtactcgccattggcggaggaagtgtcatagattctgccaaagccatcgggctgggagctgtgtcagatacagatgtatgggattttttcacaggagcagaaattccgaaaagttctctgcccactggagtgattctgacctgtccggcaaccggaagtgaatccagcgatgtagctgtcattaatcacgtggagcttgggaaaaaacttttggtcagcagtccggtcatacgtccggccattgcatttatgaatcctcaattgacctgttccctgcctccgtttttgactgcatgcggtgtggtggatatgttttcacatgtatgcgagagatactttacaccagacacggagatcggagtgatcgaccgaatggcggaaggaattctgaaaaccttggtggatattgggccaaaagtactgcaagagccgcacaactatgcttatcgggctgagatcatgtggattgggtccattgcgcataatgatacggtaggcatagggagagtccaggactggtccactcatgtaatcggaaatgagctgagtgcactttacgacacgccgcacggtgctaccctctcgattattatgggagcctggatgagatatgtctatcaggagaagccggaacggtttgcccggtttgccaaagaagtatttggagtgcagtggaacgggaacaatacactggaagcagcttttcaggggattttgaaaacggaagaatatttccgcagtatgggaatgccagtctcatttggggattatggcattccaacagacgaagtggagaagatgcttgaccagatcgcttttggcggagaggatgacagcatcggaggtatcaaaagactaaaccgggaggattgccgcagaatatttgagacggcattttaaacttggaaaagaacgagtgagggagacatgaaaatactaaattttggttctttaaatatcgattatgtttatggcgtaagtcattttgtagaaaagggagagactatttcttctgatacgcttcaggtatttgccggagggaaggggcttaaccagtccattgccctgagcagagccggggcagatgtctatcatgcgggtgtcatagggacagatggatcttttttgggagaaattctttgtgaggcagaggtggatacccgttatcttaagatcagccaggaaatccgcacgggcaacgcagtgattcaaaaagacagagaaggagacaactgtattattttgtacggcggcgcaaaccaggcagttacaaaggaccaggtcgacatggtgttggaagattttcagaaaggagactgtctgatccttcaaaatgagatcagtgagattccttatcttgttgagaaagctcatgacaggggcatgcagactgtcctgaatccatctccgatgaatgagaaaatttttgagataaatttagattttatagactgcttcatcctgaacgaagtggaagcccgggcactgctccagtcagacggggacagcaaagatttgttaaaaaagcttaacgagagatttcctcatgcggagatcgtacttacgctgggagaaaagggttccatatacgctggtgcacaggggatgatagagcagtccgcatacaaagtggacacagtggataccacagcggcaggggatacctttacaggatattatacatccagccgtctgatgggaaaaacagtgaaagagtcactggatatggccgccaaggcttcggcaatcgcggtatctaaaatgggtgcggcaccgtccattccaaaaagagatcaagtgcttgagtttgcggcagattcgttttcagaataggcataaagataaaaggaggaatgaaatgaaaacaagaaaagtaatcattgacacagaccctggcattgatgatgcagcggcgattgcggttatgctttcagagccgtcactggacgtaaagctgatcgccagtgtgtctggaaacgtggggattgaacacaccactaacaatgcgctgaagcttttggctttcctaaaaaaagacgtgccggtagcaaagggcgctgcggctccgctcttaagagataacaggtttgcaaccaatgcacatgggaaatccggaatgggaggttttgattttccggaacctaagaatgaattgctgctggaagaaaatgcagtgctcagtgaataccgtacactgatggactgcaaagagaaggtttccattttaactcttgggcctctgaccaatattgcattgctgatcttaacatttccggaagtgaagggaaaaattgaagagatcattatgatgggaggttccacagagagaggaaatatcgggatttatggagaattcaatgtcaccattgacccggaggctgcaaaaatcgttttccgttccggcattccgatcactatggtaggattggatatcggaagaaaagccagacttacggttggagacctggaagagcttgaaaagggcggagagacaggaatgatgatcagctctctgttccgttcctacgatggaggacatattgaagaaggagtgaagatgtatgatccgtccgcggccatgtatcttatggaaccggaactttttgagacaaaaaaggcttttgtcgatgtcgagaccgcaagccctatcacaatgggtgccactgtcgtggattttgatgaaacattaaacgggacaaagaatgtatctgtctgcgttgatgttgatgtggagcgtttccgcaggcgctatgtgcagagagtcgcagaagcagaacgtaagtaacaagaaaacagtaaaaaatagttttgaaaggtatggtataggtaatgtccaatacagatgagagaaaaacaacaggaatcccggtgcctgcagaggggacaccggaattccagacaatgaaccgaatggcaaaacgtgcgattccgctggtattaatcatttttatttttggtattttggagcagcaggcgtttgggatgatttttgtaaatatcgggaaacagctgggaaccccggaactggcgtctctgatcacatcccttccaggcatagcccttggaatcgtgtgtgtcatttacggctcgctgggtgactttgtatccctgaaaaagatgacactgctcggaaccgttgtttttgttatcggttccgccatcggatttctacttggccctgtgagcatttgggctgttgtagctgcacgtatgctccagtccatcggtggacaggttgcaggctccgtattcctggtacttgtatcgaaatacatctcccagaaagagagggttgtttattacgggatttttgtggcagtcttcagattttcggcggcactgggcgtggtcgcggctggttatgtgacaaagatcgactggcggtggatgtttgccattccagtaatctctgttgtattcatgccggcactggcgaaaaaccttccggatgaacatgcaaagggcgcaaagattgacggatggggctttacactgatcggagcttttgccggagctatcacaatgttcttcactgatatgaatctgctctggtccgttgcatcggttgtgactctggcagctttcatcatatacatcaacaaagcagaagatccgatcatcacaccggcatttttaaagaatcctgcatttgtggcaaccatggtggtcattttcgtgggttacttcttcagctatacattgaatgcaggtgtaaatgccatcgggcttgaagtgtttggtattgactcagcccaggtttccaacctgcttgtgtggtccattcttctggcagcagtccttggttttgtgtgtggacctgtaattaagaagattggacgatccgcggctatcattatggctttagcggcaatgggaatcggccttatcgcgattgcgtttgcgattccttatggaaagattgcggccctcgctgcagcaccgtgtatctactacttcggaacatcatttttctactctccgatcgtagatacggcgacattgacggtttcaccggaagagtcaggacgtgttctggggatcaatgaccttgtacaggctatcactggatctgtcggtgtagcagtattcggacaaatgatgtcagccggcgtcatgtcaggaggaagcatcacaggagtaaaagccggagcagcttccacatacgcaaatgtattcttaatcggcggtattgtcgtgcttgcggcattggtcatctttatcctcacaaagaaaatgatatacagccgttccagaaaagacggataaaataattatcaaaacaagacgggaaatctttatagatccctgtcttgttttttcttgacgaaagatattttaagatttataatctatatgactaaaagagaataaaaagtcatatagattggagggatataaatgccaaggttcagcgacacagaaagagaacgaataaagcaaaaattaatgcaggaaggagaacatctatttacttcttttgggattaaaaaagtatccattgacgaaatcgtacgggctgccgggatcgccaaaggttcattttattctttttacccgagtaaagaacatctctatatggagattgccggaaatctacagatgaagatgtggcgtgagatggatgattttttaaaggaaaaccgttctctggagccaagagaactctgtaagcaatgttttattctaatgtttaacggaatacagcgttatcctatgctgaaacaagctgacagtgaaactgctgaatatctataccgcaagctgcccaatgaagtgattgaggcacatacaaaagatgacagtcatgaacttatcagactacaggaattcggcattcattttaactgtggaatcgaaattgccacaaaaacattacagacgcttgccatcagtttcctcaatttacagcaagattcccctgccgatcaacagacgataatggggatcatgctggatggtgtattaaaggagatcatcagtgaaaaatgtgattgaggtccagaatgtctatcttaaatatccatcttcaaaaaatgatacgatccatgggatcagttttgacgtaaaggaaggtgagatcttcggttttcttgggccgtccggcgcagggaaaagcaccatgcagaaaatcttgacaggaaccctccgggattaccgggggagtgtacatatttttgatacagagatgaggcagagaacacatgattattatgaaaaaataggagtggattttgaatttccgaacttttacggtaaattcactgcccttgaaaacctaaagtattttgcttctctatattcaggcagaacaactgatcccttgaagcttttagagaaggtcggccttttgcatgatgctgataagaaggtttctagttattcaaaggggatgaaaatgaggcttggttttgtacgttctctgcttcatgacccgcagcttctttttctggatgagccgaccagcggtcttgatcctgcaaatgcaagagtcttaaaggatatgatcctggagcaaaagaagatgggaaaaacgatcattttaacaacccataatatgcaggatgcagaggaactctgcggacgtgttgcctttatggcggacggaacgatcaaggccatcggttctccgcacgccctgcgcaaaggcgggaccaatacacaagtagaatatacctttttagacaatacaagagagataagaaaggtctgcactctttccaatctggcacattcacaggactttcaaaccgtactgaaaaaggggttactgacaagcattcattcaaaggagcaaacccttgaggatgtatttattgcgctgacaggaaggggcctgcaatgagatttttatctgccttaaaaaacgacatccattttcaaataaaatatggattctatcttttgtacgcttttttcagtgtggtttatattgctgtgctgatgatcataccccaggaatataaaaaaatgacagcgtcccttattattttgactgaccccgcaatgctaggtattttctttatgggcggtatatggctgctggaaaaaggggaagggctgcaccgtttttggagtatctcaccgctttgtcctatggaatatacattgtcaaaagccatatccctggcaatcctgtcaacggtatcagcggatctcatcgtgctggctgctatgaggagcacaatccatttcgtattcttgtcttttagtgtatttactggtgcggttgtttttaatgtcattggactgattctggcatcctatgcccgttcagtcaaccactatatgatcattgtcatatttcctgcggtctttttgtccgtaccgcctgtcctgacagcgtttggaatcactcatccgcttttggagatgttccctggtacagcgttatggtatttgattgcagattcgatccatatggcagaaaatataaatggctttatgtgggtcaatctgatcttctggttcgggatgatgttatactttgccaataaacggattggagccgcgctgcagtcggaaggaggcgggaacttatgaagcacacgatgaaactttttgaaatagggttgagacaaatagcaaaagacggaatgctgcttgttctccttccggcacctgtgttcgcaggaatcttttttaaatttgccattcctatcatcaatgacatattgacaagaaaattctttttttctatcacagcctggtatggtctggcagacggtatgttactttgcctgacccctatgtttgcagcaatgatctcggcgtttttgcttttggaggagagggatgagggtttaagcgccttttatcagattacaccggcagaaggatcttcttacctaaacgctcgaatcggcctgccgatgatatgggcatttcttacgacaatttttgttgtttgtttctttaaaatttcccctctatcctttaaagtgatacttttaagcgccctcatcagcagtttaacggggatgtctttggcgatgatggttgtttccattgcaggaaaccgtgtggaagggcttgctctgtctaagttgatgggaatcagctttatcggacttattttaatatggtttattcctgctccgtatcattttatcatggcttttcttccttctttctggatagggaaactgctgatgaacggagcggatcccttttcatttatgtttggacttatctcctgttttttatggattgcctttttcacaagaagatttttgaatagagtgtagtttacaattcctgaaggccgtttctaaacttcagaggcgatatcccctctctccgtgagaatgcgttgataaagctggcactggagctgtatcccagatattcagaaatgctctcaatggtctgtgacgtggtttttaacatggttttggccagattaatcttacagagcgctgcgtattcgatgggagagtaccctgtctcagccttaaacagatgagaaaaatagtaagggctcaaattgacatgtccggaaatatccctaagtgtaaggttcttacagggattatcccggataaaccgaatggcatcggagacagcgggagagctttccataccggttccgggtacagaatgccggaaggactggatctggcagaggcagctatagatgacagaagacagctctgcgtctgtgacctcctgttcaaaccggagttttgtgaccagtgaattagccaaatcatagatctgcctgtggttatccagattaaaaagaggtcctttgttttggctgatcaaatgtctggtgacagagaccgcattactcccgcaatagtgcatatagataaattcacaggaatcaccggaataataaacatggggattttccccgtcaattaatatgatatcgttctttgccgcggtatagcagcttccctcatattcaagataaaatgtaccatccgtcacatacagcatcaggggggaatggtttccctgacgctgtatgcggtatccctggcggcagtaaaaatgtccgcagttgataatatagtagtaatagtccgtgaaggtatccgatggtgcaaagaaaaaatactccgattccggaagtacgcctggttcccggcatatcataaaaaccctccttatctaaaactagaaaacagaaatattctatagtgttaaagttctttttttattatattatgagatatcaaaaaaagcaatttgaataaactttatagcaagaccgaatagtgtaacagcaaacagactgtgctaagataactttaacaggaagcctgtagctattgctgatacaaggaacttgaaaagcaatctgatgatatagagtgaaaaaggagaaagaaattatgaacacaacagacgcagggaaaaaagcaatgttagattctatgaaaggattgatcgtatcttgccagacacagcctgatgacccaatctatacggaagatatggcagtgaagatggcagaagcggcggcatgggcaggcgcttccgggatccgggcaaatactccggaacagatccgtgctatcaaggaggcagtgaatttgccggtgattggtctttataagatctggaatgaagacatggacgtttttatcacacctaccctggaagcggcaaagcaggtatgggaagccggggccgagatcattgctctggactgcacggaccagctgacagacaaggggcgtccggcctgggaactgatgccagaggttaaaaaagagataccggaagctatgatttttgctgacgtgtccaactatgaggaggccagacgggccgtggaactgggagcggatattgtggcaccgactctttatgggtacacagaggcaacaaaacacattgaagagccggatttaagggagtttgcaaggatgtgccgtgactttggagaggatgtctatatgatgatggagggacatatctataccccggaggatgctatgaaatgcttgtatctgggagcgcatgcggttgtggtaggaagtgccatcacaaggccccatctgacagcaaaacgttttgtggacctgatctcaggctatcagagtaattggagagatgctgaaaaggcaaagcattagacgttgccggaaggaggaacagctatggttcaatttgatgtggacggagcccagaatgtagaggtaagtttaaaaatcccgtgtgaaaagtctttgaaggaacagcttttgattatggaggaatacacgaaggtgcatcagacctatgcggatgccccgaaggaagtccgggaagtggaatgcctgaaggtcttatatccgagaatgtttaggagtattgaatctgaggatctgatcgcagggaggctggattttctgcctatcgggtttgggtgtgtcacttccctgggcggagtcggccattactgtgtatttcataagctcagagaatttcagtcccagcttactacagaatcagaaaaaaagcggacagatattctttatgattactggctggagcatgacctgaaaacggtttactgcagagaggtactcaccgaagataccatcggacggtttatagactgtgaatatccactgattgccactgcaaggctgtccggtatgatgctggactatccgaagctccttcaaaaaggcatcggcggattaagaaaggacatcgaagaaaaaagcaggcagagtcctggcaatcatttttatgaaggggcattgggaactcttgacattttcgtgcagtcagcgcagtatctctgtgagatggcggaacaacaaaagaaaacctgtgatgagggacgccggaaagagctggagaccatgtgcagatctctaaaaaagattcagtcagagaaaccggaaaccttccatgaggccctacagctgatctggctgtacgccttgctttcgggggtcatcaactacgggcgcctggatgattatctgggcccgtatctggccgcggatctaaaaaacaacaggattaccaaggaagaggcctaccgttatgtccattccctgtggaccatgatcgaaaacaggaggaccacagtcaacggaaggatcatcgtagggggaagaggacggaaacatccgcaggaagcggatcagtttctgcatattgccatgaaagtggcaaaaaattgtcgttatgtagaaccgcagtttacacttcgtctggatcaggatacttctgacgagatctggaatgaagcctttgatgcattagaggttggagcaacatatccaactctctataatgatgatgtaaatattccggcagttgcttatgggatgcgggtagacgaaaaaacggcagagcagtacgtcccttttggatgtacggaatatgttatacaggggcagagtacaggaactcccaatgtctgtatcaatcttttaaagcttctcaatatatttatgaatgagggcgtggatcctatggacgggaaaaacaagtctggaggatttccgctaaagaaattggaggaataccgtacgtttgaatccttttatgagggttatcaaagctttcttgactattacctggatctgtctgtagaggcacagtaccattcctatgaggtcatgaaccggcaggtgtcttttctgttcaccagcattttgaccgatgactgtctggaacggggaaaggctcttttagacggcggagtccgctatctgggtgggacaaatgagacttacggtaatatcaatacctcggattccctctgggcagtgaagcatctggtctatgacacgaagaagtatacattaagagaactgcatgaggcagtcttgcacaactttgagggatacgaagctgtcaggaaagactgtcttgcctgtgacaaatatggaaatgatctggatacagccgacggcatggccaatgatctgtatgaatttgtggcgaagggagtccgggaccgtggaatcaggaagggaatgcagtattttctcattgtcatcagcaataaccagctaaacacagagtggggaaacaggactgctgcctcaccagacggacgtttgtccgggatgtacatgaatccggctaacaacccacagggaggagcggataagagcgggcccactgcaatgttaaattcgctttccaaatttgatgccagataccatggaggatccgtacagaatattaagttctcgccgtccatgttcagagaaaacagacagatcatcaagcagctgatgaagacgtattttaaaaaaggaggctgtcatcttatggtgacggtggtggataaagccacgttggaggatgctgtggagcatccggaaatgtatccggatctgatcgtcagggtcagcggtttttcggcggtgtttgtcaacctgacaccgaatgtgcagcaggagcttttgagccggtccacctatgatgaggaaaggtttgggatgaggggatgaaaaaacagctgtctgttatggagattgaacggtttgccatccatgacggtccggggatccgtaccactgtgtttttgcaggggtgtcctcttcactgcctctggtgtgcaaatccggaatcccagactataggaagtaaactgatgtactataaggaaaaatgtgtgggctgcggaacctgcgccggtgtctgtacgaatcaggccattgagatgaaagagggcaggccgctgatccacagggataaatgcaggcaatgccgcagatgcgagtcaagctgccttcagaacgctatccgtttttcaggggaaaaacggactgtggaaagcatcatggcggaggttctccgggacagggattattatgaagaatccggaggtggggtgaccgtgtcagggggcgaggcctttgtacaatttgagggatttatggagcttttaagacagtgccgggcagccgagatatccaccgctgtagagacctgcggccatgttccggcagatcaagtgaaacaagcccttccgtggattgatctttttctatttgatttaaagcatacagatcctgagtacttttaccggtatacgggaggggacctgaatctggtgttgggtaatttaaagtaccttgcaagaaaagttcccgaaaaaatcatcgtgcgggtacctgtcatccccggatttaattttgatgagaaatccatcacagggatttttaaagaaacggcttcccttggcattaaaagggttcagctgcttccctaccacaccttgggcattggaaaatatgagaggctgggcatgccatatcttctcaaaagccaggaatccttaaaaaagaaggacttggagcgtttttgttccatgggacaggaaaaaggattggaaattcagatcggaggagactgaaacttaccggataatatgttatgatacctttatgaaacaaaaacaggcaaccaaaaaggagttaatgacatgaaaacagcagatgaaagaaaaaaagcaatcttagaatctatgaagggtctgatcgtatcctgccaggtacagccggaggatccgatctatacagataatatggtcgttaagatggcagaagctgcacagtgggcgggagctgtcgggatccgcgccaattctccggagcagatcaaggccatcaaaaatgtagtggatctgccgctgatcggtttatataaaattaagagaggtgatgaagaggtttttatcactcctacactggaagcagcaaagcaggtctgggaagccggcgctgaaatcattgcaatggactgcacggaccggatgacaaaggaaggccgccatgcatgggagcttgtggaagatgtaaagagggaaatccctgaagccatgatctttgctgatgtctctacttacgatgaagcaaaaaaagctgtggaattgggcgtggacattgtagcgcctactctgtttggatacacagaagcgaccaaacattttgagagccaggatatgagagcctttgcaaagatgtgcagggattttaaagatgatgtgtatgtgatgatggaagggcatatcaatactccggaagaggcggtaaaatgtctgtatcttggggcacatgcggtggttgtcggaagtgcgatcacaaggcctcatctgactgcaaaacgatttacggatttgatttcaggctatcaggagtaggccttaagaagttattcacattctgtgatgcgtcattcgccataaaatatagagactgtaaaaagactgtgctatcatatgcaaaacggaacttattatttttacagggaggtattttatgagatattatcacatagacatgcatatgccggtgagagatttgataactctgcctagtttattcagcacgattccagataatccaagcggatatgcccaggttctcacggctcctgtacccttacatatgggaatgcaagctactgaaggaaaagagatgcgggaaatccttcatgagcgggcagagcagccaacaagggtagcaagcaatcaatatgttcttgcaggaggggtttttacttcttgttttgtacttgtactatatcatataggagagccggactgcgtgtatgcacgtcattttcagatttcacatctggatactgcagtgggagagatgcctgcttttggagacgaaacgtgggcaatcctggccagacctgaattagatggcagttatggtacagtcgcaaataatctagttgccgcatatgggactgatcacgtatgtttaatcgatggctttactaacttttccgtgactggtgatagaaaaattagattttgctagcatgtgtaattacaataatctgtgtacggcaggtagaactaccgcacacagattatttttgttcttacgatggggagaggctatgggcttgccaattttattctgtttggatgttttcccgcccttattccttacagtcttcaaatcttggttctatatattctttaataaattctatccggtcggtcacctttggtttaaaaagagaagcgatggcgacggtcagatttttctttgtattgacgtagatcacatttccgccgtcccccatggccgcaaagccgtcctcgtgaatccaccataaatatccataagagagactcatcctttcccaccggctgtgttcctttgtactctcgctgacccactctgcagagacaatacgtttcttattccacaggccgccgtttaggtataactggcccagctttgccatatccacaggagagagtgtaagaccccagcccgcagtattagtcccggatggatcaactgcccagccgctgatatccgtggctttattaaatgccatctgttcttctttggaatgaaatattacactgcgctctaccgtgatcccaagagggcggaaaaggtgttcagaggcaaagtcaaatacagactgtccagtggcgtttcttagaatgccagataaaatatcaggtcctatgagtggagtatacctaaattgtcctatttttcccctgcctcccaacaagtcgaggctgaatgttaccatgtcatcgctagtgaaatatttgacgtaaggtgcgaatttatatttatatggggctgtcatggtcagcagatcccgtaacgttacattttgtattgttttttctctctgttttgggatgtaatcagggaaaaaatccagcaccctctggccaatgtctgcaatgtaccctttatctatggcaattccgatcaaaatagagatgatgctttttgtcacagaatatatgtggatgcggcttacggcagtacagccattaaaataatgttcgtattgagtttcaccgtcctttaatataactacgcctgcaatgttaccgcagtccttagtgatgatggtttccagctcctgcatgtttgattgatttatcataattcctcctttaatcattcattttttgtgataaaggatatccttaagattaaggataaagccattaaaaattgattacaagccctatttttaaaaaatatttaatgatatatttgttgttgaaaggaagtgataagatgaagattcggaatcaatatacttgtcctttagagttagtacacgatattacaagagggaagtggaaaccaataagctttgctgatcattgatgttcaaaatgattattttgagaatgtgaaatgccggctgcatcaaccggaagccgcattaaaggcaatccagagacttttgaagtattttagagatatgaactatcaagtttattatatccagcatattgcggcaaaagatgcgcctttttttgtaccgaatacagagggggtaaagagttctgagaacatcaagcctcttgatacagaaaagatcatcaaaaagcactatccaaacagtttttttgagacagagctgcaggcagaattgaaaaaatcttctgtgacagaattgaccgtgtgcggaatgatgacacatatgtgtgttgatacaacggtcagagcagcgaaggatctgggctatcaggtgacactcatatccgatgcctgtgccacaaaagatttagaatggcagggagaaaagatacctgcagaaattgagcagaatgtctttctggcttctttgaatcaaaaatttgcaacaatcatgacagtggaggatctggcatctgaggatcttttaatctaatatttttctggaatccgaatgttagctacattgtgaaacctatatttttctaacatatgcttcttcatacaaaccaaattgtaacggtaacaatctgctatgccatctgcaaaggagctcgcattccctttccttaactgctggaacgctagaatgacttgcttgttgagatttgaaagtgtgtgtttcttggacggataataagcaaaatggtgcccccactcaagaagaagattggttttagataatataacatagaaaggttctaatctggtatgtttcattatggattccaaaatagctgttaaataaatagatccagaagaagtaaatccgtcttctaactcgtccagttctgctttcgtaaagtgcggagctgcagctaaagcagccgggcgaataatcagtaccattagctgtaaggcatgaaggtaacgtaatgccttatctacatacccggaattaagagccagctgatgaagtctagtatcatctggttctataactatagtgcctttaccgtttaacgtctttacaaaacctctctgttcaagttctgacaatgcctttctgactgtcgataaagagacatcatactgactagccagctgcttttcatatggaagatacattccaacaggatattctccaagaccaatttttagattaatgtcatcaacaatttttgagtagtaataatcttgaccacgcatgggattccacgaatacttcaagccagtctgtgcaggacattttggcattctctctgacagatgatttaacgtattttcaatagaatccgtaagttcttggtacatatttgataactggttgtactttgtgagtggatcattgccctttaatatatctatgataacattggttacagatgcagacccctgcaaaaagtgcttagagaaatagggacaattttcagtaaaaaatgcaagcttgttataaaggccaaatgtagaatatagttcgctgaatagggaattaccaccgattcttaagatatcatatcctaatttagaaggagatgaccatccacctgagacatatcccaaacgtaatgctttcacagcctgtttatagtgaggcattatctccacgtcacacccctgcaaagcaaaaaccataagtgaaggtagtattagagcaaaagtctgatatacctgtaaaatgccttccttttgttttaaaatctcgaaaacagtatttgatgaatgacaagtatctttttttgaaacaacaattggtgcaagacggggctgaatgtcaaccagtccttctgtccgcaatgcgtcaaagacacggttaatcgtatatctgcttacatgaaattgctcgcagtacatccttgaagatggcaaagcatttccgggaggtatttggccctccaaaatacattgtttaatttcattatatacaaatgtaaattttgtttcttgtggcttcataactcgtctcctatctgtccgaattatatcatgatgaatttattttgtcagtagtaaaaacgcaaacctatttgcacaccttaccaatatggatattgccagtatgtaaggatgacatttataataaaattgtaaaaattaaaagaaaaggtttgagtatcatggaaaaacaaaaaatcttaattgtcgatgattcagaaatgaatcgtgcccttttagcagatatcctggaagaacaatatgatgtggtagaggctgataatggtatagaagcaatttctatcctttcaaggcaaagaacagatttttctcttctacttctggatattatgatgcctggcatggatggatttgaagtattagcttacataaacaaataccactggaatgacacctttgctgttattatgatttcggctgatgactctcctttaaatataaagcgatcctacgatttgggggcctttgactacatcagccgtccctttgattcgaccattgtccagcgccgaatttctaatacaatgcttttatatgcacgacagcagcgtcttgaaaaaattattgcagaacaatttcatgagcaggaaaaaaataataagctgatgattacaatcctgtctcacattgtggaattccgtaatggagagagtggcttgcatatattgcatgttaatactattacaaaatatttgctaaatcagctggtacagcttactgatcaatatcccttgtccaaagcagatatttctttgatcagcaccgcttctgcgctgcacgatattggaaaaatatcgatttcagatgcgatattgaataaacctggacggcttacgccagaggaatttgaagtgataaaaactcactcaatggttggagctaatatgctattagacttgtccattgagcaacaggaagccccgcttgtcaaagtagcttctgagatttgtcgatggcaccacgaaaggtatgatggcagtggttatccggatggattaaagggagaagaaatacccatagctgcccaggtggttgcgctggctgatgtatacgatgccttgatcagtgaacgatgctataagaaagcttattcacatgaagaagctttgaaaatgattttagaaggacgatgtggtgcatttaatcctactcttttactgtgcctgcaagaaattgcggacacacttgaaagtgaacttatggatgtctccacagaacgagagactaaaaatattcaagatataagaaataaaatagactatgacaggctgttttcctatgaaaaatacacctttctgtctcgcaaacaacgagatcttcaactattatatattgactccttaaccagtgtctacaatcgccgttattatgatgagcattttcaaggcgcagatggtattcaggcaatggtcgtaatcgatgtagataatttcaaacacatcaatgataattatggccacgatgtaggcgatatcgtattgcaaaacattgcacaaactgtttcatcctgtgtacgaaaaacagatgccgttatccgttatgggggcgatgaatttttaattatcttttttagtatacctgcagatatatttgagcaaaaattggagagaatcagacactctgttgatcgtctgataattgatgaccatcccgaactacatatgtctgtcagcataggcggagcatatggaataggaaccataaaaaaactttttaaagctgcagacaatatgatgtatctttcaaaaaaagcaaaaaatcaggtgactgtatgttttctggacgagaatgaggatattacagacaacaattaaaaaggaggaattatgattatgaatctaaaagattgttatataaaatttggcggcgattttgaggaagtattgggcagactgcggcgtgaacaaatcgttcaaaaatttgtatataaattcctgcacgataaaagctttcacttattagaagcctctatggagaataaagaccatgaagaggcgctaagagccgttcatacactcaaaggaatttgtcaaaatctttcttttaccagattgtttgaaagcagtagtctggtaacaaaggcattaagagaaaatgattggaataaagctgttgatatgatgccgaaattatcaaaggattattatgaaataatcaatgttatagaagactttaagaattctaaggaggaatagcatcagtggaaaacagcaaaaacaagaattctacaacacgttttctaatattcagctttattgggcttttgatctttagtattattattttcagtctgctcggcatctatatgagccgaaaaagtaaaaaaactgtttatgaaatcggaaatatttatatgtccggtatgaatgaacaaatgtccagacattttgaaaatgtgattaaattgcgatttgatcaggtcagcggagttgtttctgttgtatcaacagataacaaagacagaaagaatctatatgaggaactcatttacagggcacaggtcagggggtttgactatttagcgctttgttctgccgagggagattttcagacactttatgggaaatccatacagccacttaacccaaaaccttttgtagaagcattattacagggggaacggcgagtcgctgttggcgttgattctgccggaaataaagtggtattgtttggcattgatgctgcttatccgatgcacaatggcgataagagtactggtttgattgcagccgttcctctggaatatattactgatttcctttccttagaggatgaagggcagctgatgtattatcatattatcaggccggatggtagttttgtgatacagaatcctaacactgagttaagctctttctttggacaactacaaaagcagcttgattcgactacaaatgagttatctgtagaaaattctattaaagaatttggtgctgcactaaaaaatcgcaaagaatatgctacaacatttaaagtaaatggtgaggaacggcaaatatacggtatatcattgccctattctgagtggtatttagtatcggtaatgccttatagtagattggatgatgctataaacaatctgggcagccagcgtatgttcatgacattattgtcctgtgcttctattttaattattttaacattgatttttcttcggtatttctccataacccgatctcaggtgtatgaattggagaatgctcagcaggcggctcttgaagcgaacaaagccaaaagcaaatttttagcaaatatgagtcatgatatccgtacacccatgaatgcaatcgtcggcatgaccgcaattgccacagctcacatagatgaccagaaacaggtacagaattgccttagaaaaattactttatcgagcaggcatctgttaggattgatcaatgatgttttagatatgtctaaaattgaaagtggtaaattaactttaacaacagaacaaatttctttaaaggaagttgttgaaggaattgttaacattatgcagccacagattaagactaaaaaacaaacctttcatatacatattgaaaatattttaacagaaaatgtgtggtgcgatggtgtccgcttgaatcaggttatgctaaatctcttgtcaaatgcaacgaagtatacaccggagggcggttcgatacaattatcccttactgaagaaaaatctccgaaaggagaaaactatgtccgaattcatatcaaggtcaaagataacggaattggtatgtcgtcagatttcctgaaaaaaatatatgaatcttatagccgtgcggatggaaccagaatacataaaactgagggtgccggtttgggaatggcgattactaagtacattgttgacgcaatggaaggaaccattgatataaaaagtgagcctgataaaggaaccgaatttcttctcacatttgattttgaaaaagtggttgaagtagaaatggatatggttcttccctcctggaatatgctggtggttgatgatgacgaattattatgtaaggcagccattgatacactaaaagacatcggaataaaagctgaatggacattaagtggagaaaaggcgatagaactggtaatccaacaccacataaagagggaggattatcaaatcattttattggattggaaactgcctggcatgaatgggattcaggtggcaaaagaaatccggaagaatctaggagacgaagtaccgattctgctgatttctgcatacgactggagtgaatttgaagcggaggcccgtgaagcgggtattagtgggtttatttgcaagcctctttttaaatctacgctgtatcacgctttgcgtcaatatatggatattgaaacagaatatgaccagacattgaaccaaactattgatttatctggacgccgtatcttgcttgctgaggataatgaacttaactgggaggttgcaagtgaattgttgtctgacttgggtgtggaactggattgggcagaagatggacagatatgtctggacaagtttcaaaaatctccagcagggtattacgatgccattcttatggatatccgtatgccgcatatgacagggtttgaggcaacaaaagcgatacgggggctaaatgatcctgatgctctatctattccaatcatcgctatgagtgcagatgctttttctgacgacatacaacgttgctatgagtgcggtatgaatgcccatatagcaaagccaatcaatgttttagaattaactcgtttgttaaaaagatatctaatataaattgagttaaaaagcgtatgtctcgcggcatgcgcttttatatttgttacaaaggatgaatacagagaggtgccgggcatccaagctgaacctttaaaaaagtctgttttcgttcagaaagttgagaatctgtagaaacagattctcttccttatagatcagtctctttctctaatctatatctggcaaacaaaaaagccagaattgacatcacagtaagaagaattatgggaaacagcagttcattacatcggactgttccataaaatataatagaacgtatgctgctgattacatgtgtaaagggattgagattgatcaatatttttaacacaccccgtatttcatctaccggaaacagggcagagcttaaaaagaaaaggggcagaacaactgcgttcataagtgtttcaaacatcatctcattgggcagaatcaggctgatcccatatgatactgcggccataaaaaatgcggtcagaaaaatcagtaaaacaatgacgaataatcctgcggcgttttggaacaagtttatagagaagagcaggccgagcagacatagaatgcctgcttccagaaatgagcaaagcaccgcttctaatacttgtcctaaaataatggaattcctgtttatgggggcaatcaggatcctgtaaaagctcccatctgatttcatcatataattcatcatcccgctgctgcaacacacagaaaaactaacgagaacgatcagcccgggaaatatatatgctgtgtaattttttatcccagtattgttcatcgtctgtcctgcgaccccactgtagagaagcagccataaaacgggctgtaatatggtgatcaggattgtaaaacggttatgaaaacgccatttgatgttcttttttaatattgtgattgtactcattttattgcctccttatctgtcagtcttatatatacatcttctaaacttggctgtgttatctcaattcctttgaagagaatctgatgctcaaaaaaaaactggatgacggtctgtatggtatgcctgctgtcatgtgagatcacagtcatcacagtatcctgtaccgtaatcttatattcaacaaaatgattgaataactgttctttagctgcctttgcgtgttcttttgtataaaatacggccttgacactgtcttggcggagatatcccttcaattcaaaaggggatccctgaaccgccgtctgcccgtctctcatgatgcagatggtatcgcttaagctgtcggcttcttctaaataatgggttgtcaaaaagatggtagtaccaaattcagcctttattcttttcatcatattccacatagccaagcgggactggatatccattccaactgtcggctcatctaaaaataaaatcttgggacctgacatcatgttcatggcaatgtccaaacgtcttttgataccgccggagtacgaagctacaggatatttcaaaaaggaagccaggtcaaatactttgaccaactcttccatacgctgatttgcctgcttttgcggaactttatatagttcactttggaacatcatattttctttaagtgacaaatgaggatcaatggataactgttgagatacacatgcaatcttggaacggacggacaaagggtctgccctgatatctttcccaaagactgccatgttgccggaatcagcctttagataagttgtcaataattttatcaaagttgatttaccggcaccgttctgtcccaaaagggagaagatttctccggattctacggtcagatttaatccgtttaatgccttgatcccatttttgtaggttttgtgtacgttctgaacttgaatagcgttcataataagtcctccttcttagatttgttatgtcaatttcgcaatcatcatagcttgagaaaatatttcattcctctctttttctgtccggttttgtaaacaaaagcgaagtggaagggaagacggggcgttacagcccagcttgacagttcttgtgtttaaacttagaatgaaagaaaaatgtccgcagcaggcggaagattgtgcgaaatgcagacctgttaatgaccgacttgctggctgagatggaaaagggattatagtatgtactaaaatataaccgaggtgagagctatgctgatgtcaaatcgaattaaagaaatcatagaagtcatattaaacagcagggggtatgttaccgtcggggagattgcaaaacagatcgaggtatccgaccgtacagtgtaccgtgagattcctgaagtcatggaagtcatgagaggatacggtgttcagttaaatacagcgagtaaaaagggtatggttgcagtgggaagtgcggaagatatgaggaatctgcgcagttttctgggcatgaaaaatcagatctatattgtggaccccaaagaaagggtagattttattttgctgtatttgcttcatgaaaacgattacataaagacagaggcattggccattgacaatgatacatccatccccacagtgaggaatgatctcaaaaaagtaaaggaacaactcagcgggtatgatctgcacctgattcagaaaaagggtgaagggattctgatcactggaagtgagattgaaaaaaatgctttgacagtcaacacattgttgaatcatgtagatgaatccagcctgtatcagtggctgaataaggaaggggatctgtcaaatccatttgtcaggaggatggaagagtatgggtaccaccatgttatgacagtatgtcaccggatcattaaaagtattgttcaggatcaatatgaactttcaacgatgatcaaagaccgggagtatttggagtatattcttctgatcgctatgatgattgactgtcataaaaaaggcaggccttataaaaaagaatttgagactgagaatttcaacaaagaagagcagaagatcaccaggcaggtaaaaaaatctctggaaaaagaatttcatgtgatgttaagcgaacaagaagagcagtatatcagatgggtccttcatgtgggcatggtccaggatacatcgagagtctatacgatccagaatcatctgctggacgccaagatctataattttattcaatatgtggaagaccgtatggggattcagctgattcgggacaaagagctaaaagaaagcctatatatccatatagaccgtgcgttgatcaggatcagaagcggtatgtgtatttccaatcctctgattgaagatgtgaagagagactatgaggagttgtttatggtgatccgggagggtgcagacaggatttttgacggtgatttctttccggacgatgagattggatatttagtgctttattttgcagtatccctggacaatgtcatgaaacgctccttccgaatccttgtagtatgttcagggggtatgggatcatctaagatgctctcccaccgcctggaacaggaaataccagaaatctgtgtgagaaaagaagtgtctttgatcggatttggacaggaaaacctggatgaatatgacctgatcctatccacgatccctctttatattgataaacgaaactatctgaaggtatcccctctgctgagccgcaacgaattagaacagattcatgaggcgatcaaacgccataagtacaagactatgcgtaagatcaccatccgcgagaaggaacagcgccagctggaaacacgggatcatattgaatcgctggaaaaactgcgggctctgatggatgtaggtttaagagtcatcaagagatttaaagttgttcaggcaaaggaaaagaatttaaaaaataacctgctccggattctgtctgaggaaagcggcaggcaggccagcgaattggatgccaggaatagaaaacagcagttttatctgataccggcaactgatatggtatattatgaagcggttttttcacagatgtcagagccacgattatttgctgttcattttgaagatgaacaatatatgagcagcggagaaaagtatacagatgtgatttatgctgtttatccggaaaacccctcagaatatgaaaagaatactttaaatcatgtactggaaagtgtgatcgatgataaggacatccagcacttgatccataaagcagatgagaaggggatcagacagtggatcggatatcggttcaagcagtatttggcggaactgctgtctttgtaaaagacaataaaatatacaataaaaaggaaaggtgggtactatgatccattatatgaatgatgataaaagacttcaggcagctatttttattccataggaaagttctccctatggaataaaaaagccctgcgggcatgatgcacacgatgtgccaaggaaggctgctttgcagccgcacatcggcgcgcaaagcggacttgtccgctttgttcttgagatggcagatcaagtgtggcccggttcctatgatgctgaattaatgcaaaaagccattgaaaagacaataaatattacggcatgggaccagggtaaactggttggctgcgtacggatactgagtgacggctatttgtttggcacaatatcagagattcttgttctaaaagaatatcaaaaacaaggaattggaaaagaattgatgagacgggcagtggagatctcgccaacctccttgttttttggcgctcagccagaagcagaagggttttacgaaaaactcaacctacgaaaatcgctgcagtcctttatgattaacaagaccagaaaataaaaagttctttatcgtgcgaagcacgcatgggtataaaaaacttgcaggtaatattacctgcaagtttttttctttttaaaacgaccaacatatttttaattacattttagtacagtgatacttttgtcaaaataaaattgaaaaatgcagaactggatgaagtggattttccggaataagttttctataatttaaccatagacaaaaacaggaacaagaacaccaggtttagaataggagattatttatgagagcagtacattttggagcgggtaagattggcagagggtttatcgcagacttactgcacaataccggatatgagatcacatttgtggatgtcaacgaaaagctgaacgcagagatgaaccagtaccacaattattatctgtatgtgatccaggaagattacagacgcaaagagatcgacaaggtatcagcgctatccccgatcacccagccggaggaggtttccaaagccatcgtggatgccgatctggtgacaaccgcagtcattgcagataactttccaaagattgcaaacaatctggcagccggattaaaagcaagattggatgcaggcaaagaaagagttaatgtaattccatgtgagaatgcattctactgtggagtgatgttaaagaatgaactgctgaaaacaggtcttctcacagaagaggaactggaaaagatcgcaggtatcccaagcacagcagtcgaccgtatggtgtttgcagctgagcgcgatggaagagatggaattgatgttggaaatacttatgaacttgtcatcgaaaagaatcagttagtggatcctgatgcacagccgatcaaaggcgctgaatatacaggaaatcttgacaagtatctggaaagaaagctgtgtgttgtcaatggcgggcatacaatgtcagcatacattgcacgtttgatggggtatgacatcatccaggactactttaaggttccggagaatacaaaactgacaagggatattatgctgcaggcaggggcctttattgagaaaaagcacggatttgcgcatgaggaaatggcagattacatcgacgccaccatcggccgctggtccacaccgggcgtaaaggataccattgaacggatcgccaaggcaccgatccgtaagctggatccggaagaccgcatggtaaaatccgcgatcgagtgtgagaagtatggacttgccaatgatttgatcctaaaagggatcgcagcggcatttttatatgatgttgaaggggatgaacaggccgcggagatcaaggcatatgtggaggaaaatggaatcgaaaaagccgtcacacattacactggtattgagtcaggaagccatatctatgaagagatattaaacgcttataacgaatataaagcaaaaaaatcaaactaaaaacaggaggaatgaaaaatgaaattacagttggctttagatgaaatgaaccttgtggatgccctgcgttttgctgacaaagtagcagaacatgtagacatcattgaggtgggaacaccgtttgtcatggatgaaggaatgcggggagtgcgcgaattccaccgtttcttcccggaaaaagagatccttgcggatttaaagatcatggatggaggatatctggaggcaagctatgcatatgaggctggggctgcctatgcaacgatcctgggagtctccgataacctgactattgaaggagccttaaaggcagccagagcttatgagagaaaactggtagtggatatgatctgcgtggaggatctgcctgcaaggatcgcaaagatggaggagatcggagtggatatcctggcagtgcatactggagctgaccagcaggcggcgggaagagagccgatccaggatctggaggtcatgacagccaacgcaaagaaatcccagattgcggttgcaggagggatcaacagtaagaccatcggaaagtacgtggcattaaagccagacattgtgatcgtgggatctgccatcggacatgcggatgacccggttgccgaagcaaaagcaattcaagatgccttattataatccaggaggaaaaaaagatgagtgaatgtaaaaacgtattttcaatcttaaatgaattgatggaaaatgcaaaagagatccagaatgaagatgtattaaaggtagaagatttaattatgaacgcaaaaaggatctttgtgggtggagcagggcgttccggttttgcagctagaggattttccaaccgcttaatgcatttaggtttccaggtttactttgtgggagaacctacgacgccaagcatccaggaaggggacttattgatcgtaggctctggttccggcaatacagccagtcttgtttccaacgcccaaaaggcaaaggctcagggtgcaaaagtcgctaccgttacaatgtttccggaaaacaagatcggttctatggcagatgcagcaatccgtatcccaggagtaactgagaaatgcgcaggccagggaaaaggcagcgtccagtcttcaggatcttcatttgaagaactgacatggatcacttatgatgccattgtcatggatttaatgagaatcacgaatcagggagacaaagaattatttgcccgccacgcaaacatggaataagaataaaaaagaaaagaggagtttcatgaacgattttacatttttaagtcctaccagattagttgtaggaagagaagctgaaaaagaaacaggaaaatggatcaaggagtacggcggaacaaccgtattagtacatcatgacagcggattcgtaaaacaaaatggatttgttgacaaagtaatcgatatgttaaaagcggacggtttaaaggttgtagaattaggaggcgttgtcccaaatcctcatttatcaaaggtgtatgaaggcattgaactgtgcaaaaaagaaggcgtggattttctgttggccattggaggaggaagtgtcattgattccactaaggctatcgccatgggacttccgtatgagggagatgtgtgggatttctttatcgaagaggacggagtgccgcacgatgtaccgaaaaagagtacgccgctgggtgttatcctcacgattgctgccacaggaagtgaagcgtccaacagctgtgtgattacaaaagcggatgaaaatctgaagcgtttctgtgacaatgacattaaccgtgccaggtttgccattgaaaatccggagcttacgatgaccctgccgccgttccagacagcctgtggagtgattgatattatgtcccactcctttgaacggtattttacaccagaaaaagagaatgatattttaacagactatttatgtgaggctattttccatacatgtatggattgcggacggattcttgtaaaagatccggcgaactacgaagcgagagctagtatcatggtggcatccactctttcccataatggactgaccggtatgggaagaactggagactgggcatcccatttcatcgagcacgaattgtctggtgaatatcagagcgttacccatggagcaggactggcagtgattaccccagcatggatgaaatatgtgtataaggacaacatggataaattcatcaaatgggcgacccgtgtcatgggtgtttccatggattacagtgatccggagagaacggtactggaggcaatcgaccgtttggaattattcttccagagtcttggtgtgcctacaaagttaagcgaggttccgggagttgaggacttggacgaagaagtgatggagcgtatggcaaaacgtgtacgtgttgtccacgaagacggaagcatcggctgggtgcgccggttaaatacaaaggatattgtagaaatattcaagctggccatgtaataatagccagaagaaaagaatcccgcagatgaaaaggaaggttccttttatctgtgggatttttttgcctttcctgttaacgaagaccatattgagccttggagacaaccttgccgttttggaatgtgacatttgcatttgctccaatactgcctgagcctttccaggaatatattttcgtatggtatccgctcacagaagaggaggcaatacatgttccagggccgccgatcaaatatttgacactgctgtaggacatgcctgttttgatccttttatattcagccttggtgattgtcctgcctctgccttttgggccgaaccaatgtgcatataaggtatgttttttcagcttttttatggttgtattttttttaaccttggtgccgccggacttctttgtgtaccatcctttaaatttatatctgctgcgttttggagttggcagtttgccgtatttcttacccgcctggaccttttttgatttcttggagactctgcctttattggcattaaatcttatcttatatttttgtcctagcacattgatgactttatctttttcgcccaaaaaatcagctgaatcttcgtcaaatccgtaattcttgtcgtaagtgaacaattcatagtcagccgagataacatatcttcccggggttttaatcttaaaagttttcgtataagtagtacccatagggcgccattcccaccaatcatcaggccagatttcattgccgatatcctttttatttttaaatatcatgtaagctgtcggcaatatctttgtttccccgtcaataccgccttttgcattgactctgtcaccgatgaaggtcactttaaaagattttcctgctttgacattgctaggtgcactgatcctgcatttcgaatactttgcctgcggggcggccgcttttggtgctttttctgataacggaactgctgataacgcaattacaaataccattccaatgattaataatctttttttcataggttccctccttaaagttttgtatctttgttacgtccctcttaaaaacattataaagcatgaagaaatataattcaccttttttacaagaaaaaggtgaatcttattttgttgatagtaattgagaattaaactaagtttaacatccttggtttctttattcttctagttaaagtataatagagacaggaaggggatggtgatgaaatgaacagaattcgtttacgtactttattaacagcggcacttttggtattgggtgtatttttggtctctccggtaaaggtgtcggcaaagaacccgaaagaggtaactttaaaaccagggaagacctataaaaaatatgacattaccggagataagaaaaaggacaggatttcaattaaattgagcagccacaagaaagacccgtccatcaagatgaagactaccgtttatgttaacggcaaaaaagtctattccaagaagggatactgttatggcataacagccaaaatctacacattaaaaaataaaaagccatttttgtatctgaacagctgggcggacaatggggatggccctgtcaatgctttgtttcagtatcagtctaggaagctgaaaaaggtgatcaactttcaggcactgtttggaaccaaatacggcacctacggaacccatccaggcgggtctgtggtaaaagtaaaaggcaatacagtaaccgccaggtttgatctgatgtcctggactataggaccttcttcctatgaatatcagtacaaatataaaaagggaaccctgaagcgtacaagttctacaggaaaagtaacgaccgcgctttacaacaataccgcaaccgcaaagaaaaatatcaaggtctataaaacagcaaaggtaagatcatcttatacagtcctaaaaagaggacagagggtgcagtttttaaaggcttatgtaaaaggcagaaaccattttttaaagatcaggatgtccaacaaaaagactggctggatcaaagggcagctgaaatattcagactttgataaccggatgtttcaggaggtgttctgggccgggtgagacacacttttttgttgaatcctgactgctggtggtgtataatcattacatgagagagtgttttaataataagaattgactgcactattttactatgatgttgaaccggaatataggacctgaatcatagtttgccctatgggtaaccttcattaggttatctttggaatgacagcagtatatacttcatacattaacagagacgcctcagatgtgcgtctctgttttattctatagaaaggaatataaaagccctccaggcatgaagcgcacttgtccgctttgttcgctgacatggacttaaggatgtatgagatgtcctgccaatattattaaaatgttatgaaactcactcagagggaaaggatacaaatatttttacaaaggaggagagaatatgagtttgatcacgtggaaagagtttggaaaggagcatacatatggatgatttattatttgatgtatcagatttaattccttttgtaattatcgcattggtcattgccgctgttgtcatcatacttttaaccggttatgtaaaagcttccccggatacagcgctgattatttcaggaatgaggaagaatgcaagatttctgatcggtaaagcagggattaagattccgttttttgaaaaaaaagatgagttaagcttaaaactcgtctctgtcgacgtaaaaacatccagtccggtgccgaccgccgattatattaatattaacgtagattccgcagttaacataaagataggtatctcagatgaaatgttaaaacgggcagcccagaactttttgaactgcaacactgacaaaataggaaatgttgcaagagaagttttggaaggtaacatgagagagatcatcggacagatggaattaaaagagatggtttccgaccgacaaaagtttgctgaaaaagtcagagacaatgcagttccggatcttgcggccatgggactggagatcattagtttcaatgtacagaattttattgataacaatgaagtgatcgaaaatcttggtattgacaatatctctaagatcaagaaatcggcgtctattgctaaggctgagtccgaaaaagaggtggcaattgctaaagctcaggcggacaaagaagccaatgatgccagagttgcctctgagacagagatttctattaagaataatcagctggagattagaaaagccgaacttaaaaaagaagcggatgcaaaaaaagctgaggccgatgttatttacagaattgtagaacaagagcagaggaaacagctggagatcaccagtgccaatgcaaatatcgcaaaacaggaaaaagaagttgaattaaagactaaggaagtggcagtaaaggaaaaagctctggacgcagaagtgcgcaaacaggcggaggccaatcgttttgccagagaacagaaggctcaggcggaattatatgagcgccagaaagaagctgaggcaaaggcgtatgaagcggttcaagaagcggatgctttgaaggccaccgcggaagctgaccggtaccaggcggaacaggaagcatggggtatcaaagccaaaggagaagcggaggcagaggcgatcaaggcaaaagcgcttgcggaagccgccggtattgaaaagaaagcagaggccatggccaagatgggtgaagctgcgatcttggaaatgtactttaaagcatatccagaggtagccaagagtgttgcagaaccgctgtctaaggtagattccatcgtcatgtacggggaaggcaattctgctaaactgaccgaagatattgtaaaatctgtaacacaggtagaccagggactgcagaagtccatgggaattgatatcaaatctttgctggccggagtgatcggcggtaaagtggccgctgtgggagtgcaaaaggagattgagcctgaaagcaaggttgaagaaaccagtgagccaacggaacaagaatagaggcatagtgatactaaacggttcgtagagtgaattctacgaaccgttttgactttccagtatgctgtttcttgagtttgtccagctgaccgtatataattgaaaggacgtgtaacaggtttaaaagttacccggggaaaccgcatacccgcagaaaaatagaggacggtggtaataaatgaaacgtattttctttgtcgaagatgatttaggtttaatcagtggtttatcttttgccatgaaaaagcagggatatgaaatagacattgcccgcacgagccttgaggcgaaaaaattatggagggacgcagagtatgatttggtgatcctggatgtgtcgcttccagacggttccggctatgatttgtgccgggaaatccgcaaaacttcaaaagtgccgattatgtttcttactgcagctgatgaagaaacagacattatcatggggctggatctgggcggcgatgattacataacaaagccctttaagctggcagtctttttatcaagagtcaatgcccttctccgcagaagtgataattttaatcaggaagataccgaattaaaatccaatggaattaaggtacagctgttaaaacaggaagtttctaaaaatgaggaactgcttgatcttaccgccaatgaatataagctgctgtgtctatttatggaaaatcctgatattgtcctttcgccggaacagatcttaagcaggctgtgggactgtgatgaaaattatattgacagcaatacgcttactgtatatatccgcaggctgcgcacaaaaattgaggacgatccaggaaaaccggataagatcgtgacagtgcggcgcatgggatataagtggaatacggttgatcggggtggaaaatgaagatactggtaaacaggaaaacaaaatcgttattttgccgggtactgttgcttttaacagtacttaccctgctttcggctgcgcttgcaggcttgaaacttaaaaatgccgcagtctgtattgggatatgttgcctgtgtatgagtgttttgattctgctgttcctataccggtactttaaggagcagaatgaaattatggaacatgctgtcatgcaaattaaggattatatttccggcaatgaaaatgcccggattgaatgtgatgacgagggccaattgtacaggctgttccacgaagtaaactccttagtttccattctgaacgcacacgctgaaaatgaggaaaaagctaagaagtttttgaaggacaccatatcggatatttcccatcaattgaagacacctcttgccgcccttaatatttataacggtatcatgcaggaagaagcgggggaactttctacaatcaaagagtttaccggcctttctgagcaggaacttgacagaattgagacactggtacaaagcctgttgaaaataacaaaacttgacgccggaactatggcattggaaaagaagacagaaaatctgtctgaaatgatggacagcatcaaacagcattttacctatcgcgcaaaacaggaacaaaagctcttatgcctttccggggatgatacagttgtgttatcttgtgaccgtatctggctgattgaggcaatcagcaatattgtaaagaatgcgtttgaccataccgtggcgggaaatacaatcagtgtagaatggaaacaatttgcgtccgtggtacaaatcgtcattaaggataacggaagcggtatccacccggaagatctacactatattttcaaaagattttaccgcagccgtttctccaaggatacacaggggatcgggcttggactgccgcttgcaaaattaatcgcagaggcacataacgggacgatcgaggttgacagtgagttaggtatcggtacagtttttacaatcaattttttaattcctacaaaattgtaggcttcgtgtcagctgacagtaaggttgacatgataccctttcagtatcaacagaagaaagaggtgatgatcctatgaatttattggaagtagaatcaatttctaaaacctacggcagcggggaagctgctgtacacgcattaaaggatgctgcgttttctgtaccaaaaggcgagtttgtggcggttgtcggcgaatccggatctggaaagagtacacttttaaatatgatcggtgcacttgatacgcctacttcggggaaagttctgattgacgggaaagatatttttgcaatggatgacagacgcttgacggtatttcgcaggaggaatattggatttatttttcagagctttaatctgataccggaattgaccgttgagcaaaatattatattccctgtactgctggactatcaaaagcctgacaaaaggtatttagaagagctgcttacggtgcttaacttgagagaacgccgcaaccatctaccaagccagctatccggcggacaacagcagcgtattgcaattggacgtgcattgatcacccgcccggcccttatccttgcggatgagcctacaggtaatctggatacacagaacagcagcgaggtcattgcgcttctaaaggaagcgtcaaagaagtatgagcagacgatcattatgatcacacatagccggagcattgcgcagacagcagacagagtgctgcaggtgtcagacggtgtcctgaccgactttgggaggtgtcgtgaatgaaaagctatctaagccttattccgatttcagccaaagtgcataaacgccagaaccgtatgacccttctgtgtattgtctttgctgtgtttttagtgacggctgttttcagcatggcagagatgggcatccggatggagcaattaagattattagataaacacaacaatctttcgtttcaagatataacaaatagtgccatgggacaatccatttttctgattgccgcggtattatttatcatgatactgattgcgggagtgctgatggtttcaagcagtatcaacagcaatgttgctcaaaggacaaagttttttggaatgatgcgctgtatcggaatgagcaaacggcaaattatccgttttgtcaggctggaagcactgaattggtgtaaagctgcggttccgataggccttgtactcggaattgttgtcacatggggattgtgtgctgttttacgtttctgtgtcggcgaagaattctctcatattcccctctttggtttcagcggaatcggcataatcggtggaattatcgtaggtcttgttaccgtcctgcttgccgcaagatctccggcaaaacgggcagcaaaagtatcccctgctacggcagcttcgggaaatgcagagagtacaaacaacagcggccacgcagtcaagcatcatgttttcaagatagaaaccgctcttggcattcatcacgcagtatcggcaaagaaaaacttcatccttatgataggttcctttgccctcagtattattctttttttgagtttttcggtgctgatcgattttgttgactgtcttatgccccagtcctccagcacttcggacattgatatatcaagccgtgacggttcaaattcaatcaatcctgaattgcgagataaaatcggcggtatgaagggtgtgaaatgtgtttacggacgtagaagctgctttcaggttcctgcagaattaaaagataaacagcgttcaagagatgtagatcttatttcttatgatgattttgacttagactgtctgaaaaaagaccgtatgctgaaaaggggaagtgatctatccaaagtatataaagacagcagatatgtacttgctacttgggacaaagacagttctttacaaattggttctaaaatcaaaatagacaatgacgaacttgaaatagcaggtttgttgaagcatgatccatttagcagtaatggtctcacaaatggcaaaatcacacttattacttctggacaaactttttcccgtctcaccggcataaccgattactcacttatcatgatacagacggcaaaaaatatatcagataaagaagtaagcgctattaatggcttgttgaacaaaaacgaagtctttaaggacagacgggatcaacgcaccacaggaacatatatagcatttgtatcttgtgtatacgcttttttgtcaatcattactctagtaacggtattgaatattatcaacagcatttccatgagtgtatccgcaaggattaagcaatatggggcaatgcgggcggttggcatggatgaacaccagatcatgaaaatgattgctgctgaagcgtttacttatgcaatttctggctgtattatcggctgtgttgccggtcttctgatcagcaagttcttatatggcataatgattacgtctcactttagctatgccgtctggactgttcctgttgttccattgttggtcattctgattttcgtctttgccgctgcggttgccgcagtctgggctccggcaaaacggatccggaatatatcggtaacagaaacgatcaatgaattgtagatagattaagatttgttatgagtttttcttcattgttctcagtcggctctggaaaggcctcctcccaacaatgaagaaaaactatcgtaagatggctcctttttgacagaagcccttctccagcagacattacgtccattttctacatgattggagtgaggcattctaagagccgaacggaaatcatgtggaaaatgtcatactttaaacggcggctttgatcttcagagccgccgtagttttgctatactgttttataagggaatactcaactgtagaacaaagcggacaagtccgcttcaactccctaaatccctcaatcataagggacttgttccgctttgcgcgccaaatgcgatttgacgtagtcaaatgatttcctatgacataagaaagaagcagcagaaattaaaaaaattgatttctgctgctcccagacttaaaggaataaagaaaatgagttggcggatgttacaatcttagcatcctgacttgtttgcgaaagattcacaatctgtacattcttttgttgtcgggtttggttcatgtgttccgactttgatggactctaaagtgcagtaatctacatcgcctgcatggtaggcacagttgttgatcgtacattcaatacattcgttttttccgtttgctttcattgtaagactcctttcaatttaagatacatcattattatctccctaattgtaaaaaggatgcatcctttaattaccgttaaatgtcaaaaattaaatagatatcaacgtcatgttacaattgttttaaagacaccccccatggttgacactaaataaattgttcgttatccttatacgtggcaagcgaaatatcagctctatcattcactaaaaataagaacaggagaaatatatggcaaaaataaaacgaaaatacctttatatcatcggtgccgtggcggttgttctggccgcatcacttgttgcagtacatatatattacaaagaccggtggcatccgggaagcagcattaacggaataaaggtatctggaatgacatatgaagaatcactcagccagatgaaggataccgtgaaaggctatcagattaagattaaaggcagagacaacggaagctttacagtcacaggaaaggatatcggactaaagatagagtctgaaaattccataaagaagctgtacgaaaaacagcacaagaaaagtgttcttttttcttttacggctaaggttcagggggacctgaaagacacaatcgtatattcacaaaagaagctggagcgcctggccaagaaatcggtacttgtcaccggaagtgacagctataagctggtcaaaccggaggacgcaaccattgtatattccgaaaaaaagaaatacggagttataaaagaagagattgaaggaaatattttagaccaggataagtttttaaagcaattatcggaagccgtaaaaaacttgaccccggagatggatcttacggatcaaaagacatatcctgaagtctataaggagccgggtcttagaaaagaggacgcaaaacttactgagatgcaggagaaatacaatcaatatctgctgcactggatcacatgggatatgggcaataacacaacggagacgatgtctcctgaagttctgaaggactgtattaagatcaacacgaagaaacgtacagtcaagctggataaaactgcagtatcagactgggtggaaaagttctgcctgaaatataagaccgtgggaattaagagaacctttaagacacactcaggaaagaaaataaaagttgaaggcggagattacggctggaggatcgactatgacaaagagatcagccgggtcctgaagcttttaaaaaaagcggcggaggatgaccagatcagtgcctacgaaaaggatccgtcaaagaaaaatcaggaagcgatgacttccaaactggaaccgatctattttaacaaggcatataggaaggattataagaatccacagaatgactgggaccaaaaaaactacagcgaagtggatctgtccgcccaggaagtatttgtctataagaacggcaagagagtattttctgccaactgtatcacaggaaagccgacggctgacagaattacgagaacagggacttactatgtaaaagaaaagcggctgacaaagacattggtcggtgcagattacagcgttgatacaaagtattgggtcaggatcatgtggacaggaaccggttaccactggagtaagcgaagtgactggggacagtggtctccaagcagatataaagtggccggctctcatggctgcgtcaatcttcagctctcagacgcggcagcgatttataagctggtggaaagcggtgatccggtgtttatccattattaaacagtttttaatatttgacacccataaggaataaaccttgaggcggggcagtgacgccggcatctttccgttcttttgactgaaagacttccagaaccgattctggtttacgggatccagcgccggcctccgccagcgtcccggttagaatacggaccatgttgtacaagaagccattgcctgtgaaggtgatgcggatctcctttgaattcttttcgatctccacagaggacaatgtccgcacggtggatttctttgtctttttaatggaggagaaaccgaggaagtcgtgggtgccgacgcataaggaggctgcctgttccatccgtccgatatccagggtctcgggaatatgccacaagtattttctttcaaatacatgtgatgtgcccggaatggcaatgcggtattgatatgtcttttctttggcattcaaccggctgtgaaaccgttcggaaacttcatcggctgaaagaattccgatgtcagaaggcaggtatcttataagatattcctggatatcccggcatgacagctcggaatctgtatggaaatttgccacctgtccataagcgtggactcctgcatccgtgcggccggaacctatcacctgaatgggttcccctgtcattttttctaacactgattccagtttttcttggatggtattggagccggaactctttccaagcttctgccagccttggtagcgggtgccgtcgtattctatgtttaagcggatattgcgtctcatgatggtttcgaactccttttgtgctcatttttggctgctgatgaagttattatagtggaagaaaaaaagaaatacaaatcatatttctttttttagtgccaaaatatgatacaataatctaaacatgaagatcaaggaggcataaaatgaagcgccggacaccggactattatcatagatttgaatgtatcggctctgcctgcagggataactgctgcgtggggtgggagattgacatagatgacgaggcatatggtgactactgcagtgtccagggagcatttggccagcgcctgatggaatatattgatcatagacgtccttatcatttcattatggagggggacagatgcccttttttgaacaccaggaatctgtgcgatatttatatgaatctgggtaaagaccggctgtgccagatctgcacagatcatcccaggttctatgagacttatggagacaggctggaagcggggctcggacttgtctgtgaggaggcagcccgactgatcttaaacaacaaagataagcttctctttatagacgaaggagaagggcaggaggaggcagaggatccatggcttcagatgcttaatcaggtcagggagcaagtgattttgctgctccaggaaaggaaacgtccgctgtgggaacggctggcactggtattgtcccaggcaatgatccttcaggaagattatagtagacaggataagaagtctatgtcagcgcatatacatagacagtggacggtggaaagacctcatgaagatccggctgatgttaagggatggtttttggactgtattgagtttttacaaagtcttgaacttctcacagaccaatgggaaaagatattagatctggcatatgataaagttcgggaagaaaatattgttttttcggatccagatccaatattttatgagcagctgatgatttattttgtataccggtatttcctgagatccgtgtatgacttccagctgctggacaaaataaggtttgcaatttttagctgtctggccgtccgggtgctggagacggcagtttcagatcaggaaaatatacctccaaaggagattgcaaggctgtattccaaggagattgagtattcggaggagaacatggaagctcttaatgaagaatttttgttttccgagatgtttgagaagcagaagcttctgaacgctgtgtccatcgtattttaaccgtaaagctttcagtatcatgaacagaggtaatttatgaatgatttaaaaagatatttggggtttccggcagatctttcttaccgggcccagattgaacaaaatcttacaaggcatacttataaaatgcatacggtttttcagctggttattttggcatgccagattttgatgcttttctccatttcaactctcccgggcggaccgtttgtgaagccgagaaggaccgcttatttctgcatgtatatggtcctggttctgtgtacccttctgagccttttgaccaaagctctgctgaaagaaaagatcatggaacgttacgggttatttagcaggatggagcttgcatatatcattctgatctgtttctggggaactgcggtgaccttaaacgatcagctcgggggcaatgggctcaatgtttttatctatatgagtcttctggcagctgcggtgggtttgatgaaaccgtggcagagtcttcttctgttcggaggtaattttctgctcctgaatgtacttctcccctattttcctgatccgtatggagctgaccagagttttaacaacatgacaaacagcttttttatctcggttctctgtattgtgatttcggtcaccttctatcggaaccgagtgatgtcggaatatgacagtatcatcataaaagagcagtatgataagatcgttgatattaacaagaagctgaaccagcaggtgatacgggatcacctgacaggtctttataaccgcaattatctggatacggtgttggaaaagcagtttcagaatgtgcgcagtgagcgggggaatattgcttgtttgatgatcgatatcgactatttcaaacagtataatgacaagttcgggcatatgtccggggatcagtgcctcagggcatttgcgggcttccttgaacaagagatgcaggacaggatggggagtctggtccgctacggcggcgaggagtttttgctgtttttgtttgaccaggatgccgatgatgccattgacttagcggagcacatgcgcagttctgtagaggctggtgactacctctgtgccggtgctgatgacaggcacatcaccatcagcataggcctttatcgagaatgtcctgcgggagagacttccttggatcaatttattgtaaaagccgataatgcgctctatgaagccaaacgccagggcaggaactgtatcaggcagatatgaggatcgtgctcagcatacatagacaaggtcagcttccgggagacgcagccttacatagtctgtgaggattggttccgcttccaggcgcaggtcttttttatagcggtatttgccgcggccgccgccggacatgttctgcttgtcatagaggtccggagcatccgggaatgcttctttgttaatggcattctgaacataactgtaagtcatgaagatcatttcgatcgtcatggctttttttgtttttttcgtcagagtgtcagccagctggtcgatcaggtccagatactgcttttcccagccgtcactgaggatgatgggggcgatcagaattcccacgggatacccggcttcacacatggcattgaccgcttcgatcctctggttgagcggagaggtgcccagttcgatggtgtcgatgatctcttggggattaacactcattcggaagatagtcttaccttgatgagggagatcgagcagaggtttgacggaagcaaactttgtcgggaacgtaatgcggcctcttccttccctggcgaaggttggtatgacccatttaaggttttctgtgatcatattttctaagacaagatcactattggagccgatctcaaaggtctgtggcttttcactcttcttagatgaccggatcagccggtccatcatctgttccctgtttacaaacagccttagatatgcacatttattataattacatactaaatagcagtacaggcacatggcggtacatccggaagaggtgaatggaaccaggtaatcagaaattttttggttttctacatagcggtgtgtttttctcgttccaatgatcaggtatcgtttcattttcgtgaaatcgctgttcggtctttttgtcatttcttcgatccggttgtgattatcaatctcatgccagggtagatctgcaaaatcttgttttaatttttgaccgagaggataatcaaggattcccggctcatagtatacagcagtaaaaagtttcataagcagcactcctttttaaatttatggttagtatttcagataataagaatatttatgagtttttgtctgatttctggaaaggatttcattggaaatgctagaaaattctctagttaaaacagttttattgtgttataataaatgcaaacatatttgtttgcatgtaaaatgatgggagttttaatttggacgaatattcagcgttgatgatacatataaaaaaaagaatgaggtatgagaggacagaggagcagaatctgcaagtttatctgacaaaggtggcagaacaactaaacagtctttttatcgacagtctggtatttccggtcattttcggaaggcatgatgagctccagggactgttttcgtcttccctgtcagcggcctcttatttccgtctgtttgagatcatgtgctatccggtctccatcactggaggcatcggcatcggtgagtggaccgtgaggatggagcagggtacatcggcccagcagcagggatctgcctatgaccgggcagaagatgcggttaaggcggcaaaaaagagaaaaacccagcggctcaggattcattcctccaaggaagacggtatgacaaactatcttctgaacgtttccatggatatgctgagtgagcagaactcgatccagaaccgcctgcagctgattgcggagattctatacccattcgtggagaacagaacatggatccggtttgaaaaccatggtctgaagctgcttacgttaaaggagaattttgaacctgcaaagcagatggtggacaagatcgcaaaagtaccagagcagacgatctcatggaaaaagaacgtatacgttcaggaaccgatttttatcacaggggagaaaaaggaaggggaagaagcggtaatccttaaaaatgtgtccagcaacatcgcggtgatcgcaaaaaaaagccgccagaatgttgagacgatcatgaaacgggggaagatatttaccatccggatcatggactatatggcactgcagtatttaaaacgatattattaaaaagggagataaaaagaaaaacatggaaaataaagaaaaaagatttgcaatgctgatcgacgccgacaacatatcggcaaagtatatcaagccgatcctggatgagctttcccagtatggcaacattacatataaaaggatctatggtgactggaccagtactctgcatgccagctggaaggaagaactgctggccaactccatcacaccgattcagcagttttcttacacacagggcaagaatgccacggattctgccatgatcatcgatgctatggatattttgtataccaaccgtgtggacgggttctgtatcgtttccagcgacagcgattttacaaggctcgccagcaggatcagagagacaggactcaccgtcgtaggtatgggagaagggaagacaccgccggcattccgtaaggcgtgcgatgtcttcaccaatttggaactattgattgaagacaaggaagaaaaggagaacaagccaatcagccggcagcatattgaggcggcgatccattccatcatcaccgacaatcagaacagtgacaaggagaccacacttggtgagatcggcacgagactgctcaagagatatcctgattttgatgtgagaagttacggctacagcctgctctcaaagtttctggaagagtttgatcatttccgcctgatcaaagagggcaatatcgtgacagtttccctcagagaagatattgacatgaaggaacagctggatcattatgtgacagcgctcacgaagaatgctggtaagaagggcatggatctctccgacctcgccaacagagtctatgcggagtttggcaatttcaaggtccaggacttcggatacaaccggttcagctcttatgtgagaagcataccaggcatgcagctggatattaaaaataataaaacaaaagttacttttacaaaataatcagatagttactgcagaaaaatttttattcaaaatacggaagtagaccaacatactaaccaaacgaggtattttaacaatgagaatttttttatgggaaataagggaagaacagggttacagcttgagaaacctcgaaaaatatacgggcatcagccatatgcatatctatgacattgaacgaggcctggtcagtccgacgctggaggagattgagaagcttgcaggcgtcatgcggatcagtccataccgcctgtttgatttccggccgggtattcaggtgaatcaggcaaattaaaaggactgctgcaaagacacgggattctgtatgttatgacagaatctttggtcttgcagcagtcctttgtcaaacgaatatgaggataattggtattagagatcctttccacagcggccataaaaggtcaacagataaagtccgcagatgccgacgatatcatagacgatcctagaaagcatcgtcatgctgccaaagagaaaagctactaaatcaaaccggaagaagccaatcaggccccagttgatcgcacctataattgtaattgtcagtgctatataatctaatgttttacttcccatagcaacctccttttctatttataatctctccaatttttgaaaaaatatgcatgacgcagatttaatttccgccgggaccatcttttctcggacgttgggactcaggaagcggctccacaatatgcggacgctctcgttttgttttttctggatcctgctgtttatgctgtctgtgacagtttgattcttgcattgagatcactcctttctttttatttgttttagtatgtttgcaaaaacacggaactatacagtataataaagacaggaacttaaggcagcaaatagaattagaataggaggtgttttttttgacaggcaaacgaagcagcaactgcgaatcttgtgtcaactacgtgtacgatgatctttatggctcttatgtgtgcgatgtgaatttagatgaagacgaactgatacgttttatgacatattctaattttaactgtccatattttcaatataatgatgaatacaaaatcgtcagaaaacagatgtgatacaaactatcagcagagacaggaagacagataagagatcatgaaacagagtaatttgcaaaaaaggcgaatcatttcctgggcattggttattgtaatgatgacagtgatttttatgttttcagcgaagacagccaatgattcagagcagatgagcatgggagtcactcgattggtgacaaaactaatggggattacccaggctgaggccggaacaatcggcagcagtctgtacgatatgctctctgtcatagatcattacgtcagaaagacagcacattttatggagtatgcgcttcttgcagtgttggtattcagggcgctgaagattgacgtataccagaagatacatcttttttttactgcctgggtcatatgcattatctatgcagcaacagatgaacttcatcaatattttgtcccgggaagaagctgtcagatcagggatgttatgattgacagcgcaggagcattgaccggcatttgtatttgtatgctggccggtacggtgttcagacggatcaaaaagagaaacgcagcgtgccaataaaacacaccccaaatgtaagattaaaatcttacatttggggtgctgttttgtcttacattctaataactatcttccagtcacaaggttgatcagatcagaacctgtctgcttggaatctttcgggaaatataaagtaacggtttcttttccgctctttatattttgtttcgtcagagtaaaggtctttgatttcatgtcagaagacggtttcatcttcttaaagcctttctccacgttctgtactaacagcttctgtgcatcttcctttgtctcaatatgctgaggcttcagtgcatccactgtttttttcttggcatccttaaatacggacagatagtcaatgtactgtgctttcacagtgacggatgcttccttatcctcctgcttgtctacgctcacttcatatttgagatcggataaagcctgggatagagaatcgtagatgttctctgcatcctttgtagataaggtgatgcctgcggacttgaaattatccttcagggaagaaatcgtggatttcttatacacatccaatgtgtcgtttacctcggctgagtcaattcctaagcctgtcattccatcagctttgtggcggacgatcagctggtaataggcgtccatggatttatctgcatccggggcttctttttttccgcatccggcaagaagagtcatagcaaagactgtaaccataaccagagctgtcaattttgttattttcttcataattcatttccccaatcctataatgatatgataaatacttgttctattataatagtttcgacgaagggtgtcaatgaatgacgaatagaatcgaaagtttgtttttccgacggttgtgtgatagaatactttagaaaatccttgaggtaatgggaggagaatagaaaacatgagtaatcaaaactacgacgcaaacagcatttccgtgctggaagggctggaggcagtccgcaaacggccgggaatgtatataggaagcgtttcaacaaaaggattgaatcatctgatatatgaaatcgttgacaactccgtggacgagtttctcgccgggcactgtgatcagatcaccgtcacgttaaaggatgacgggacagcggtgatcgaagacaacgggcgcgggatccctgtgggcatcaatgagcataccgggatctcagctgtggaaatggtatttaccatgctccacgccggaggaaagtttggagacggaggctataagatctcaggaggactccacggagtcggcgcgtctgtagtcaatgccctgtccacctggctgtgtgtcacggtaaaacaggacggaaagatctaccaggagcagtttgagcggggaaaggttacagagccgctgaaagtcatcggaagctgcaaaaaatctgaaacaggcacaaaggttcagtttcatccggatcctgaaatatttgacaagacctattttaaagctgccatgattcggaaccgtctgcatgagaccacatacttaaattcagaattaaagatcacatatgtcaatgaacgggcaggagaacagacaatggtcgaataccatgagccggaaggaatctgtgcctatgtgaagaagctgaatgaaggaaagcacgtgctgcatgatcctgtctactataaaagagagatcggcgggattgaggcggagatcgcttttcagtatacggaagatttcggagagaatattctcggattctgcaataatatttataccacggagggcggaacccacatcacagggtttaagtccaagttcacggcggtgatgaaccaatatgcgagagagcttggcatattaaaagataaggatgcaaactttactggagcagatgtgagaaacgggatgacagcaatcatatccgtaaagcatccagagccaagatttgagggtcagacaaagaccaaactggacaaccccgatgccaataaagtggtcagcgaaattaccggcgaagagacggtattattttttgacaaaaacttagacacgctgaaaaaggtcctggcctgtgcggaaaagtcagcaaagatccgcaaagcggaggagaaagccaaaactaacctgcttgtgaggcagaaactttccatagacagtaatggcaagctttccaactgtgagagccgtaggccagaggagtgtgagatctttatcgtagagggagactccgcagggggatctgcaaaaactgccagaaaccggcgtacccaggccattcttcccatcaggggaaagattcttaacgtagaaaaggcaaccatggacaaggtcctcgccaatgcggagatcaaaacgatgatcaatacatttggctgcggattctcagaaggctacggcaatgattttgatattgaaaagctgcgctatcaaaagatcgtgatcatgacagatgcggatgtggacggtgcccatatcgctacacttctgctgacctttttttatcggtttatgccggagctgatcacccacggacatgtttatctggcaacacctccgctgtacaaagcgattcctaaaaagggaaaggagacgtatctgtttgatgacacggctctggaaagatataaggcttcccacaagggatccttcactctccagcgctacaaaggtctcggagagatggatgcaagccagctctgggagacgacgttagatccagaaacaaggaccttaaagcagatcgagatcgaagatgccagaatggcctccgatgtgacttccatgcttatgggcagcgaagtgccgccgaggagaaagtttatttatgataatgcaagtgatgcgatgttggatatatagaaaggaaaaaagatggcggaacatattataagggcagagttttctgaggtcatgcagaagtcatatattgactatgccatgagcgtaatctgtgcgcgggctctccctgatatcagagacgggttaaagccagtgcagcgccgtgtcctgtatgccatggacgagctgaatttaagatacgacaggccccacagaaagtctgcgagaattgtcggtgataccatgggtaagtaccatcctcacggagacagttccatctatgagtcactggtggtgatggaacaggatttcaaaaaaggaatgcctttggtagacggacatggaaactttggttcgattgaaggcgatggggctgcggccatgcgttatacggaggctaggctgaaaaaatttacccaggaggtatacctggcagatctggacaaaaatgtggtggattttacagccaactttgatgagacggaaaaggaaccggaggtactcccggtaagagtgcccaatctgctgatcaatggcgcagaggggatcgccgtcggtatgaccaccagcattcctccccacaatcttggggaagtggtggatgctatgaccgcatatttggatgatgaatcggtggacaatgatcaactcctgacctatatccagggacctgatttccctaccggaggtttggtagtaaacaaaaaggatctaaggaatatttattcccagggctgcggaaagctgaagctgcgaggaaaggttgtctttgagccaggaaagaagcggggagaaaaggacaagctggtcatcacggaaataccctatacgatgatcggagccaatatcggtaagttcctttctgatattgtaggtctcattgaatcaaagaaaacgacagatattgcggatatctccaatgaatcgtccaaagaagggatccgcatcgtgttggagctgaaaaagggcaccgatgtggagcgcctgaaaaatctgctttataaaaagaccaagctggaggatacgttcggcgtgaatatgcttgccattgtggacggcaggccggagacactaagcctccgggatatcattgcgcatcatacggacttccactatggtcttgtgaaacggaaatataagactcttctgaacaaactttacgaccagcgtgaagtcaaggagggattgatcaaagcctgtgacatgatcgatctgatcattgagattctaagaggcagtaaaaacctgaaagaggcaaaagcctgcctgacaaagggagaagtgggcaatatccgctttaaatcctcagagtctatgatcgaagcctgcaagctgtctttcacagaaaaacaggcggaagcaattctggatttaaggcttggaaaattaatcgggctggagatcctggcgctgcgggaagaatacgatgagattgtgtccaaaatcgcggaatatgaggatattttaaataatccagattctatgcggaatgtgatgaaaaaagatctggctgctataaagaaggaataccagaaaaaacgaaaaactgccattgaggacggagcagaggctgtctacgaggaagagccggtgaaagaggagcaggtttactttgtcatggaccgttttggttatgctaagacattggataaggcagtttaccagagaaaccaggaaaatttaccgaaggattataaatatattgttccgtgcatgaatacagacaagatctgtatttttacagacaccggtgttttacatcagatcaaggtactggatataccggcagggaaatataaggataaaggaaccccgatcgacaatctgggcaattacgacagcgcggatgaagccatcatcgctgtgctggctgcccaggatatgatccatgccagtcttttatttgcaacagaacagggaatgttaaagatcgtttccggaagtgagttccaggtgacaaagaggacggtatccgcaacaaaactgtcagacggggatgccctgctctcagtgaaacctctgaaaaccgaaggtggaacggcggctttggatatggtaatattagagacaaaagaggggatctttctgagattttctctggaggaggttcctgaaaagaaaaagggtgccgtgggcgtaagagggatcaagctttccaaggatgatattctgcttcacatttatctcatggaatctgacgatattacatccatagattataagggcaagcggctggattttaataagttaaaacttgcaagacgggatacaaaaggctccaagatccggcgctgagaacaaaaaggagagagaacatgacgattgatcttgtaattccaacctataagccagggaaaaagctggaggaatccctccggcgcctgtctctgcagacggtcacatttgatactatttatctgattaacacggaggaggaattcttcacaaaacatctgaacgatgcataccccaacgtggttgtgaagcatattaagaaagaagagtttgaccacggtggtacaaggaattatggtgcctcgctgtcagatgcggacatcatagcatttatgacagatgacgctgtgccgagagataaatacctgacaaaacatctgctggaagcgtttgaagacccggacgtgggagccgcatacggacgacagctggcagatccgaaggacaattatctggagtactatacaaggacgttcaattatcccgccgaaagttctaaaaagacaaaggcagatttaccgaggcttgggatcaagacatttttctgctccaatgtctgcagcgcatatcgtaaaaaggactatgacgagatgggcggtttcataaagaagacgatctttaacgaggatatgatcatggcctctaaattgattgaagcgggcagaaccattgcctatgaggcagacgccgccgtatggcactggcacaattaccgctgttttgaccaactgcacagaaactttgacctggcagtctcacaggtttcctacggaggcatgtttctagaagtgtcatcggaatcagagggcatgaagatggtgctcaacacattaaagcatttactgtttacagggagattcttaaagatccctaaattcatggcagacactgtctgcaaatatattggatacaaactgggaagaaattataaaaagctcccgaaaagcctgatcctgaaactgaccatgaaccgctcttattgggattcgtatgaaaagatttagattttcttaatatttctagcttttttttctgttacaatagataaaattacagacatacgtttggaggataaggaattgggaaagaaatttaaaattattacggctgttttccttgtaattgctctgtcaatcggaggagttttaggatactatgatgcgaagctggaggcttcggtgacaccaaagggaaatttgagcaaagtagatgtgggagacgacgttaaatttgataaagatgtagttaatattcttttggtgggttctgaccgcaggtcagatgaaacagagtcaggccggtccgactcttctatgattgccacgatcaatatgaagacaaaagaattaaagctgacctctctgatgcgggatatgtatgtggatattcccggccacggaagagataaattgaattcagcatattcttacggcggtgtggatctgctttacaaaacaatcgcccagaattttgatattaagattgataaatactgtgtcgtagacttttctacctttgagaaggtaatcaatgaggttggaggcatcgagatcaacctggaggagaaagaagctaattatcttaatacgaccaactatatttccaaaaagaagtaccgcaacgtaaaagcgggaaaacagacgctgaacggaaatcaggccctcggctattccagagtgcgttatgtatcaaacagcagatacggcgacggggaattcggaaggaccggccgtcagagggctgttctggaagccacatataagaagatcatcaaacagaatccaatgaagatcctggatatcggcttcagcgctttggatgatgtctctactgacatgaatgccagctacatcaaaggtctggtcatgtctgtggtccagttcggagtgccgaaggttcagcagatgagaatcccgatcgagggaacctatatgcagggcagagcccagaaccggatgttcgttttctttatcaactttgatgccaataaggcggccatggagcattttattttcagcaaaggaaaggatcaggattttgccacgaaatacggcggatatcaaaatgtagagacctatgggtattcagcaaaaccggattctgaggatgcggtggacagttcccctggaagttataaaagataactttttactgttacataaagtcgatttagcatagatattgtaaaaacttcagttttaattaagaaactgcctattgttttctgatataatgtgctataattggagactaatatatgccttatggcgcagatcgtgccgtccggaggacataaagcacgggatgcactgcgggcatacaaattcaggaggattagcatgacgctgaagacatataaaatcattttgagcatatttttagtaatatccgtcgcggccggaggagttcttggatattatgatgcccggctggaagccgccattaacaaaaatggagatctgggcaatgtggacgttggaaacgtcaagtttgataaagatgttgtgaacattctgctggtaggctcagacaggcgttccgacgaggaagccgccggacggtctgactcctctatgatcgcaacgatcaatttcaagactaaggagttaaaactgacctcaatcatgagggatatctatgtggagatcccgggacacggtaaagataagctgaattcagcatatgcatacggtggtgtggaactcctatataagaccattgccaaaaactttgggattaagattgacaaatactgtgtcgtagactttgataccttcgaaaaggtgatcaatgaagtgggcggcatcgagatcgatctggaagaaaaagaggcaaagtatctgaatacgaccaactacatttccaaaaagaaataccgcactgtaaaagccgggaaacagacgttaaatggaaaccaggctcttggatattccaggatccggtatgtagtatccaagaagtacggagatggtgactttggccgtaccgggcgccagagagctgtcctggaagctacttttaataaggtgaaaggccagagcctgacaaagattctggatatcgcgttgaaggtgctgggtgatgtctccacagatatggatgctgattatatgaagagccttgcggcgtctgtgatcaaaatgggcaccacggatattgatcagatgaggataccgatcgagggctcctataagatgggaagagcacagcacaatatgtttgtcttctttattaactttaatgccaacaaagcggcgatgaattactttattttcggtgacggcaaggtcggtgacggatcagatgaggcctttgccaaggaatacggcggaaccggaggtgtggagacatttggatattcaggggtatctgacacttcttcaaacaccagcacctcgtcgggaagttccgggaatactgggtcctataattccggcggttccacaaggagcagttattccacatcatccaccagcagcacaagaaggccggcttccacatctacctcaaagccgtccacatctgcgacccatgcgactacggcgcagtccacccaggcgactcatgccacaactgctgcgaaaccggataatacaggtcaggaaaacgcagaagaatagattttaagtgatttcttgacactgattattagaattgatagaattgttaggaggattaagtcgtctatgaaacaaattgtattatcgattgtagctgaaaataatccaggagtgctcagccgtatttccggattgttcagccgcagaggttataatattgacagtattacagcctgcaagacacaggatgagaagttttcaagaatgaccatcgcagtgagcggggatgacaccatcctggctcagatcaagaaccagctgatcaagcttgaggatgtcataagacttgtggaacttgaagaccccacatctgtctgcagggaactgattttggtcaaggtccgtacaggcaaggctgaaaagcaggagatcatcacgattgctgatatattcagagcgaaagttgtggatgtggcaaaggattcactgatgattgaactcaccggaaatgtcaataagattgaagctttcataagtttactggaagattttgatattctggaacttgtgagaacagggcttaccggtctgtcccgcggggaaaccgtgccgagacttgtcaagtaggcacacatttaattcaaaaggtatgggaataccccttacttataaagcctagaaaatggaggaatgtaaaatggcaaagatttattatcaagaagactgtaacttatcacttttagacggaaagaccatcgccgtgatcggttacggaagtcagggacatgcacacgcccttaatgcaaaagaatccggatgcaacgtcatcatcggattatatgaaggaagcaaatcctggaagagagcagaagagcagggatttgaagtatatacagccgctgaagctgccaaaaaagcagatatcatcatgatcctgatcaacgatgaaaaacaggctacaatgtacaagaatgacatcgaacctaacttagaagcaggaaacatgttaatgttcgctcatggtttcaatatccattttggatgcatcgtgcctccaaaagacgtggatgtaacaatgatcgctccaaaaggacctggacacactgtaagaagcgaatacgaagaaggaaaaggtgttccttgtttagtagctgtagagcaggatgctactggcaaagcattagatacagctttagcgtatgcgttggctatcggtggagcaagagcaggagttcttgagacaaccttcagaacagagacagagacagacttattcggtgagcaggcagtactgtgcggcggtgtttgtgcgttaatgcaggctggttttgagacattagtagaagctggatatgatccgagaaatgcatactttgagtgtatccatgagatgaagctcatcgttgacctgatctaccagtcaggattctcaggaatgagatattctatctctaatactgcagaatatggtgattacatcacaggacctaagatcatcacagaagacacaaagaaggcaatgaagaagatcctctccgacatccaggacggaactttcgcaaaagacttcttagtagatatgtctgacgcaggaagccaggttcacttcaaggctatgagaaagttagcatctgagcattcttcagaagtagttggagaagagatcagaagcttatacagctggtctgacgaagacaaactgatcaataactaaaaaataactacataatataaaaacacctcaggcagagaatcatgcttacagcaattgatttctctgcctgaggtgtttttaggttttatcttatttatccatgtccataatctgaacagaaatttgtgtctcataattatcgtaaccggaacgagtcagttcatcaagaattgtcgtctcataaaaagaagttcccaacgtaagcttatgttcctccgaatatgctaagattttataataagtttctccgatcgtatcccaatgaccatgatgataggcatatagataatgaccctccggtttcgttgtataagtgatcttcttaggaggggtatcaaacaacatgtacacatgcaggtaattatcatagataccttgatgaatatccactgcactttggagaaaaccaatgttatatgggcttttgataccaagcttatcacagtgcatcaaaagttcactgatcttaattgccacaatcttatcatctgcggaagaagaatgtgtggcaatatagtattgagccggtgtttttaagatttcgatctggctgaaatctttttgcaaagcatcttttagcagggcagattttttttgcagccacttttttgtggtttttaatttacggatcttctgatcaatggaatgttcctctctctccaaaagcgtaaacagggcttcagggcttttgtgatcgagatattctttaatatctgacaggggaacacccagctggcgcagtgtaaagatgacatcaaacacttctaactgcgaaatagaatagtatcggtagttattttccagttttacttcaggggaaaacaggccgatatcgtcatagtgaaataacgtatgttttgtgacaccggctacttttgcaaattcaccagtggataaatataaatctttattaatcattttaattacctcttgactataggactacccgatagtttatcataactaatgcagtggagataatcaagagaaagaggtggaattatgacaaaatcaatcggacaggactttaagttgttctcactgctgaagtttgcgctgccgtctatgatcatgatggtatttatgtcattatatacaattatagacggagtatttatttcaagactgataggaagtgatgcattatcagctaccaatattgtatatccggccatcaatgtattgatcgcagttggtattatgctgtcaacgggaggcagtgcaattattgcaaagaaaattggagaacgaaaatcaggggaagccagaaagaatttctccttgatcgtagcgacgggggcagcctttggcgctgcggctcttattttaggaaatatggggatcactccattgattaaaatgctgggtgcaacagatcgtatatttgaattgtgcagaacatatctaagtgtattactttattttgcaccaatgtgtgtattgcagcttctattccaaatgttatttgtaaccgcaggaagaccaggaatcggacttgtcacaacgattgttggaggcattacgaacgcagtgcttgattatgtatttatgggacctcttcagatggggatagccggtgcagctcttgcaaccggtttagggcaggcagttccggctgtgatcggtgtagtttattttttcgctgtaaaagaagagctgtactttgtgaagcccaacatagatctgaaggtactaaaatatagttgtctgaatggttcttctgaaatggtgacaaatctatgcactgctatggtgactttcttatttaatatcatgatcctgaagctggcaggagaagaaggtgttgccgcaatgacaattgtattgtatgggcagtttctgtttaatgcgttatatctgggattttcaatggggattggaccggtgttcagtttcaattatgggagtggaaataggaaactgctccgaaggatattccgcatctgcatcctgtttatcgcagtatcggcggtcattgtaacgatagcggcattgtccggagcctcactgattgtagagatatttacaccgaaagagtccggcacttatgatttagcaaggagaggattcttcttattctcgtttaattatctgtttgccggaatgaatatatttgcatcagccatgtttacggctttttccaacggtaaaatatcagcaatcatatcatttatgcgaaccttcgtatttattataggcagtattttgatcctgccgcgcataatgggaatagacggcatatggctggcagtacctttagcagaattactgacgattctgggttcggtctggttcttttggaagatgaaggatgtgtatcattatgccggaaaaggcgcaggcaatgatttaggaaaaaagcaaaaatataatgtataatctgagaattttgaaaggggcttttggaaaaaatactcccttctaggtagataagtgagataaaacatcacattatacttagaagggagtatttttatatatggccgcggctgccagccacaataatatggcaggcagtacaatacttgttgtataaatgatctgacacctttgaatccgttataatgtgattcaccgatctgaaatcaacaatctggaacgccgactttctatcaaatttctggtgctcacacaaaaagaatgtctcatctgaagaagcaacggtcgcaattttacttcccaattcatattctgttatggttgaaaaacccatctgaagatccactccgttggcacccaaaaatgcctttttaaaatgcatggactggatctgttctacagtcatcattccttccacggcttctgcaaatttataataaagaccacccacaacgatcagctggcagtcatcagcgtctgccaggctttttgcaatatttagagaattggtcgccaccgtgatatttctagcggtcaaaaacggcggcatcagatccgtgatggaactgctgtggagaaagacaaattcgttgtcttttacataagaggcagctttttttgcgatttccattttttcgtggtaattatggaattttctttttgtgtggtccagaatctcatcgtttttgttcacctgtgccaatgccccgccgtgggtccgtatgatgagccccagctggttcataatgtttaattccctccgtatggtagaagcagagacatcaaacttttcagccagctcctctaccgatacttctttttcttcgtttaacagatttaagatctgcagctgtctttctttatgtttcatatttcaacctccttatcaacatcatatcacttgaagtgcgcatattcaaaccaaaaatgctcaaatgggaatataatagatgaaaaaagtgagcaattcgattgaatgggcactacaaacctcctataatcaagatatagaaggagggagaagaatggttggaattttagtggcaacccacggcaggttcgcagaagggctgttaaacgctgtggaattgattgcaggtaagcaggaaaaaaccgggaccataggattgtttcacggggacggcatctgggaatttgaggacagaatgaaaatgctcatccgtgaactggatgacggggacggagtgctggtatttgtggacattctgggagggagcccggcaaacaccgtcatgaaatgtctttccatgaatcatgaaatacgcgcgatcgctggcgttaacatgggaatgcttgtccaggcggttatgatgagggacggaacaagccttgaggatctatgtgatatttgtgaagaggcgggaaaacaagatcctgttctgttacataaaagatttgaagaactcatggcagaagcatcggaaatggatgatgagatttaggagggaaatgcaatgaaagaaatcgtattgacaaggattgatgaccggctgatccacggacaggtaatgacttcatggttaaactatacaggcgcaaataaaatcatggtgattgatgaccagaccgcaggggatccgttcatgaaaactgtattaaaaaatgcagtgccgtccaacgtgggactcggactgtttacggttcccagagcggcagccaggttaaagacaggctttaagccgggggacaaagtcattatcctggtcaagtatccggacacggtgctttcattgatcgaagagggggtggcatttgagcatttaaacatcggaggaatgggggcagctccgggaagagaaaaattctacaaaaatatttctgccacagaggaagaaaaggagatcgtaaaaaagatcatccaatccggctgtaagacagaaatacaaattatcgcagaggatgcaaaagttgatgtttcaaaattactttaaatgtgtgggaaaggtggaagaactatgaatatttcattatggcaggcaatcttaatcggtgttgtctattatctgggaatcacaggaactccctggcttacagctttgggaagcaccatcatccaaaagcctttggtggcaggtgtgctggtaggatgtattatgggggatccggtacagggagcgatcatcggagcggcaatccagctgccgttcatcgcttatatttcagcaggaggagcccctcctacagacccgggtcttgcaggaactttgggaacggcattggccattgcaggaggggttaagcctacggcagctattgctctggcagttcccatcggacttttagggaccattatttgggtgatccatatgaccgtggatgtcttctttgtccatgccattgaccgggctgcggctgaaggaaatatgaaaaaggcaaaatttttacatattgtaccgcctcaaatctttgcttttatcatcggatgtatcccagtggctctgggctgttattacgggtcaggagttgtgacaaacattatccaggcactggagggcaggccgctgcaggctttggaggtcatcgggggacttctgccggctatcggtatcgccatgaatctgcgtgccataagcaaaccaggcattctcctatggtacatcttgggatttatcgtcgcagtatatctgaatcttgaaactatgccaatcgccatcatcgcaggtatcgtcgcgtacatctatacatccatcatagcaaagatcgatgagaccggagtgccggccatggcaggcgggccggatccggatgacgactttgacgatgattttgaataaggagggaaggaacaatggcagaaaaaagagtagcattgagcaaaaaagatgtagtgaaggcattttggaaatggacgtttttttcacattccaactataattacgaacggcttcaggccagcggtgttttacagtccatgtcccatcttccggaaaaattatatccggacagcccggaagaacagaaaaaatttatggaaaggcacatggcattttataacacggaaccccatttcggaggcattgtcaacggtatggtcatcgctatggaagaagagcgtgccaatggggcggagatcacggatgatgccatcaacagcgtaaagaccggactgatggggcccatggccggaattggagatacgttatggcagggaacactgacaccaattctgctggctgtggggatcagcatcgcatccggcggaaatgtcatgggagcggtggccttctcagccctgatggctgcgatcatgcttcccatcgcctactttatgtacatgaggggatataaaacaggaaagaccggagtggaggcgatcttgagcggaggaaagatgaaacagctgatctcggcggcgtccatcatgggtgcgactgttcttggttccctgacagcaaactatgtcagtgccgcatctactatgaagatcaaggtaggcgctaccaaactggcactgcaggccgatgtgctggataagcttctcaagggaatgctgcctttgggaatcacattattgacgttatatctgctgaaagacaagaagatgaaatcaacaaccgttatgctgatccttgcagtattgggggcagtgttaggacttactgggatcttaggataaggaggagaaggaaaatggctgagacaatgaagacggcagtgtttagggatatcaggcagattgaactggagatatgtgagaaaccaaaggcatcaggaaataaaattcttgttaagattgatgcttctgcgatttgtacatgggaacagagggtttataccggggtgaataaagtagaatttccgttcatcggaggacacgagatagctgggcatatcgtggagatgggggaagacgtagatcatacagagtgggccattggagacaaggtggtcataggagccacacttccatgccgcaactgctactactgtaagactggaaatgagcagagctgtgaacattttaatcacagtgctcatttggaaggcttgccgtaccacggaatgggcggattgagcgaatatatgcttgcggctcccgaatgcctgtttaaatacgacaatgtggagccggagcaggccgcagtgatcgaaccggtttcctgcgttgtccacagtgtggagacagcagatgtacagttgggagacacagtccttatcattggatgcggaattatgggactgctccacacggcaatctgtgccaaacagggagcggcagttattgtatctgacgtaaacgaagaacggacggccctggcaaaggagctgggggccaagtttacagttaatccggcaaaagagaatctttccgagcgtgtaaaggagattacaggaggaaggaaagcccaggtgatctttgataccacgccgatttcttccgtggtggaggatgcgtttgcgtgtgtcggaaatacaggaaagatcgtgttgtacagttccatccatccggccgagcccgtgccgtttgatcccaactgggtccacggaaaatccattcagattttgggaacagcaaactccaacagccgtgattttatgagggcagcccagatggtgtcctcaggagttttagacctgaagccatttgtcagtgagatctatgaagcaaaagatatcaaaactgcatttgagtcggcaattcagggagataaattcagggttgttgtaaagttttaaaaagaaccagtctatagcgaccgtgcaggcagagaggtgacaacatgaaacagaaagaaaggcagcttaagatactgaatctgttggatgaggagaaggaggtttctgtggaggatcttgcccagaaatttaatgtctcagcttccaccatacggagggaattaaacagtatgaaccagttggggcttattatacggacccacggaggagctctggtgcaggtaaataaaaacgatgagatcctggatcacacaaagcggaggtaccacaactatcatgagaaaatggagatcgccaagaaagcggcttcttatatcggagatgatgactttgtctttctgcacagcagctccatcacggatctgatgccgcctttcataaccagcaggaatatcacggtggccaccaactcactgaatattgccaggagcctgaaagacagtgatgactgccagctgatccttttaggcgggatctattataaatatgcagaagccatcgaggggatgatgaccgtggaccagatccgttccatgcattttcaaaaggcctttctgggagccaacggagtggaccttcaaatgggcttttccaccataacggagtttgaactgagcagcaaggtggcgaccattgatgcgtctgacgaaaccttctttttgtgtgaacatcagaagtttgacagaaagtcagcctttcagatcgtgcccttggactgcgtggaccacattataacagattcgaaagcggccagtgatctatatgataaatatatctctgcctgccatatcattgtatccggcaacaaaaagaattgagattaaaaggagaaaacaacatgttagtaaacagtaaaagtatgttaaataaggcaagggacctgcggtatgcggttccggcaaccgatgtatttaacctggaatctttaaaaggtgtattgaacgcggcaaaagaatgtgactgcccgctgatcattgcactggcagaggtacatgtagaaaccctgccgcttaaagagtgtgcactgcttgtgaaatattttgcatccaacatggatcaggatattgttctgcacctggatcatggatttacgccgtctctggtcaaacaggccattgactgcggttttacgtccgtcatgtatgacgggtcaagccttccttttgaggaaaatgtaaaggctacaaaagagatcgtggaatacgcaaagaagcacaacgtaactgtggaggccgagatcggacatgtgggatcagaagccgcaggttccaatgaagtaaaggaatgtgaaggagaggattcctcaaaattgacaaccgtggaggaagcggtatcttttgccgaggccacaggggtggattcattggccgtatccatcggcacagcccatggaaattatgtgggaacaccgaaattggactttgacaggctgaaggatatcagggaacacatcggtatcccgctggtgctgcacggaggctccggtaccggctatgagaatctgaacaaagcggtttctctagggatcagtaaggtgaatatttacacagatttaatgaatgcggccaaaagcgcatatgaaaatcaaatcgacaaaacagattactttgaattgtgcgcggtctcccagaaagcgatcacagagaagctcaaagagtactatgaagtgttcatgacaaagaaaagccgtgaataaaccatcaatggagagatgtgaaatgatctatatttcaaatgaagatgttttagcaggatatttaaaagagcggggattgttaaaggatccgtcatcctgtacgatccactattgccagggcggcgtttcctgtacggttgcctacgtggagatcgacggccggccgatgattataaaacaggctttggagcagctgaagacaaaagatacttggctgtgtgatccaaaccgtatgtatatcgaatatgagagcaataagatctaccatgaccttttacctgagaatgctcccgagacatatttttatgacaaggagaattatatttatggaagagaagcggtgccggacggatgccagatgtggaaagatgatttaatgaagggtctcatcgattacaaggtagccgaaaaagcggttgatacattggctgccgtccacaatcactgtgccgacagggaagatatcgcccggatgtttgagaacaaggacgtttttcatgccctgaggatttctccttatattgattttacagtgacaaaacaccctgaaataactgagtttgcccaaagagtttctgatgagatgatggacagcaaaataaccttgatccacggggactatagtccgaaaaatatcatggtgacagaggacggcatgaaagttctggactatgaagtgacaaattacggccatccggcatttgatctggcgttcctctccaatcattttattttgaaagcggtaaaattccaggaccgcccaggagaatacttagatctgctcgactatactgtgaaacgatattttaagtccctcacatgcatggatctcaaggaatttgagccagtctatatccggacactggcccttttgatgcttgcgagaatcgatgggaaaagccctgtggaataccttacagaagaaaaaggaaaacaggagcttgtaaggcggttaagtctcacaatgatcaaagatcaaatggatacctatagtgacacaataaaaatgcttagaaacgagataaggaggttgacaaagtgacagattattcaatcagcaaagtcaccgcaagacaagtgatagattccagagccaatccgacggtggaagtggatatcaccttaaactgcggtgctgtgggaagaggtacagtcccgtccggtgcctccaccggagcttatgaagctttggaactgcgggacgcaaacgaagagtacggcgggaaaagtgtccgccaggctataaaaaacatagaacagatccttgcgccggccctgctgggcaaagatgcaacaaaacaggttatgcttgatcacttaatgatcggtttggacgggacagaaaacaaaagcaaactaggcgccaatgcgatcctcggatgcagtatggctattgcccacgcggctgccaatgcaaaacatgagcctctgttccggtatctgggaggtgccaacgcgaaaacaatcccacttcctatgatccagatcataggaggcggagcccatgcagcaaactccatcgacatacaggactttctggccattcccttaagtgcctctttttttgagcagggaatcgaaatgatcgcaaatgtatatagcgggactaagaaggtgtttgaacgaacaggacgccccctgtccatcgctgatgagggcggcttctggcccaccggtttttcctgcaatgaagacggccttaggcttctcacagaaggaatcatagaagccggttatgttcctggagaagatatcggcatcgccctggatatcgccgcaagtgaattttatgacagagagtctggagtttataagtttacgcttgaggagcaggagtacacaacccatgaattcgttgaccttttgtgtaaatgggcagacaagtacgccatcgtatccatggaagactgctgttcagaatttgactgggaaggaaataagctgatcacggaaaagctgggccataagattcagatcatcggagatgacttatttacgaccaacattaagagaatccagtatggcgtctctcagggaacatgtaattctgtactaatcaagatgaaccagattggcagcatcacagagactctggatgccattgaatgtacgaagaatgcaggatatcttccggtgatcagcgccaggagcggggagacagaagatgcaaccatcgtccatctggcgatcgctacaaatgcagggcagttaaaggttggatccattgcccgttcagagagaactgtaaaatggaacgagggaatccggatggagcaggaactgggatccatggcagaatatccgtcagcttccatttttgaacggatcaaaaggtcataacggtaaatttataggaggtattatatgtatcagttatttatgggcggacaatatgtagacggaaagggaaaacagatcgatgtgattaaccctgcggacagtacagtggcaggtactttttgttcggcaacaaaagagcaggccgaagaggcattagaaatcgcccagaaagcatttaagacctgggggaaaacaccggtcatggagcgctgccggcttctttcgaagttcgcggatttagtagaagaacacaaggatgagatctcccagttaaattccctggagactggaaaaccttacggggaagcatatggagatacaggtttttgcctgaatgttctccgttttcatgcggaagaggcaaaaagggtctatggcactacattaaatgattataactcagagaggggaagtgtctatcatatggtagaaaagcgtccagtgggagttgtggtgggacatttggcatggaattatcccatgtataatgcggcattaaaaatcggtcctgtcatcggatccggatgcaccgcagttttaaaaccatcctcacagacgcctcttgcgacacttttattgggaaaactgatcaaggaagccggcattccggacggtgtcatcaatattctggcaggctcatcctctgaattgggacatactttaaattccagcacgatcccgagactgatcggcttaatcggttccacagacacagcccttcaggtcatgaaagacagtgcgacttccgtaaaacggttctcctttgaactgggcgggaacgcccctaccattgtttcagaaagcgcagatctgtccgcggcagctgacactatagcttctatgaaaatgggaaactcaggccagatgtgcgttgaccataaccggatttatatccatgaatctgtgtatgacaagttctgtgatctgatgtttgaccgcttgaaggaatataaaatcggacagggtgcggacgacggtttggtcataggccctatgatcaaccagtctgcccagaagacaatggtttccctggttgaggatgcggttcagaaaggtgcaagacttgttctgggtggaaagatcccggacggaaaaccagagggaagttcgttctttgagcctacactattgcttgattgtgaccgttctatgaaggtgtatcagcaggaaatctttggccctatcgctgcactttctaaatacagtgattatgatgagatcctttcggaagccgcagacacagacggaggtctttcttcctatctgttcagccatgacacaaaagagatcgcgaaagccgtggagacctttaagtccggggaagtcctgatcaatgtggatggaatcggggatgtggaatttctgcctcactgcggcattgggaattctggacttgggtgtgacaattccctgtggtcattggaggaatattttgatcttaagagagtgaagatcgttccgtaacgatatatagaaaacagaagaagtaatggaggcagtcctgtatttaataggggctgctttctctgttttgttcgacaagaactatagactgacgcagatagcccatagatgcctttaaaaattgtacaaaactgtatccgcctgcctgatagacgttgtggaagagcagccatacaaaaagcatggtaagttccataatcattattcttataactttatcgaatgcgcgtttttttaagcggcttagggtataagactgaaatataatatgaggcagttcatctttaagcatttggctgcagatgctttttaacgcagaagactctgtgctttttgacagcgcatcataataggtcagagctatgatctccgctgtcacaagaatcgtaatctcacttttaattccgcccgtctgtcttaatttacggaataatttatcaggaagagatttctttgcggtttttacatgataaaaatccataaacgttctcagatatgcagaatgccagttttcttctctgataaaccactgtacggcttcctggtagtctgtctctttgtactcttgtataaatcttctggcagccttcatcagatgtctgccgtcagaaccttcccctttttgaaatgcctttatggaaggaaaaataagatcacattctgatgctgataattgcttttcctgagaaaaatcaatatccagtctttgatgattgttttcttgaaagtaagaaatccaatcccggtaatcgtactgattcatttttgattttgttagatttatcatttcaaggctcccttgtataaaattctcattcatgttgtagatttcttttaaatacattttatcataagcagaacttgaatgatatcataagaagcagtagaagtagaacttccgccgcagatatgttatactgaaaagcagaaacttaacaagaactgaggaaaagaatatgaagttacagcaagtgttgagctatgtccgcagggctgtggacgattatcagatgatacaggaaggggataagatcgcagtagggatttcaggcgggaaggacagtctgaccatgctgtatgcccttgcgcatttacggatcttttatcccaataagtttgagatacatgggatcactgtggatctgggattcggaaattttgacattacacaggtagaggccctctgtcgagaactgaaagttccttatactgtcgttaagactgaaatcgcggatgtggtgtttgatcgcagaaaagagaccaacccatgctccctctgtgccaagatgcgcaagggtgctctgaatgaaaagatcaaggaactgggttgcaataaagtggcctatgcccatcacaaggatgatctggtggagacatttttaatgtcgatgctgtttgaaggacgtctgcactgtttttctcctgtaacttatcttgaccggatggatcttaaagtgatccggccgctgatgtatatggatgaagcagatgtgatcgggtttaaaaataaaatgaatcttccggtagagaagagtccatgtccgatggacggttacacaaagagacagtacgccaaagagaccttaaaaaaattagacgaagaccatcctggctccaaggatcatatgttccgggctatgcttcacggaaatctggaaggatggcctaagagacaagagcggaagagataaaaatgaacagggcaccgatcaggattattttctgatcggtgccctgtttgttgagtctctgacaatgagctttggctggtattcaattcttgtgatccgctcagcattgtcggaagaggagcggtcttttcctattttcttatagagcatctggaatgcctcacttcctttttcctgcatataatgttcaatcgtcgtgagagagacagagatcaggcgggaagggaagttgttgtcgaatccgcagacactgaaatcctttggtatctcataacctgcctttaatgcagcgtcggcaaccccgtaagcaatcacatcattgacgccgatgagggcagtgatccgttcagcctccggactgtgcagacattggtcgcacagttcaaacccgatactgtgttccagaaaaatattttggcgctcataagtaggtatgatctttttttcgtagactgaaacggtacattcaggtgagacctttttgaaagtgtcctgaatcccctggagccttcttgtacgcatggtgttgggacgctcaagggtagtggagataaaagcagcatgccggtgtcccaattccaacagatgctctgctatgagaaccccggctatataattgcttgtttcaatggtatccagctggatagtagaatctttatccccaatgacaaccacaggcacactgtcaccgatctgttccacaaactcaggagcacttggcatcatggcgaagatgataccggacacattcatttccagcacgtctttaatcatttccttttctaaggacgggtcccggaatgtattaaagttaaaaacacggtaatcgcagaggtgggctgtatgttcgatagactgaacgatagtggaatagtaaggattcgttacgttgggacaaaatacagcgatgatctttgaaagtttttcggagtcttttttttgatgctgggcagatgaagactgtttgatgatatagccggtcgttttgacagcatccataactttctttattgtctctgcagaaaatgttacatcacttttctggtttacaatcatggagaccgttgagatcgatacaccggattgttttgctacatcctgcagggtaattttctttttatttgtcatgaggctctctccctttgatagttacgagcataagcaatacattatcttaatgtgttatttgcttttattatatcacaatctattataaatgaaagcagaagctatgatgattgaaaaacataggaaataagaaacatcctcatctatacgcaaaatactaatttaaattatagataaaggaaaatcccacagatcattatactgtcaggatcattttctggcacggataatcaaacacggtgagtaattcatcatctttaaatccgcatttatgataacactttcttgcaggaatccctttgggatcaccggatgcaaatgtcaccacctggatctgatcgcctgttctgaagtcagatttcattttttcaatcatggatcttgcaattcctttttgtctggcttcaggatgtactgccaggaactcaagctcacagtctgcttttgaataaagcaataagccaatgatattcccagcttcgttcacggccaatacagcctctctgtgtttgatacagttttccagagcttttttaaatccttctttctcatatcctgcaaagtcatctttgacgacctctacaaattcaatacatatatttatatcgttgtatccaacataattaatcgtcatttggcactccccttcctagtctttccaattccaccattttagcttttccggttcatgtacctctgtggaggcataatatacagcacaccggtatacataaagctggcatcggtctatatggcagcccttcatcatacattctctctcatatagttcttccgggtctgccccttttaatgactgtatggtagtatatccgagcatttgaagggcctcttctgtcttttttcccacaccgggaatgttccttaattcacccatattttctcctgtaatgattctctcctatgttctttttttattttaacacacaactagatcttctgcattcttctgattctattttgacataatatagaacttgatatattattaatgtgcagtttagaaaaattattcaggttttggtcaagtattataaaatcaaggaggttcctcacctatgggaaaaatgacagtgtatcacggcagctatacttctgttccgtatcctgaaattagaaaaggaagaaatacaaaagattttggaactggattttactgtactgtaatacgggaacaggcagaacgatgggcaaaaagatatgaccagccaatggttaatgtctatacagttcgttttaattcaggcttgaatattctagagtttaaagaaatgtcggaacagtggcttgattttataattaattgcaggaatggagtaccgcatgattatgacattgtcatcggtgcaatggcaaatgatcaaatttacaactatattgcggattttattgacggaatcattaccagagaacagttttgggctttggctaaattcaagtatccaacccatcagattaacttctgctctgtagaagcattaaaatgtctgacttttgtatcatgtgaggaggtggaccgatgacaggaagagaagacaaaaaagagaacgatcttttttttacctgtagtctgattgattatatagcccgaaaaacaaaaaataaaagatctgctgtggcaaatgctttaggcaaagatttaattacaaaaatttatgatttagcagatgtatatcacagtgacaatatcgaccgagtgagcgatgattttatctcagctgccaaacttcagaatggtgattttgataatgtatcttctgcaaaatatgctgttccaagccactgggatattggaaaagtctacaaacgcctgattcttggtattgcgaaagaaaaagaaatggatatccctgatgctctgctggctgcatacaattcgtttgtcagtgataaaattgatgattataacagcagcttctattatgacgctccacaaaatattttaaatgcttttttagatggaaaaattgaataagttcttaatatgatagaatcccagagcaattcaatctccgggattctattaattatatgatcatgtaatgtccttcttctctgccatccgaacacatatcccggcaaacagcaatgaaataacagtaaggatagacggtataaagatattttcccgcagagaggctccgccgatgtttccctgcataagaacaatcagtaaaaaagaggagacaatggctgcctttgaggatttagctttcatcccgataaaaagtgcgataaaactaatacagattgtggaagcagattttaaaagcgttgtcagataaaacattggatcagtaagcgatacatccatcgggaaagaggaattttgataaaaattcataccaagctggacaacagcgtaacatatcaatttggcagcaaccaaagatacaaaactaaagatccagacagctgcgattttggagatcataattttctttcggcttaccggataagtaaacatcagctccatagttttgtttttatattcagatataataaatgtagcatgcatgacagcggcaaagattaaaaatgagatatctgtcaatagttctacatttgtggagatccccatttgcttcaaagccatatccgggactcctgttgcggaatcatcggcaatccccagaaatgccatagcaaaattaaatattgctaatactgcgattaagattgcagcaccagcaatatatttgctgattttatgcttttgccattctaactttattaatttaaacataggactttccctccccttctgattgtgctgtaagtttcaaaaaataatcttccagtgaatcattttttcttttcaatgcatctatttccacgttattttgtgagagcactctggacaaagtgccagtggaaacagaactgtcatagatccgaatttcaccttcatccattactttaaaatcagaaaccgagagcttctcttccaggacaaatgaggtgtgcttcacgtcagaggtcacaagttcgatataggcaagacttccctcggaaatctcctgcatagacagttcattgagcatatggccgtgatggataatcccgatcgtatccgccagattttccacttctgataaaaggtgactggatataaggattgtaatgccatattcatcgcacaaagttcttaaaagatccctgatctgcttcattcctgcaggatccagcccgttatatggctcatcgagaatcagtagttccggtttagcaagaactgccctggcaatcccaagacgctgtttcatacccagagaatagcttttcacatgttgtctggctgcacctgtgagatccagcatgtcaagtgcactgcccacacagtcaggactgtagtatcccatatattcgcagtgcagctttaaattttcttctccgcttagttcttcataaaacacaggaaactcgatcatactccccatccgttttaaaagatcatgggaggaggggccaagtttattcccaaacagttcgatctctcctgaggttggcttccaaagatttgtgacaagcttcatggttgttgtctttcctgcaccgtttggtcccaggaatccgtaaatctcacctttgtgcaccgacatattcagatctgaaagaatttcttttccgtcaacggtcttggtaagatgagatgttttcaatacatctttcataatatgtttctcccttcctttttcatttatcatacagctttggattttcagaactgttgaataaatcttacgaatttctttcggagaaagatttaataattaaatttgtttaattgcagcgtaaatgtagttttttcgtatggaatgctctgtaaagaaaggttcccgcccatcctcaccgcaagtgcttttgcgattgtaaggccaagtccgttgccgcccatgtttttgtttctagaatcgtccagcgtgtacaatctgtcaaacacatgggacaaattctccttggctatccccttccctttgtccgtcacattaataaaaactgtagattcttcttctctcagtctgaccccaagatagcttccatctgatccatagcggatgacatttgtgatcaaattaaataagatgcggcttatggcatcctcatttccatatacaaacacatctttttcgggaatatcaatttccacatcaaaatcttttgctgtgagaatattgtagaaatccacaacgttctgtcttaagatctcattgatcgaaagttttgacatggtcagatctgtatcaccggcctctatttttgacaatgtgaaaaattcattgatcaattccatcaactgggtggcttttctctgaatcttctttaatgctgttttattttcccccggctgatttgacataatttcaagatatccaaggataacggtcaacggagttttaatatcatgagatacattcgagagcatttttttagaggcaatctctgcttttttataatcagcttttaccttttggcggtcctccagcaggcggttcatctggcagattaaatctgcaatctctgccgaaccggtaaaggacattactttttcgtccgtatcctccgttaaaatcctgtcgagctgtctagtaagctctgcaatatttttcgtctggtttttatatcgaaagtactctgctgtaaagaaaacagcgaaaagcagagttaatactaccaatatgtaaaggatgggcattgtcatagattttcccccagcttataaccaattccccaaaccgttatgatatacttgggtttccgggcattattttctattttattcctcagtctgctgatgtggacgttcactgcattttcatctcccatgtagtaatctttccatacagcagaataaatctgttccttggtatatacttttttgggattccccataagaagcttaagaatttcaaattcttttgcagttaaatccagtttctttccatttttagaaaccgtgtaatcatccagattcatggtgagttctccggctttcagaagctgcaaagattcaggctgctctgcaaaggttaaatactgggttgtcctgcgtatgtttgccttaattcttgctaatacctctgtcacagaaaagggtttggtaatataatcatctgcacctaaaagaagtcccagtgacttatcaagttccgtatcctttgctgatagaatgatgatcggaacaacactatcttccctgatttttttcataacttccattccgctcagtttcgggatcatcagatccagcagcaccagatcataagaaccttcaaaaaacttctgacaggccatctcaccgtcaaaagctgtttccacttcaaatgcttctctgctcaaaaaatcttccagcatctcgctgatttccatatcattttcaatcaataatagcttcacaataccccggttcctttctgttttgtatctattgtctttattttatcataagaaacaatttgagtatattcaaataatgcttgcactcttcgatattattcgataaaatatctctagcggggtatggctcagcttggttagagcgcacgactgggggtcgtgaggtcgcaggttcaaatcctgttaccccgatttatcatttagtcagtaattaaagaacatcccgaatacgttcattgccgtattcgggatgttctcatttatttctcttcgtcttctttttctacctggcgaatttcttttgttttaatttcttttttgaccgcagaaaggaattcatctaaggacatctgcccctcatctcccttaaaacggcttcttacggaaacggcctggttttcttcttcttttcctcccacaactagcatatatgggatcttatgaagctgtgcctcccggatcttataacccattttttcagccctggtgtcaatctcagcgcggatgccggcttcttttaacgcatccagcaccttgtttccatagtctaaatgcttgtcagagatcggaatgaccttcacctgcactggtgccagccaggttgggaatgctcctgcgaagtgttcgatcaggataccgataaaccgttcgatggaaccaaaagcaaccctgtggatcatgatcggacggtgcttctctccgtctgctccagtgtaatggaggtcaaaccgcagaggaagctggaagtctaactgaatggttccgcactgccatgttcttccgatggaatcttccagatggaaatcaatcttcggcccgtagaatgctccatccccttcattgactacatagtcaagtccaagatcatccagtgcactcctcaaagaatctgtagccatctcccagtcctcatcaattcccatgctgtcttccggccgggtggacaattccacatggtatttgaatccaaacaggctgtaaacctggtcgatcaacgctgcgacgcctttgatctcatctttgatctgctccggcatcataaagatatgggcatcatcctgtgtaaaacagcggacacgcatcagtccgtggagctgtccggatttttcgtggcggtgtaccaatcccagttctcccatacgcagcggcaggtcacgataagagcgtggctctgactggtatactaaaacgccgcctgggcagttcataggtttgatggcaaagtcttcttcatcgatgaccgttgtgtacatattttcctggtagtgatcccagtgtccggatgtctcccacaggtgcctgctcagcatgatcggactggagatctctacatatcctgctttgttatggatttctctccagtagtccagcaaagtatttttaagcaccataccattaggtaaaaagaatgggaatcccggcccttcatctctcatcataaagagtccgagttcttttccaagctttctgtggtcacgttttttcgcttcctccatcatggtcaagtaatctttcagatctgctttttttgcaaatgcagttccatagatacgggtgagcatctgattcttttcattaccgcgccagtaggctccggcgatgcttgtgagcttaaacgctttcacaggctttgttgtcatcagatgaggtcctgcacacaggtcaatgaattcaccctgctgatagaaactgataacggaatcctcaggaagatcctcgatgagctcgaccttgtacggttccttgcgttccttcataaatgcgattgcttcttctcttggtttcgtaaaacaagtgatctccagattttcttttacgatctttttcatttctgcttcgatcttctccagatcatcctgtgtaaatggagtatccttctccatgtcataataaaatccattgtcgatagacggcccgatagcaagctttgtctccgggtacaggcgttttacagcctgggctaaaatatgggatgcagtatggcgaaaagcgtgtcttcccccttccgagtcaaaggtaaggatactcagctcgcagtcatcctctacaatcgtccttaaatccacgacttccccgttgatctcccctgcacaagcaactcttgcaagtccttcactgatatcctttgcgatatcaatgacagacatgctctggccgtactctttaacagatccatcttttaatgtaatcttcatagtatttttcctttcttgtattgtaattaagaacaaagcagccttccttggcacatcgtgtgcatcatgcccggagggcttttttattccatagggagaacattcctatggaataaaaaaagccccatggaaaaatccatgggacgttattcacgcggttccacccttggttgcctgcttcatatcgtaaagcagaccacttcgttgacgataacggtgtcggccgggctggtttgcagccgctcggaggtggtcttcatctgttttagtacttaagatgctctcaccaaatgcatctctctctggaagactttcacagattactcttctcttcaacgcttttttatttcccacatattataacactgttaatttgtgaaatcaatcctttttcatagcaaaaaaatttagctgccagaaacaaacttatctctaatcgttctgagtgatcccctttccgacattgggagatcccgctgagtaaacctggtctgtcagaaaaagtcccagcagcatagaacagacaaaaaccatgactctcggctgaagtctctgtatcatattgtcaagaaacggcgccaggacgtatacaatggccagcccgccaataccgaaaacaagcaggccttccgcgcagaccctgccgtggatattcagaaagtatccgctgtaatcccaccatctttgcccgtgatgcatcgtttccagaaagacagaagtaaaatattccacacatccgcagacagccacgatactgataaattccagaatcggtttttgtctcagtttatttaacagtgtcaggatcaagattccgccggctccgtagatgggaatccagggaccgtgaaggattcccctgttggtaaaaacaccgctggcgattaaatgcaggctcacttcccaaatccagcccagaaaggacaagataaagaaaagcagcgtcaatgaccataaggtataacggcgcatataatgcagagtctcaattctgcggcgttttttgctttccggcatcatactcagcctagtgggataagaatctttgtctgccgcatttttcatggcctggatgtgaagctgctctgtctggtatcgttcatattctttttcggcctctgtgttgatcaatacgatgccaagatagtctgaaaaaaacctgctgagctttgtgcggcggtccttaaattgactagctgcttctataatctggagtacatctccatatgcagattgaattgcttgttcgtctgctttctcaaacaaatatttgtcattgagcagctctgaattagggattcctttttcctttgctttatttcttaagtatgtatagtattcacaaaaagccgccgtccggtaggcattggagtaaaaaactgcactcaggccaagtgtcataagttccagcagccaccagcccaggaaggacatttcaaataaaaaacactgccacttatgtccgttcatcatctctctggacagccggattgcatcccgggatttgatcgacggattttctgccatgatgtaaggcacgaggtaataggaatacttttttatgatgccccctatgaccgtaaaagaccacagaaacagaaaaatagaaacgataagcatcgtcttggacgcacggagccatttttttacccgtagcaggaataacacacgctgggccggaactttgcggtaaatacgcccttccagaaacatcctgcgggagatgacggcgaaggtattgacaatgagaatccaaaaggataaaacagcagccaggcaaaaaaccagtaatatggctagagtaacattctgagagccaaacagggaattcatacccgatgccagtgtgaccaggagagatccagaggtgacgccattgagtatctgtgcaaagactcctctgctccgtccgaatgcggggttctgctttttggatgcgtcgatatgttctttctcaatctttttggaaagctttctgccggattcggtgtcccctgccgcgatatcctctgccacatccacaacaccttttgaagtggccactgtgccggatactgctgcatgagtgaactccgtagaatatgttttgatggattttatcgagtcagaaaactcggaaccaaggaatgcggaaacaagacagatggcaagaaatagagcgtaatgccttttcaccgtctgtctggcttgttttttcatttcttttcttgtcaagatcttatctccatatccggaccacataagcctggcggtttaaagggtctcttttttgatagtcaaagagcaggagggtttccttccggctcccgtcccccgcaacatcaaactggaacttttcgatgtgggacatcttccgcagatttttattggcataggcagaaagttcccgattctttggaagtatattgtcatagagatcatacagctcgtctttgtttaccgtgtattccccggaaaaagacggcctgtttttgatattttctcttaaatataagtcgtaggttaacagttcccggtaaagcggaagactctcattccctgcataccggcagataaattcctccagtatctcataggaggcgatccgggaatgattcatcttgtgatatcccttctcctcataaaaattccccagacactgatacatgtgaaagggcgaggagaactcatgctccaaatattccattgtgttggcaaactgcccgctgttataatagatctccaccatattctctatggatttcagagtcatcatatcctcatagggaagccatttggtatacagaacctcatagggaggcgtatccttgtatacaaggccatattcatgctttttcttttccatatgggagcctttgagcacctttaaaaatcccagctgaagctgttccggccttaccttgtaaacgtcattaaatgacgaagcaaagctttgcaggtcctcatatggaagtcctgcgatcagatccagatgctggtggatgttgtgcccctcattgatctttttgacgattcctgccaccttcttaaaatccattgtccggtggatctcacggatggtctcaggatttgtggattgaacaccgatctctaattggatcaggccgggacgcatgtctgagatcagctgcagttcttcttcattgagcagatcggctgccacttcaaaatgaaagttcgtgactccattgtcatgttccttgagatacctccatatagccatagcatgtgtacgattacagttaaaagtccggtcaacaaactttacctggggaaccttgtggtcaataaaaaattggagctctttttttaccagggaaagatccctgaaccgaaggcatttatcaatggaagaaagacagtagctgcaggaaaacgggcagccgcggctggattcataatatatgatcttatgctgaaagtcctccatatggtcatatacaaaagggaccttgctaaggtccatcaccggcctccatggattgtctgtgattgtttctccgctcctccaggtgatgccgtcaatctgtgaaagatcatcttttttgccgtgataatagtccatcagttccaaaaaggtctcttccccttctcctttgattactccggtgacctggggaaaacgtttcagcacatcttgggcatcataagatacctccgggccgcccagccagactggcagggcgggaaaaagctttttgatctcccggaggatgctttcaacatattctatattccatatatagcaggaaaagcagagtagatccggcttttgtttatatagatccatcaagatatcgtctgtctgctgattgatcgtatattccgcgatggtaatctcctcccggtagggctttgcataggcccgcaggcagtagacagccagattggaatgaatgtattttgcgttgattgcagtaagtataaccttcatcttgtctcctgtatttatatgatctctgccccaaacggcatcaatgctaattttgctatcttaaagtgctgaagcccaaacgggatgccgatgacagtgatgcacagaaaagcccccatgatggcagaaccggcagccatgggaagtcctgtgacgatcagccagatgatatttaacagcatggagccggcacctccgccatagcggacctctttgccgaacggccagaagcttaaggatgcaaacttaaagcactggatacccaccgggattcccacgatggtaatgcaccagagacatcctgcaaggcaccatcccagtccgcttacaaaacctccgcagataaaccataatatatttccgaaacagcccataatatctcctcctaatctcttgttcttttactcttaaagtaaatgaaatcatcaatggcagcaaggatatcctgaaaatcttctcttggtgccaattcaatatattgtctcagaagttcccgttcctctttcttataaggaccgtaaaaaatatcaaacaggttatgtccccgcagataaatcttgatctcctccatatgagctttgacatcatcaggggatgtcagcgttcttccgagcacctccatcaaatgcctgccgctcttaagacggtgtaagtattcctgccacttctgaaacaacgtttcataaaattcttcctctgtattgataaggtttaattttaccataactgcaggattcagaaaatagttttcaaaggaatagtatttcaagatcagcacatttctcctggtaactttaggaagagggtccacatcggatatgctccgctcgtcgtaatacctgcagagctgttttcccaggacatccggatcttttccgtcgctgtcccggatcattaaaaactggtcctttagataaatctggttcatatattttaagtttgcataggtcttgatgttggtgcagctgtttgtggttatgatagcgattcgctttagccgtccgtcttcatcacagacctcagagtaataacgctccagcaaaagaggaaggcggcttttgtcctgttttccttccacgataaagacaaaattcacatccatcaggtccgcggcggtgtagcccagatcattgaggatgactcccagatctgttttttcccgtacaacggaataggcatccttatcaagaagaatctgtctgatctggcggctgttgaagttaaagatcaagttcggcgcatgggtggtgaacatgacctgattcttttcggaaagcttgtaaagaaggtctcccgccgccttctggagctccggatgcaggtagatctcagggacctccatcatgatgatacacgggattttagcggattcctccacataggcttccagcagcgacaaaatatagatgctccttatgccctttccctgctgttccacggtcctggccccttggtgttctctgctgtagatcatggaacggaccttaagcagagcattcatgtcgtagttcatataataaaatacatcgcctactcctccatttttgtggaaacttttattgaccttttccacaaaacggtccagattcaggtgatacaacttgtattcaaataacttggacgtctcgaaggcgtttaattcctccggcattttctgatggatcagaccgatacactgaaagcagtgggtgcactgcttcttcctgtcaaacatgcagcaatcggagcgcatctgggtcagcagtttatcctcctggctgatgaacagatcttcctggatctgggatatgtcccgctccgtgtccatgtaatagatctttggaaaaactttcgggatatagggattgtttttctggaatccatcctgatacaggatcctgccatttctgttggctatgaaagagaaggtcaggctgccatcctgaaatgatgggaggcgttcccggaaattcttctcccatatctcatatctcttatagtgacttacgatcccttctaagtggagaagctttaaatcctcctgggtgatggaaaggctgatgccgatctcgatattctgtcctgatgagtggaaatcatcttccgtgatctcgtactgccctccggctgcccgcacggcatctaagacagagctttttcccgcgttatttttgcccaccagaatcagagcatttctgatattggtcaaatgcatggttttaatggatttaaagttgtgaatagaaaggctggtgatctgcataaagaattctccaatcacataaatatattcttattctatcatatatcctgttatggaagtacttcatcttccccatgcgcagaaagttctttgatatcacagatgagagatatacgaaacagcttctgtactgtcttctttctcttggaataagaaatcagtacccattcgtcatcagagtctatcaaaattcctttgatctggttcataatatcaacagatgccaggggttccttgaccgtgatctcacagaatcgccctttgcaccttacaagggtctgtttgatggatgcctgttttttctcatcagcaggtttttcttttttctgtttttctaaattggaaatgatatagacaagcaatccgatcactacaaacaataaaaaagttgtcatatatcttcctccatgaattcaaagccgttcaccgcagacagatcgatcaatttgaccacagtttcctttttcagcagattgccttcttttcttctaagatactgcacccggagccagtcttcattcacgtccagaatcttaaccttatcatttccgccgatatccagcgttaaggataagtcatcacagtcaattctgcatgtctttccaatcagctgccggagcaggtggaggtcctttggtttttcttctttcgtgacaacctccacttcattccctgtcaaatcatccaggctgatatggtacagttttgcaagttccgccgctttatctaaggatggcattccctggccgcactcccagttagagatggtctgcctggtaacggataaaaaatcggctacttcctgctggctgtatccctgtttctttctaagttttaataatttttcttctatcatacaaacggtgctcctttccgtgccatcattatattgaatcccacaacaaagtaccagcaaatctgtttggaactttgtcaaatttttttggcaagcctgaaaaacacaggaagatagtacagtcctgtagcagttatcatgcctccgcacagaatcatcaggaagatctggatggcccttggcattccgggaaacaggagaaaaaatcccatgctccagtaggtgatcatggtagccgccttgccgatgaaggctgctccgtccagcttttttccattgagcttcatggcggccaggttgcccagaagcatatacagttctttgacaataaaaacgagaaataggtactggaaaccatggattctgtggatcaggcaaaagatcaccgcgcccagggtaagtttgtcagccacagggtccagagccttgccaagctccgtgacctggtgaagctttcttgcggcaattccatcaaagaagtctgtgacacctgagagaatgagaacagccagggccttgtatgtgtctgtcacagaatgcgcgttgatatagagatagataaacacagggaccagcagaatgcgaaagtatcccataaggttcggtatagtaaaaagatcttttttctgaaacatttggatggctctctctttctagtttttctctcttaaagtcactttttttgccgcctgtctccgcttcgtgtcagacatggcagaatagtgttttctggtagtattcacatcgttatgccccaggacttcggccaccaggtaaatatcatcggtttcctcatagagagctgtaccatacgtactcctaagcttatgaggggtgatctttttcagcggcgtcacctgttttgcatattttttcaccaggttctgcacggcctgaacaccgattcgtttcctctgcatagaataaaacaaagcattctcatgcccttctcgggggattattttgccccgggagccttctatgtactgaagcagcgcgtctgccacctcgtccccaaaatagacggtcatttctttccggccttttctgatcagatgaagcccattgttcttaaaatccacatcgttcatatccagtcctaccagctctgaaacacgaataccagttccgagaagcagggttatgatagccagatcccgttcttttgttttttcatagtacatccgtttctgcccggttaaattatcgccgcctctctcgataaagtccagaagtgaggcaacctcatccacctccaggcggatgatctctttttcatggattcttggcatatccacgagaagggttggattggtcttgatcagctggcgtttataataataggcataaaacgttctcaaagaggacattttgcgaaaaattccccgttctgtgttctgcatccgtttgtcatcggatatataggtttttaaatactccatatattcttccaggtccactgattcaatcctatccaaatcttcaggtttgaaatccagtaccgtataatttttgtatatggggttttcatccatcagaaagtgaaaaaacacccgcaggtcatacgcatatgcgatccgggtccgtacctgggtcgtggtatcgatcgcccggaaaaattcctttgaaaaaggaggcagtgttcggatcagttctcttagctttaaggtctgctgcatgctcagttcatcataataagattgaggtttcataatgtctttaagctcctttccgtgtcaagtgttctgaatcatattatagcacaaacctgtcactggctgacgaatctttttatccatttgagtgcctctgagagcagtacgactgtaagaccggtaaaaagaattttgatccacatactgaaatccaggggaaccgtgccgaagacaattcccccgaattgggtgatgaaaaactgcagcgcaaacgtccctgcaaacacccagagcataagtttgttatttccaatatttttaaagatactcacatccgtaagctcccggctatttaaagcattaaaaagctgaaataccacaaacagggtaaataagatggtgggctgctctgcgtcgctgcctcccaggaaacggagccagtgctgtgccataaagacaaaggagatgtaaaggccgttgacgataatccgtgaaagcataggctttgttacgatgctttcgttcctgggagtgggactctggtccatcaaatccttgcggataggttccagtcctaaggtcagtgccggcggaccgtccatgataatattgatccataaaagctccagtgcggtgaatggagcagaaaatccggcgaggatggacgccaggacaacaaaaacagatgataaattgacggttagctgaaactgtataaatctctggaaattctcatagattccccttccccattgtatggcttttactattgttgaaaaactgtcgtctaaaagtacgatatcgcttgcttctttggaaacctctgtgccagtgatccccatggcgattcccacgtcggcattttttatggcaggagcatcgttgatcccgtccccggttactgcaacgacattgcccagctgctttaaggcatttacaacgcgcatttttacagtcggagtacttctggcgatgacccggatatgggggatttccttcattaactcctgatctgacaagacctctatatgctgggcttccacaaccatatggtcctcatccaaaagcttcagctctgctgcgatagcagaagccgtcaggatattatccccggtgagcattttcagttcgatccccgcagctttacacctggctgctgcctcaaagacatcctgtcttaccgggtccgtgatggcggcaaacccgtcaaagatcatatgggattccagaagcttccgatctaacttataatccataggagcttccatctctttatgggcaaatccaatgaccctgcacgcttttctctggaaatatgcaatctgttctttcgcggcactgctctcttcaggggaaattccgcacaatgacataattttctcaggactcccctttgaaaacacctcaatgccctcatctctttttataaccgtcgtcatatatttggattcagaagaaaacggatacacatactgaatctccgttttttccctaagatcagtataattggtacctgcctgccgggccgccgccagaagggcacattctgtgggatttcctataaattttaccttatggtcttccacctctatatcagcggtgctgttgatacaaaaattctgtatcagatgcctatcatctaatttctctgtttttttaagtctgccctggctgaaaatatccgtcacggtcatgcggttttctgtaagtgtaccagttttatctgaacagactacattgatacagcccacggtctcacaggcgatcatttttttgactagagcattttgtctggacatctttatgatgttgactgcaagggaaacggcaacaatggttggcagcccttccggcactgctgctacgatcaggacaatactggtgataaacgcgtcggacactgtatccagagaggcagtgccattcatgagaaagactgccagctgtatcagaaatacaacagctgcggcaactgaacctagaaccgtgatttttttgcccagggatgccattttttcctgaagcggcgtgctgctgtcgtctgtagatgacaactccttcgctattttaccgaattccgtctggtctcccacgctggtcaccaaaacggtgccgtggcctccggtgataaaacatccggaatacaggacgtttctgcgttcggcaacaggaagagccggatcttgataaacaatgtcagcttctttatgtactggcatgctttcaccggtaagggcggattcatctgccatcaattcgctggactccacaagacgtccgtctgccggaagcttgtcgccggtccccacacagaggatatcgcccacaacaatttcccgctggggaatcagacagaccttcccgccgcgcactgctttcaccggggtgtcttcccctattttattcaactcctcgaaggcctttgcgctttttccttccataacaacggtgatggctacagacagcgatatggcaacaaagataccgatacattccagaaagtctgcttctcctccagaataatatctggtgatgttgactcccagcgtgataaaagcggctgtcaagagcatgatcagcataggctccgtggacgcttcccatatccgtctcacaagggataccggtttttcacgggaaaatgaattttcaccgtggatctttttgctttcttttacctgggggccggaaagccccttttccttctccacgcccagccgtctgagcgtctcctgtggagattccatgaatatgttcatctttatcctcctgttgtttcctgcaatgttttgtttcctggaatcaagcaggcaagcccgctcaaacaatataaaaagacccaagtacagccgatcatgctatacttgggtccaaaagacgatatataactggtgacggctatacatgagtctcgttatttaagacaagccagacctagacggtcagtatgttgacttgccacatatccatatgctaactactccctcacgggttttttaattgttgataaatattaccattgttctattgggtttgtcaactgcttttctgcaatcttttcgtttagagacagcggaccatatcccttgtaatctcctccagagaatttgcaccgcacatggccatggtatcctgaagctctgctccaattttctcaatatatgtatggacaccctctgctccgcctccgtacacggcggtcacaaacggacggcatataatgaccccgtctgcccctaatgccagcgccttgaagatatcggctccggaacgcagtccgctgtcaaccaggattttcatagagccgtctactgcttctgtgatttcctccagcacttctgccgtggccgggcactgatccagaacacgccctccgtgattggacacaacgatggctgaggcacccgcctccttggcttttagcgcacccttgaccgtcatgacaccctttacgatgaaaggcagtccggattctttgatgatctctgccaattcttctaccgattttcttccagcgggaggtgtcatattctttaagaaaggaagcccggctgcgtccacatccatcgccgccgcaaaggcaccgcagctgtgaacctgagaaaacttctcccgtatcgtctccagattccatggttttactgtgggtacacccataccgccggctgccttgatggcctgagtggctgccgtcatcacttccggattaactccgtcaccggtaaaagcagcaattcccgcttgtgcacaggccgagaccaggatctcattgtaggacacatctgtgtatttatcaccatagtgaagatttacagcgcctacgggaccggcaaaaaacggataacgaaatgtctgtccaaacaattcaagtgcggtgctcaccggctggttttcagacagggtatccatatttacccgtatttcctgccatttctgataattgcggatcgctgtgtcccctgatcctttagctcccggtccagggatctggctgccgcaggcttttccgttgcacacaggacaggccttgcagtaagcccccatacaggttctggctgaagccagcaattcttcataagtcatatgatcctccaatctgtttttaaaatgtgatttcattttatcatcaggcacaggaaaaggcaatcaactctctgcgaaggctgaaagccataaaaacagtgaccgcagcggccagaacgtcagcagcaggctgggcataaaggattccgctgatccctacagccgccggagctgccaggatgataggaagaaaacagatcccttgtctgcaggttcccaggataaaaccctcttttgcctttccaagcgcgagataaagggaggaatatactgtatagaacccaaacacaaaaaatgacagtccgtttgccctcagtgctttccgtcccacatcgatcatgataaggtcatcctttgtaaactgggatatgatagatgtagaaaacaaagcaacagacagaccaaaaatgacacagaagacggttgaccataggaccatggtccgaatggcctcatgcaggcggtcatacttttttgccccgtaattaaatcccgcaacaggctgaaagcctttgataaacccaaacaccatcaggcttcccatagaaatgatccttgaggcatcccccatcccggcgataacggaatctccgtaaccgtggatctttgcctgcatactgactaaagcgatggaaaggctggtcagcagctggaatactagcgtgggaatgccgatcttaaaaatctcagacaggatctcccttgaaaaacagcattgtttcaggcggaagctgaaattgcttctttggctgaatatatagtacagatataccagtgtagagacaaactgtgagatggctgtggctgccgctgctccggcgattcccagattcagaacatagataaagaccggatccaatatgatattcaggacagcgcctgtcagtagtgcgcacatggtagtttttgcggctccttcgctggttacgatattattcattgtgacattaaacacattaaagatggatgagatcagataaatgcccgtataggtcaaagcatagggcagtatgctgtcggtggcacccagtactctcaggaccggctcaaggaagagtatggtgcagaggatcaggaccgcccctgccaaaacactgctgtaaagagctgtgctggcaactttatctgcagtttccttgtcgcctcggcctaataatctggaaatgtaggatgcagcgctgttgccaaacagcaggcctaatcccacgacgatctgcccaaggggaaaggccactgtgatggcccctgtctggctggtacccagccctcccacaaaataggcgtccaccaggttataaagcgcattgaccatcatcccgatcatggtcggaagccctaatgccaacagcgcctttgggattggcgcacttccaagtaattgtgtattcttgctcggtttactcatagtttttttctccttttcttaatctaagatatactactataatttatagcaataaacaaacacaaagttgatagtactataaattatagtatctgtcaacatttctattatagatgtctcataaaatgaataagtccaaaactacttttttgttacctaagatggactttgataaaccattgtatgtaacagaacataaaaaaacatccatggtacaagagctttttttttactcttgttcatggatgttttttatgttctgttattcgtatgataaaaaagatgaacttctaagtatcttgttttttatacgcagacttgcttctacatgtatgatccaatgtctggagaaaggcatctgtatcaatactccaattaaaatcgctatcgtttcgcttttctgtatcctgcctgctgtgcttccttttcactctggaacttcacaagatacttagaggatttcatcttttcataatctctctgtccggggcagtgataaactttggacctggaattaccgcagatatagcttgaggtactttcatgactgctttttttggaagatgtgctcttttggccggatgccgcttttgaagccgtgctctcacctgttttgtagtcaatggatatacctggctgtacattatagacaaagacattaaactccactgcttttcctttatcctccacagatttagcttccatctggacaccttttgctaccagatccttcttttcatagactggagtgacccggtacagaacatggtttccagtttcctttacatagtcggccaccatgtcttcaaacggcagcatcccgtccacgttcatggctctggttccggtgatgagattcttttcatttgcattttctccggtgagctgatagccgatcaggtgacagcggttatagagatacttgccgtctacgttgttgtatttgacagtatgccacccggtaggcttcaccattccgatggctccgcgctttttggtgggcatgatgtcttttccgatgtttgcctgtgctgtgccgcatctgcccagggaatccagtttactgtaggattcgtaggatttggattttaaatcctttgaagtaaaatcagggctgttgttatttagctccacatacattttgcccgaatagtcggggatattgtctatggatacattctgtgtttcggtttttgccgtctctttgacagctgaatcggttttgtccgctggctggcacgctccgaggctgaataccaggatcagggtcaataatgcggctgagattctatttcgcagtttcatagtgatgtttctcctttgtatatctttcttttgtgatatgatgggtggatccttcaaactcctctgtttcttccagatgccatgccgacagatccaggtcaaaatacaagtctgccggatagatcttattccaacggaaaaggatcaattcattaattcggtcctcataatcccttaccgtgcagtcttctaccagacagtaatccccggtgtctgccttttctaagaaatcatcgcagaccacagcgtttgggatatctttatagagcccataggtgtaagagttcatatatactctggattcttttaccatgtctttcataaaagccctgagcccacggtcctggctctgccttctgcaatggaataataggccgtttttgtcatccagacaggtgatcagtttcatgacaggttctctcctttctctctaggcagcttcttcccttgtgaccttggtgatccacttccagcggtgcagccttatgaatacagggattgctttataaagctgatcccatttcagcaggaagaagacgacgatcgggggcagatgcaggacaaaggcggcaaagatggagatcggcagaaggatcagccacatgctgatcaggttcattttcatgctgaagctggtgttgcctcccccgcggataataccgttgtcacaggacatctgataagcggtcccaacggttgtcaccgacagtattgccataaactgcatggaaagtgcctttgcctgcggggagatctgatacagggacaggacaggttcccggatcaggaaaatggccagtcccgatagaataccgatggagaggaataaaatctccagggtttttaccataggttttatattcttttctttttcctcccctatggtccatccgatcatgattcctgaggcgctggcagagccgtagaccaccaccgtgatgatctgaaatacaatggtggctatggagttggccgcaatggccggggctcctaaatgtccgagcaccccggtctgtgccatctgggcgaggccccactgtgcctggcttgtgagtaccggaagtgcggtccttttatagtctctgatgtacgaccgatcgatgaagaccagcttttttaaggtcagattcagggaatgttccttatattttaaataccagatcacgatcagaagttccaccgtgcgggaacatagcgtcgcaacggctgcgccccggatacccagctccggaaatccaaaattgccgtagatcaggcatgagttcaggatcatattcaggatcagcgtagatgctgagatgatatatcctattttaacgatcccgacggatctcagggatgccgtcaaaatattagtcactgtaaacatcaggtaggtaaagcaaatgatctgcagatactttactccttctgcaatgacagcggcgtcattggtgagaaggcccaggatctgtcctgggaagaacagaatcagcagaaacatgactgcagcaataccgccgccgaagcgcactgcggtcccgatggtatgtacgatgggctcaaacctgccttttccgaaatactgggttcccatgaccactgccccttccgaggcacccaccaccagcatctgtaaaaaaaactgtatctggttgcacagggccgagccggacaaagccgtctcactgtaagaacctagcatcaggttgtccgcgagattgacaccgtaggtgagcagattctgcaatgccagcgataacgtcagcagagcgaaggttttataaaaagatttttcagatatcatattaatactctcatctttccttgataattatctttattataccaaaaagcaatcaagatatcttcactatattgtataaatttaaattatttgatagtctcataataatgaatggatagaaaaatgatccatgataacgtctcatggatcatttattctgcttgtcttacttttgaaaagggttttaacattttcaaagaaagctgatttttaaattatcccagcttaccagtctttccagttccgcttttgcagattaaaatgtaccttgtgcataatagccaagtgttatggttatgttagcgtgtcccatgagatattgcagagtattagggttcattcctttgttttccatattcgtataataggtatgtctgaatgaatgaggtgtgatgttcggtaacttgtcctttaggcaatccctcgcggtttaggaataggaaattactgtaaccagccataatcagcggttgtgcttttcctctgttctttagtattctttggagtgcttgataagctctttctgccaatggaagttctcgttttccgttctttgtttttggagtatcaatatagtagccgatttcgatatctcttaatagctggtggtacatattgagtattctgttctgcatatcaatatgcgttgtcaatccacaaaattcagaaatatgaatatcattaccgcctttccgttataacgtgaaaagtgtttgttcctcttttcgcaccatatagggaattgcaggtgtgatttgctaatttgaaaccgaaaaaattaaaaaaattatttgcactaaaaaagcccgcacaaaacatatggtttgtacgagcctttaaagctgtattgcattcaattttttgtaaagatttattaaattgtatttgattgtatggaattgtacttaaagctttccataacattagcccccttaaagcactttctagtatctaaaaacatcattcttcaacataacagatttcaataaaccttaatacatcttgtcgtcctcgctatcttttgaacgattgttagaatttctcctttggttatacttcttcataattacaattttaagtaagccaacgacaatcaaaaccacaacaatgataatccaccagtattgttccatacctacttcccccctttccctttcaatagtcttaaatcatcttccctgtcctacgcagaatagagaagttcattcgtattaacatgtaccatacaatgtttacattgtggaaagttgttttcaatcgtttgatggactccctcagcaattctatgagcgtcataaagagctaaattaccatcagctaatatttcaatatctacatacattttcgctccaaacatgcgggtttttaattcatcaataccatcaaccccttgctgctgaagcacaacttccctaatctttgtttcagtagcattgtcacaactatggtctaccattttgttaatgctttctttgaaaatgtccaaagcagcttttaagatacaaccgcaaatcacaacgcttgcaatagggtcgagaatagcatagcctaaacgcgctcctaaaatgccaattaaggaaccaaccgacgagagtgcatcagagcggtggtgccatgcgtcagccataagtgcgtcagaatttgtatgctttgcagcacttcttgtaaaccagtacatccactcttttataacaatggataagactgccgccgtaagtgcgattccactaggagcagaaagcgtattgtactgttctgaaaagattttcttgatacctgaatatccaattccagcacctgttatagccaatgcaacagaaagaataatggaagccacacattccatacgttcatgcccataaggatgttctctatcaggctgtttttctgatattttaattccaaccatcacaacgattgtgcttaatacatcagaagccgagtgtacagcgtccgacagcatggcacttgactttcctatatatccggcaacaaatttaagtagcgataaactcaggttgaggattagtgtgattttggaaacctgaatagccttatttacatttttgttttgcagaagtctacctttttccataatatgactccttatcctgccagcttccgaaacagacgttttgtaaggaagtagtaccagactaaagctaccaccaatcctatggagaaataaagaaccgcttcattctgcatggctttcgctacccaaaatgatggaaggaagccaaccgcgaactggtagtaactatcaataaaaaagggggctggtattccgagtaatgtaagtgcagctagttttgtaactgccataccctctaatttattgcttgataatgtaataatcataagtgaaacaataattgcctgtactgagccgagaagcgccaaacatattgtcattccaatggacaacttttctaatgaaaaaagtaacagtacaataaaagcgatgattgccgaaataattgagggtactcccaaccttgtaaagagataccccgacttaccaagaggggtaatcgaaaagtaccgtgacactttatcgtcgatttcctctaatgtaatcattgcaaatgcaaagcagagcaatacaggagccatgattgaaagtaataaatcaaagattggatagtatgcttgcaaagaaaaatctgttattctttcaagaaagggaataccgaatttaatcaaagttcccatgacaaaaggcgtaaaacaagctgcaaacatcatagggtcgctcttgatttgtctaaatacctgtatggtactggataatatccttttcatagctttacacctcctaaacttctccacatatgcttaactgtatgtcgcgcaactatgtagaggataatcaacgtagcaattacaagtaccatatcaaacgatagtaaaatactttttccagttatgaggttcatgcaagctgtgaacggaaaaaagcggaatatatctggtagctttacaaacagaccaacgataggtggaacaaagcaaacaatttctatcggcataatcacaatgagaaattggttcaagtttgaaatttttgtagccgcaataattccaagcatagtaaagattgctgatgtcaaagctgtaccaattgcgatactaagtaactgattgctaccggaaacgaatcctaatatcattgcaattactgtagatatggcaattaacgcaactgtttttgaaagtatgtactccgatacttttacaggcgatactaccatagcatttaacaccttttgacttttttccaagaggacaatcgctcccataaaaaacaatcccattgctgccgggtcagagtatatcatgatagaagcaatatccgttttccaatgtcccgtcaaagcggcaatcccacacacatataaaactgttaatataaagtagataaaatagaaaccatatttccattggaaatgtatatcaccacaaattaaacgtcccaatctcattgaagtgtcctccctgtaatatcaacaaaaatatcatttaatgtaggctcactactatgaatagaaagcaaacggttttcggaaattaaactttttaacaatttatcttctgtggttctatcaagcagacattctccggttttctcgcctttatcatagtaggtatattgtattttggcagctccccttgacataatcaaattatgcgggctatccaatgcactgacttttccggcaacgataaaggctacttggtcacatagctctgttgcgtcaaacatattgtgagtagtaatgataatcgtttttccgcgtttcttttccgcaagaataatatctttcattaaacgattatttgtagggtcaaggccgcttgtaggttcatcaaggaataatatatcagggtcatggactaacgctttaatgaaattcaagcgagaacgcatacctttggaaaagtcagcaacttttttgtccccatcattttccaagcctaccatatgcaataattcatcaatagaccgaggttgcttttcatatagagaagcaaaataggcgagattttgtcgtgcggtgaatttctcgtagcaggttgaaaattcaaagtctactccaatattttcataaaaccgatttgtatgctcccttatttctgtacctgcaacttttacgctgcctttatatcttgtattaagcccagttaaaactttttgaatagtcgattttccagcaccagagggtcctaaaaaaccgaaaatttctcctctcccaacatggaaacttacattctcaacaaacggtttgtcagtatagctaaaatacagtttttttacatcaatcattattatttcctcctctaactttatgacgtttatagacatatagtcatataaactgtaaaaaatttgtttggctacctgcctgtcaaataaccaaacaaaattgttactctgctactacttgctgaataataccattcactaaaagattttgtatcatattcagttcttcgtcctctttgaattgttccaaacaggataaaacagaatacagagattttatgataaccgtatgcggaaccaaaaatacaactcctaaatcttccagtatctccaatatacgaatatcactgtacatatgattttcaaaaatatctgacgatatttttctttgcagatagtccattaaagataaatcaatctgtgaaagaataggcgaagtaatcacccccgttaaacttagcataataacgtcctttgctaaatctctttggttcttatactttttctttttaatggttgtttctatacttgtaaataactctttttgtaagcgaaaattgatttcaacatatagatgttctttactgggataaaaagcatagaaagaaccttttgatatgtttacagcagctactaaatcatcaactgttactttttttaagccgtgtaatgcaaacagcttttctccctctatcaaaagtttactgtttatgatttctttttcttgttccgtaaatcgtggcaaactcatggcctccttatgactaaaatatttgcatcgtcataaaaagtataacattttctgattatataatcaatatgctatccaagatatttatgcaaggtagcttccaatgcgtttattgtagtgtccgtgtcctcattaaaaatcatgtgacgattaagctctaaagtaagtaattccttttgcggtacatgaattaaatcaaatactttgttggtataatcaaggctaaaaagcggatcgcctttggcagtaattaaaataacaggacattgtatagccccattctccaggcacgataagtcagcattaaataagctggcgacaaatcttaaaggataataaggtaaaagcatagggtcatttaagcaatcttgttttgcctgttcactataaaatactctgtcatagtctaaataagcgtctcctggaaccttgtagttaggcagcaattttccacctacacgaaagccccactgtatcagccccataaaacggtgtgaccatgcgggatattttgttaagctcatagtttcttttaatgtagttagcatgatattatgtggaaaaacggcttttaaccttgtgtccctacccgccgccattgcagctaaaatcccaccttgactggaacccatgacagctatgttttcaccgaatttttctattccgtaagttgttgcgtcatatacattatgcaacatatcttccattgtataattttttttgagtttagggctttttccgtgtgaaagatagtgaacacctattatattaaatcctctttcactcaatccacatagaaaattctcatacatgagagggtgtgacatagtacccggcaaaaaaacaatggtaggactacttctttctgtataccaaatagaaagtgttatcggaacattatttgaagcaatgttaacttctttatacataccttataactcctatatgaccgatttgattttatagtcatatcataacttattgcaagcagaaagtcaatagctataaatatatgatttatggtaaattgtaaagaaaaatttcattgcttaaaatacaatgaaatctcaaggttgttgtttttccagcttcaacctttaaggaatatactgttgtatcaaccttaaaacccaaaggtgcagacagttctttaatatatacaatagtagcttttacctccacaacgctcgtatttccgctttcatcagtcgtaagggtggcaagctgttttgtgcagtccttatcagaagagacaccataggttctaccagcgatagagtaatttccgttaacgtctgtaatgctggtattactggaagtcttttgcagtttcgcatttcctacattcagtttcgcccagaattgtcctaattcctgcccctcgccagagtagatataaccgctacattcatggcgttctttattttctttgacaaagaccaatcgaaccgtcattcattactttttcataattctaatgctcctttcattttgggtaataaaatagctgtccaataagaacagctggaaatagaagcggataatcagatttgtattgcgtttttataaaaaaatgacatatttttcaaaaatttaatgatgcactagacaaaagaaagtccgtgagaatattccacggactttcttagatgataaatgattggaaaatgtacagatcataaaatatttctgatcacttctctttttctgcgatgacctgtttgagcagatccacggtctggtcaatgcctaaaagactgctgttgatacagaaatcgtaggctttggcatcgccccatttgtttgagctgtaataattataatagctggccctctgtttatccttctttagaagagcttccttgcttttggctttcgggatttcatatacttcttcaatccgtttgatccgatcttcaaaaggagcgtggataaaaatactcaggcagttatcaaaatcctccagtgcatagtcggcacatcttccgacaaaaacacatggacctttgctggctatgtccttgatggtgtcaaatgcggccagaaatactttgtggttcagcggaaggtcaaaggaattggcgttatatcctaaagaatatgggtccatgacaagggaatataaaaagctcgtggtcggcttctcatcaaagctttcaaatatctcctcacagattccgctttcctttgctgcgacttttaataactccccgtcataaaaaggaatattcagatcctctgcaagctttttccctatcaaatgcccgccgcttccgtactgtctttcaatcgtaataatcgtctttgtagccatatgaaccgctcccttcttttcagtaacttcatttaagttacatccattataccgcatcttgggaaaaaagtacacccaggggcgtaccgtattttatacggtttctactacataagaccttctttttttatccattccctggcaaaatcagcatcttctttcatctgttttgacagacgctccaatgaatcaaacttcatttccggacgcttaaaacagagaagctccacagaaataggtttgtgataaatattcttatcaaaatccaggatataggtttccacacccatatgtttcttgccttcaatagtaggttttactccaatgttgctgatgccataatagacctggtctctgatggtgattctggaaacgtagactccgttgggcggaagcagtttttcaggattcgggatctgattagcggtgggaattcccagaacatccttgcccatatggtttccctttacaacaggaccgtagacgagaaacggggaggtaagaaggcggttggcttcttcaatcctggcttctttaagcagactgcggacacggctgctggagacaatgccgccgtttaattccagctttggaatcacgatcagtttaaaatcatactctctctgcatttcctgtaagagttccacgttgccctggcgtttataaccaaagccgcagtcatcccctaccactagaatcttcattccgacctttttgatcagtatttcagtgacaaaatccctgggggagagcttggagaattcctttgtaaaaggatgttcaatcaggacatccagtcctttttttgcaagtaaacgttctttttcctcttttgaataaatcatatgatagttttctgacttcagggtattgactgggggacggtcaaaagaaaagacaaccgtttgatatccctgttttttgtatttcaacagctcgtcaaaaataagctgatgtcctttgtgcagtccgtcgaattttccaagcgctaccacagagttatgaaattgaaagttctccgtttgatgtatgtattccatagtgctcctttcagtaaaatattttatccggaaagtacatgctcttttggtctttccagtcataaatcccgatgaaatggccgtcttcatcatagattttaagacgctgttctgtgcctacaggcattgtaaagcaatcctttttcagcggatttccattatacaaaatcttggcatgctgttttttcactgtgcgttcaggaagatctgaaaatatctggtccggaggaatgaccgcctccatgatcctgttctccctcatgagttcttcgatctcttccagtgtatggctgcctgacttataaaaaccactggcagcggtgcgctccagtgcagtcatgcaggctccgcatccaagcttttcccctatatcgcgtccgagactgcggatataggtgcctttgctgcagaccacagtcatgtggatatccggaagatcaatcctcaaatcgttgatctcaaaaatggtgacagggcgtgtcttacgctcgatcaccctgccttctctggcaagctcatacagctttttaccgcccactttcagggcagaatacattggcggcacctgctcatagtctcctacaaacgagaatacagcgtcctcaacctgtttttcggaaatattgacttctgactcttcagtgactgtcccccatatgtcttcggtgtctgtttttaatccgagccggaacgacgcccggtactctttttttttgtcggtgagcatgtcgcagagctttgttgctttgcccagacagacgggaagcacaccggtggcctgcggatccagggtaccggtgtgtcctattttcttttgttttatgatgcctctgagcttggccaccacatcgtgggaggtaaagccgggttctttgtatacatttaagataccatttatcataagcacctctataattgtttttggattcttgaaagaacggtatcggtcaccttagcaagatccgctttcatgctgaagccggcggcacggacatgtcctccgcccttaaattcttcagagatagcagccacgtttacctttccgttggaacgcatgctgactttatatgtgtcagcatccagtgcgtataaaaagactgcggcctccacgccttttgtgactctgagctgatcgatgataccgttggtatctccagaaccagcttccagctgcttcatctcttcgcctgtaagataagaaaggatgacctgtccgtcttcatacagacagctgtttaataaagcctgtccaagaaccctgttctgggtaaatgtcttttggtaaaatgtctcgtcgatcactttggaagtgttaatccccttggaaattagatctcctgcatactccatggtctgttttgtcgtattagaatgtttgaatacaccggtgtcatgtacaataccggtgtaaagacagtaagcacaatccagcgaaatatgttcaggatcgaacaattcatatagcacttcgcaggtggcgctggcctggggttttaaaatatattcctgtcctatacccttgctgctgatatgatgatcgatacaaaacgtcttagcagcatgttcatacatggagataaaaggttcgatccgatccagtgagctgcagtccaaaacaaaaaacaagtcatatcggaccgcttctgcctcttgtctgatagaatctgcgccggaaagaaactggaattccggtgcgggtaattcaagataaacagcgacagtttttccggggaaattatctaaaatgtactgccgaagccccagacagctcccaatgcagtcaccgtccggatggatatggccggtgatggcaatggaatctgcagcttcgatggatgatatgaattcattcatgatcgcttctcctatttgttcagttcgtcaatcttttttgacatttccactccgtattcaatggaatcatccaaaacaaaagtgatttccggggtattcctgagattgatggaatgggccagttctcttcggatatagccgacagcgctgttaaggcctgctagtgtatcgtcctttgctttttggtcaccgaggacactgatataggctttgcactgtttcaagtcggaagtgaccacggcatccaccacggaagtcataggcgcgatgcgtggatctttgatctcccggctgatgatgcggcttaactcccgctgtacttccccattgattctagtattcttaatgctgttctttctcattgtttccctcctgtcaagaaggcttatctagggatctcttccataatataggcttcaatctgatcgccttccttgatatcattataattttcaagtacaagtccgcattcaaatccggtcttgacttcttttacgtcgtcgttaaaacgcttaatagatccaaactcaccctcgtgcagaacaacgccgtcgcggatcagtcttgcagtgcttcctctctggatcacaccgtccaggatataagaacctgcaatggttcccacaccggatgccttgaatgtctggcgtacctcggcatggccgatgaccttctctacatactccggctccagcatacccttcatggctgcctcgatatcttcaatggcattgtagatgacacggtataacctgagatctactttttcgccctcagcggcatcctttgcggcagggtccggacgcacgttgaatccaatgatgatggcgttggatgcagatgcaagcataacgtcagattctgtgatggcaccgactccgccgtggatgaccttgactgcgacttcctcattggaaagcttggaaaggctctgttttacagcctccacagatccctgaacatccgcttttacaataatattcagatcttttacgcttcccgcctggatctggtcaaacagatcatccagtgacagctgtgattttgtctcagagagcattttctcacggccgtatgcaataaacttctctgcagtggatctggcttctttttcattttccattgccatgcagacttcacctgcaaacggcacttcgctcaatccaaggatttccacaggagttgacggtcctgcaactttgacacgttttcccttgtcatcgatcatagctcggacttttccgtgagcgcttcccaccgcaatagcatctccaacgtgaagggtacccttctgtaccagtacagttgccacaggaccacgtcccttgtcaagctcagcctcgatgacgattcctctcgctttacgatttggatttgcttttaactccagcacttccgcggtaagggagatcatatctaagagatcgtcgattccctctttgctgtgtgcggataccggacagaaaatggttgttccgccccagtcctcagggatcagttcgtattctgtcagttcctgttttacacgctcaatgttggcgctctctttatcaattttattgatggctacgatgatctcaacacctgctgcttttgcatggttgatcgcctcgatggtctgtggcataacaccgtcgtccgcagccacaacaaggatcgcgatatcggtagactgtgcacctctcatacgcatggatgtgaaagcctcatgtccaggtgtatccaggaaggtgatagttccactttccgtctgtaccgtataagcaccgatatgctgtgtgatcccgcctgcttcaccagcggtgacacgggcagaacggatggcatccaaaagggatgttttaccatggtcaacgtgtcccataacgcacacaaccggaggtctggtcacaagatcttttgtatcttcttcgtcatcatcctttaatagttcttcaatgacatccacggtttcttctaattccacgatacggtcatactctaaagcgatctcttctgcacgttcaaaatccaattccgtgttgaggttcacaaggccgccgccggagatcagaagctttttgatgatgtcatttgcaggaatatggatcgcctccgcaaactcttttaatgtcaggatctcaggaatctttactggttcacttggatcatattccggtttcttgaccggatccggcttgatgaaagctcccggtcctgtctttttcttcttctgggtattttgatttttattgttgaacttattgtttctgttctttttgttgtttttgttaaacttattgtttttattcttcccattctgtccgttattattattggagaatttctgtgaattctgaggattttcttttttcaggaccttcttttggcctccctgattctggctgccgtctttatccttcagctgtccctccggttttttgccgccacggttctggttattctgactgttctgaggtctctgctgtcctctgttcctctgctggtttctggatttgtcctgacggttatccggtcggttttcttttttggccggtttctcttctttttttgctccaagggccttttcaatgaccgctacctgggcatcttccaccgtgctcatatggttctttacttcgatattgtttttctttaatatttcaatgatctctttactttgtttgttatattttttagctatctcatggactctaggttttcccatagattgcacctccactattcattctgactgttttctagtttcccgcgaatggcctttgcaaatccttgatcttccacagctaccgccgcccggaattcttttccgatggcgtggcccagttcgcttctatcgctgaaaaaatacagcggcacatgataatattcgcacatattctgatacatttttttcgtattgccggaagcatcattggccgcaaggaccaggcatgcatggccggacttcacagacttttccactgcaaattcaccgctgaccagatttcttgacctggccgcaagcccgagcagagacaagactttatgattcaagatctatcatctccttttccagtgcgtcatagacttcctcggagatcgatgtcttaaatgagcggtcaagccccttggactttctggcctttttcagacagtctaatgaccggcagatataggctcctcgcccgttggatttgcctgtggggtcgataaaaatatctccttctttcggctttactactcttacaagatccttctttgcttttgattcctggcatccaatgcactttctcatgggcatctttttgttcatacgatcacatcctatttttattcatccaacgattcagattcttcagtgagaagttcttcttccacggcattctcatcatcgtaggccattgcctcctctgccgcttcctcctcagtaaattcttctgtccattccatatcctgatcttcttccatatccggatgcatctggcggagttcttcttcctcctcagcctgggactcactcttgatatcgatcttatatcctgtcagtcttgccgcaagccttgcgttctgcccttcttttccgatggccagagataactggtaatcaggaactactacctgggcgcttttttcttctacatccacggatacagacacaacctttgacggacttaatgcattttcaatgtagacacaaggatcttcattccagttgatgatgtcgatcttctctccctttaagtcgttgacgatcgcattgactctggcaccattcatgccgacacaggcacctacagggtctacgttgggttcgttggaccagaccgcaagttttgtcctggagcctgcctcacggacaatgttcttgatctccacgatgccgtcctggatctccgccacttctttttcaaaaaggcgttttaccagatccggatgtgtgcgggagactaaaatcctcggtccgcggtttgtgtccttgacttccacaatataaagtttgatccgttctgtaggctggaacacttctcctctgatctgttcagacttcatcaggagagcgtctgtcttgtcatctaagctgacgctgacattttcacccacatagcgctgtaccacgccggtgacaatgtctttttctttgcagtagaaatggtcaaagaccactcttctctcctcttctttgatcttctgcacgataacacttctggcatgcatcgccgcgatccttccgaaatccttcggggtgatctccacacggacaatgtctcccagctcatacttaggatccatggcttttgctttggcaaggctgatctgtagtgccgggtcaaattcctccccgtccgcagtctccacgacttctttttcagcatataccacaatgtctccggtctcacggttcatgtttacgaccacattgtccgcatttccaaagtcccttttgcatgcagcaaccagagagttttcaatcgcttccataatgacgtctttatcaatatgtttctctttttctaactggtttaatgcatcaattaattcactcattttttctgttgtcctccttaaaaatctaatgataaacgggctgatgccacactttttgtttcaaattcctgatcagcgccatcgatggaaagtatgatcttttcctttgaatactcttttaaaatgccggtgaattccttttgcttatcaatggctttatatagtttgatatccaccgactgtcctatgcttcgctggaagtgtttttctttttttaacgttcttccaagtcccggtgaactgacttccaaaatgtatgcgtcttcgataaaatcatcagcatccaatttggcttccagtgcccggctgatcagcacacagtcatcgatactgattccaccttctttgtctgcgtaaacacgcagataccagttggcaccctcttttacgtattccacatccacaagttcgaagtggttttcatcaatgatcggcgcaaccagtgcttctgttttctgttctatttctactcttcctgccaagttgatcctgcctccttttccgcgcaaacaataagagtggactttcgtccactccttaagttcatcctatatgttattagttattatagcacttcggttttcagaatacaagggtttgcatggaaaatcttatttgagaccgttttctcttcatcttctgctttttttataaaagagtttttcgtaaagcctgatgtttaaatatcaaacagtgagagctgctctgcctctggctgctttttccctgcggactcatcgtttctatattttttgggaagggccgaaagaaattcagagctttctttccgtgtcataaggatcaggtcctcctttgccctggtcatgcccacaaagaacaaacggcgttcctcctctttatccgccgggtgcacaggagattccaaagggatgctgccctgcttcacaccggctataaagaccaccgggaattccaggcccttggagccgtgaagcgtcattaaggtgaccgcatccgaagtatattctctctcgccgctccgttttagatctccttctgttccgagtaaaaggttggacagaaaggcagccatatcatcgtggaacagggtcattttactaaggctcaacaggaactcgtcctctgtgaggctgtttttttccatccacaggttcaagatcctgtccggccgttccgttttcatcagcagtttgaattcttctgccagctccccgcagtcaggaaaagctttcagggcaatggagagcgcctttgaatctttttcattcaaaagataccggaaaaaggaggttgttccctttacctgctcttcctcaagaaagctgtcctgtccggtgatgacacatggaatgctctcctgtcttagacatttttcgatagccctggcctgatggtgggtgcggtacaaaacagcgatttctccaaatcccctgggccgttctgacttggccgcatagttctgggcatccatcatatccatccctccggtgaggcggttgatctctttggcgataaagatggcctcggaccagtcgttctggacagtgaccacacgcactgggcttttgctgttcctgactgccagaagacggcgttcctccccgggattttcactgatgacggagagggcggacccgatgatctccggcgtggagcggtaattcttctttaaataaatggttttaagatccggcatttcttccttaagcctgtcaaagcaccgggcgtccgatccacggaaaccatagatagactggtctggatctccgatgacaaacagctcttttccacggcgggaccaagagaggaccagacggaactggatatcattcatatcctgcatttcatctacaaggagataagaaaattgactggtctgttccggtgccgcatcactctgtgacagcaccttaaggagcaggtcgtcaaaatccgtaagccccagttcatccatgacttcctgatagcagtctgcctcttctgttgtggcagaatcctgtccttttatgttgtttttatagctggagatctgttttaagaagttctttggctttttatctgacttaagacgggtcaatgtctcctctgccgcctccaaaagctccgcggagtcggccaatacgatctcttctcccctctgcctgagcagatggagacaaatagagtggaaggtccctatggtcatatcctgcgtatgtacttctttcccaagtctattgtccagacgttccctcatctccgacgctgcctggttcgtaaatgtaacagctgtgatctgagccggggatactccgcgttccttcacaagataagcgatcttgtctatgagtgtttttgtcttgccagtcccggggcctgcgatcacagccactgctcggtgttcggtgacaacagcctcctgctgttcttcattgacgccggagtccttttttgacaatgctgatggcttttcggccggtttctttttctctttttttacgggcttctttttctgctttttcggttctgccgtggctgcgattcccagagcgtcaaagaaggtcatctgcccgttgatggcgtcgatctcatccttttctatgagatggatctttccgtattcaccgtcaaatccaggttcccggcggacttcctttttccttaagcgacggataccttcttccacacaggcgccggcgctgtggcggatgtcttccaaaggcacttcccgcaaaatatgaaattccggccctagttccgcaagcatcttctcaaactgggcattgaccttttttcctgcggcggacatgcctgtggatgcaccgatgacctcagggagagggaccaggctctcaaagggttttgcatccgctctcatgtatccttcaccccggtcggccagctgttccacccggtgctgaaccccgatggttattttctttccgcagactggacagataccgccgtattcttctgtctcagaaggagtcaaaaccagattgcatttcctatggccgtcaaaatgatatttgccttcctccgggaagaactcaatggttccgtaaaggccttttcccgtctggatcgcttctgtcagagaaggataggaaaggtcaatgtccatcagattggcctccctgccgagcttaccgggagagtgggcatcggagttagagatcagctggaaagaatccagcgccgacagtctccagttcataggaggatcagaggataaaccggtttccagtgcatggatatgcccagtcagatcttcaaagcattcctctatagtgtcaaagcctgaaaaagcgccgaagagggaaaagtggggtgtccatatgtgggcgggcaccagcacagaatcgggggatatatccagcaggatttccagcaggtctctgctgtccagccctaagatcggcctgccgtcagagtggatattgccgatggtctcaagcttggcggaaaccttggatgcggcatccagtcccggcagcaggattaggttatggatctttctcgtcttctcattctttttatagatggaactaatctctcctgtgattacaaaacgcggcctttttccatccgaagcgattccgtcccgtatcctgaattcttccttcaggacatagagaccttcctccgcaggctccagtttctcggctaattcttccctccaggccggatgggtaaaatcaccggtgcccacaatatcgatgccttttcttctggcccagagctccagatgttccgggtcgcaatctttgctggtggctctagaatatctggagtggatatgtaaatctgcaatgtacatcatgatctccttcttgtgtaatcgaaaaacaattcagctgtaatgaacaaaacagacaatcaaaaaagatcatctgttttatatgaatacctataaaattatttgcagaatttaattgaaaaaagatacagcaacgggaatacaaatccacccagactggaaacagtaaaaccgtttgcaaataagttaaaaataaatatgatgatagcggcagctaacaacccaatcgcaagattaaaacaggtttccccaaattcaaaatgttttgctgcttttaagccgtaaatacagcacactatttcaagtgccccaaagatgatacagatgacaagatatacactcaagattacgccgctcagcttcacctgctccatggccatctgcatcaacttaccacttgtcagcaatgtgacattagaaacaatgtttagtatcccggcaatcagcaggataacactcataattgttaacatcatatttctcttattgttcatatatttctcctaacttgtcgataatggaattattttatcacagaatgttttggaaatcaaacattcctaccgaaaaccattctcagaaaacggaaaacaagaaatccgcataagttggcaataacgatactggcccctgccggcgccgaacataaataggatgcggacagacccacacagaagcagacaacagacaaacatcctgagcagatgactactccccgaaagctcttaaaaagctgcattgctgtcagcgccggaaaaatgaccagacttgagatcagcattgcccccatcatcctcataccgatgacaatggtcacagcggtcaggatggccagcagggaattataaaaggacacatccactcccgatgcccttgcaaagctttcatcaaaggtcaccgcaaagatcttatggtagcagaagaaaaacaggatcaggaccgctgcggaaaggatgacactgaacctgacatcctccctgctcatagccagaatactgccgaacatatagctatatacatccatattcataccggaagtaaaggaggtcaccagtactccggctgccagcgctgacgcggacatgacggcgatagccgcgtcactgctgatccggtcgttttccgtgatctttaacagaaaaaaggccgcaatgacaacgaccggtatagatagcttcagcggagcgatacccagagccacagcgatggagagagccccgaaggatacatgggacagcccgtctccgatcatagaaaatttcttcagcacaaggctgacccccaggagcgcagcacacagtgaaatcaaaatacctacgataaaagcccttataataaacggataggagagcatttccttaattaattccatggacagcacctccactgatcttctgataatattcggattcccggtaactctcttttgttccgaagaaatagtcttcatgtccgatatgaagaatatgatccgcatcctttaatgcgttggatagatcgtgggaaaccattaaaactgccatcccatcttcttcgtttaatttctttaataaacggtagagctcttttgcggctgccggatccaacccggtaaccggctcatctaaaactagcagatggccggaagcacacaatgccctggccagaagaaccctctgctgctggcccccggagagctcccggtaacaggtttttgaaagatccaggattcccagctttttcaactgtcccaaagctgtgaatctctccttcttcgtataaaaaggcctgtactttttttggctcagaaaacccgataagacgacttccatggcagtggcaggaaaatttctctgcatttccgtctgctgaggaagatacccgatgccgtttgccggtaggtttttgtggatttttccggaaaccgggcgcaccaggccgagtaaagttttgataaaagtgctttttccggaaccgttctgtccgatcacggagatataagatccgcgctctatgtccatattcaggtccttgacgatgacatgtccgtcataaccaagatccacatggctgcatgttatgattgaactcattttctcagtcctttctccagattctttacgttttttttcatcaggtccagataagtgatgccctggtcaaactgctgtttcgtcacggtgtggcaggaatagaatgtcaaaacttttgcgcctgacgcctcacagattacgtctgcaatcttactgctgccaaaatccatgtgataaaccacaggaatcttctcttttttaaccattttgatcaaataggacagtgtcctggaactgggttcagattcttcactacaccctggaaatgccgctctgtaggagagcccgtattcatctgtaaaataacgcattggaaatttatcaccaaaaaccatgacgtttcgttttccgtgctttactgtatcacggaaatcttgatccagtgctttcagcttttttaagtaagcctttgtgtttttctcataaaagccggcattgtccggatccttttctgataaaacagcacagatttttttgacgatgatctgggcattgacaggggaagtccaaatatgttcgtcatattctgtctccccctcctcttcttttggaagactcatgccctctgtcacttcttcttccaccggatggacggaattcataaaggcataggtgatctgacggctgtttttatgggatttgagtaccttttgaacccagtattccatggcgccgccgttgtataaaaagacatccgctttctgtatagtgatcaggtcagagggggtcggctcaaaggtatggctgtccttgcctgcagagacgatcatcttcacatggaccttatctttcccaatctgtcttataaagtcatagtatggaaaaatcgtggttacgacatttaattttttagaactgctgctttttgattccttttcaggcctgcatcctgacagtaccatcagggaaacagtgaagcagagcaatatagcgatccatcgtttcactaaaaacttcctttctttacgatatctaattgaatatgatagcaggaaaaacttctcaatgcaaatgtggggtttttatctcaattataatagatagatttgtgttttttgtcgaaatatcttatactggaatcttaaaagagaaaggggtacttttttatgagtcaagaagcaatcgtgaagaaacagctcagggatcgaggaaacgcattattacatggcattcttttgatgtctctactgcttatagcagatacatatttgaggacaaggagttatatcctcatcgatgggatatgggataatacgtttattatcattgtggcttttactgtggtcattctagagatgatctttaaaaatgcttttaacctgaaggatccagtttggaccgcgttggcagcagctgtggggattggcagtctgggagtctttgcaaatcaggcatacttgatattttttagtaaggacagcttttttctgatcacagaatctatatccagcaatggatttttcttgatcagctctgtgctcggtatgcttgtagctgtatcttattttataaagcggaacaaagctggacatttccacaactaaaaaacaagcccttgaaagtacagtaaactgactttcaagggcttgtttttcttaccgttatagttcaactaaattcctgtttcaaaaagctatgacgaacgtaaaatccttacgtgcttttcattgcagcagtatatccagcagttgttcattggtcagattatgaaaataacggcccgcctgaacagtttttaatctctcggagagatccggccggcagagccggcagccttttaacagctctgacagagaggaactgtcagtgtcagagaaataatcgccgaaaaaaaccatatcggtgatgaccccgtgttctacattcatatgaacctctatactgccgcagccttctatgcggcgctttttttccactgcatatttaggggaaaatccataattccaatgccatgtgccgtaacgttccttcttgaggcgttccacagcctcaagatccttctgtgtcagttcatagagaaccagttggttttccctgaacatataatccctaagaatcttaaaaaactgttctgtttccatatcatttttgacataggggcgtacgtttgtcactctgctccttacggacctgcatccttttgattttattttatcgctggagacattcaatgccttttccaacgtatttaaatcactatcgtacatgacagtcccgtgatgcatggtccgcccctctttggaatattgggaattccctgagaatttcctgccgtcaatggtcatatcattgcggccgttgacttctgcctccaccccgatgcttttcagggcgcggaccaaaggcatacaaaactttgaaaagtcaaacagaccgctttctttatccacgatgaaggtaaaattaatattccccatatcgtggtaaaccgcacctcccccagaaagacgccgcaccactcggatctcgtgttccctcacataaccctcattgatctcggcaacggtgttctggtgttttcccacaatgatggcattgtcgttctgccacaacataaaataactgtgggagcggcttagagaatcaaatacatactgctccagtgccaagttaaagcagggatcgctgcttttactttcaatataatacatcatagttttgttctccttcctggatggcgagaccgtggttttgtttcggcctgccaagcagtatggcaggcgatgtattttgatatctgcggatatccgtctttaccatatgctgcatatgatagatgtcatcttcttgaaaaggtacatgataaataaaagtatttcttgccttcagagtatcatgtaggatctgctgacctgttttattatggtaaaacaaaggatttacaaacacagcatgcaggggaagtccttgaaactgatgaagtgattccgtaaaaaaatccacatctgcagtaaacagcagacggcaggaacaaagtgtgatcagaatgcagtagtggagaaccctgccgaactgacggcctaaatgcctggttctgtaaaaagaaacctcaagatccttttccggctgataagttcttctctctcctgtgacaacctcatggctgatgcctctctgtcccaggctgcggaccaggtgcccatccccggaatcctctccgccgggcagaaacacacatccgggctgcctggcatccagataggaacccagcagattctctgaaagatggtcgaaatgatgatgggaaaagatcagataatccggactgggcagccggccctctggacggcagagatctgcaaacacacctttggggatcgggctggtatgaaacccctctcccctgggactgtacagaccgtcaatcagcacagaggttttaccaacacagaccagaacacccgcatttccgatcaaatggatctggcaggttttcaatggccttttgttccccagacatcgatggctgcttttagctcttcacattcctcggccgcctgcaagatcgtttttccttccatcttggcattgatggcagacaggatcgctttcgcccctgcttctgctcccataggatgtccgtaaataccgccgccagccatgaggatacagtcattgccaagcagatccatcaagtattctatggcgcccggctgtacgcctcctgccaccgtcataaatgctctcttgatattcttcattggtgcaatgcactgtgcatgagtttctacaaattcattggtagaaaggccgaaccttccgctgtccggatataccaaaggcatatccataccaacaagtctggcaagcttacccatggaaagtgctgttgaaatgccgttggtcttggaacggtaataagctcccattcctgcgcagtggccaaagattggatagatcagattttcccgcttcatcgcacggataaaatcttccactgcgccccagcccatcgcctgataattaaccatcagggcattggctccggcatcgatcgcccgccttgcccggtcaaataaattttctccggtgatgttgacggcataaaggcagctcttatcttttccaacatctttgagctgttccatgacagctgcaacgcgtttttccattggagaatattccggatacgaaagaagctcatcatctttgatcacatctgccccgccgacagcagcctgccgcgctccgttcgcgctgatctctggcggcactccgatgcacggctttaagatagcgcctaccaaaggacgttcaggcactccgatcaattgacggattccttctactcccatcaaaggtccgggaatctctcttaagactttttccgggaactcgatgtctgcgagacggatcccgtcctgtcccagtacatttcccgctaccgtactcatgatcatcggaagataagccggaaagtttgcagtaggaaaagcgatgcgtgcgatacacgcatgttcttccgccatggggtagatgcctatgacctttccaccgtacttttcgatgacctccggggtctctccttctacatgggtccatgtgcctgcactctggtcagccgccacaagtttgacccagtcatagatatccggctccttttctgagttcatatagtaagttgcgatcaaaaagtcttcatcgacactttccggtaatctcattgtttcaaatttcatgtaaaactcctccattctttctgtttgttaaaatttgcggtacatacgatttcttttctcccggcggtttctcagaaccagcgtccagactgccccgccaatgaccaggaatatcagatagtacatacgatcaccttccttctgccctgctcttttattcgccgaacccggattctatgagttctgccagcgcatccgctgccgcctcttcatcttcgccatcacagactagttcgatctctgtgttctggcagatcgcacagcttaatatgcccatgatcgactttccgtctttttccttgccctttgttttgatcgtcagactgcacttatattttttagcttcttttacgaatgtggatgccggtctcgcatgaagccccgatgcgtttgttacaacgacttttctcttcaccatgataaaactcctatcttaaaattgtcagatggagacagtaaatttgtcttcaccgtctccatctgatcagaggaagaacatgtttcgtgttatacgacagtctgtccgaatatatgtaacagcttgtaaatgatccaggtgattggattaccgccttcagacagacagcttgtcagtgtgtttccgttggccagtgaaccgcagatatgggcaatgttcgtgtgggctccggccaaagctgtggcgcacaggaagtacacactgaataccacaaatgccgcgatacaagtatgcaggatgttatcttttgcataataagccagtggaataatgaaccatggaaccgccacaaggctggctacagcaagcatacggtttccagggatgatggacatgacggttacaaccggtgtcatgatcatgatacttgtcatgttacacggattccccattagggttgaagcgtcaataccgatccagatttttttgccgtgcagatgcttttcacagaattcctgcgccgcattggcgatgggaaggagaccttccatcataatggcgatcattctcgggagcagtaccatgactgcgcccatgttgacacccaaaaggaagcatttgatcacatcaaaagctgctaagataccgatgataataccgatgaaaaagccgaccaccatggtttcgccgaacacacctagtttgttctggaggtgttccggatcagctttgatatccttgattacagggatcttctggcataacttgatcacaggaaaaccgatcatagccggtgcgatgatcgcgcctgtaggccaggtaacggcatccataccgcttgcctcctggtaaataggggcaacatggtcagaccatttccaggtgatgatcatatagattcctgtggctgctacggaccacagaacactttccgtggcaccgtaaattaaagcgccgcatgcaaggaaactccagtaattccaaaagtcgatcataagtgtttttgtgaagtttgttaccagaagtaataagttaagcccgattcccagaaggatgagaattcctgaaacaggagacccccatgcgtaggaaatcagcgaccatccggtgtctacgatatccagtttccagccaagacgttccaccatagactgggtcgccggtgtcatttgtgccaccagcatgtcggttgtcaagttcattccgaccatacccacggcgcctgtaagtgctgcgcggagggcttccccgattttcatccgaaaaaccagggcaaggacaaacagcccgatcggcagaataccgttggatcccaagctggacaaagcggaggacaatccattaaaaaaagcttccatataaatctcctttcaattctgtgattatctcatgacaaacgcatctgtcatgatttctcttatcttttcacatgtgtcggcatttgcgattgcttcaatcactttttcatcctgtatcacatccataagttttgatatcacctccaattggccttgatttgtgtccactgccagcataaagacaaccttggcatccaccatgagttccgtgtcatcaatgcgctgaaatgtgatcccgctgccttttgtctggcctactaaaatggcagtttttataacaccgtcacgttcacagtgcggaatggcaaccgcgatcggttctgtgcagatgccggtgggatatatgttttcccggtcaatgacagcctggccgtaagttgatttgaccatgccttttgatgccaggtaatctgccatttcctgaagaacgtcatctctgcttgttcctgatatttggtaccctaggatttgaggtactgttgttatgttttcgattttcatcacctcctgatgtttcatttcggtcagtcctggtgtctgccgtttatttggacagtacctctttcagattctttctcacttcgtcttttcccctgcctgtgatcagcgggattccgtttaccaccggaatatctccaaaatccaatgtgatctttgccatcaagagaatggcatctggctccaactgtttgatggctgtctttccctgggttgcaggccttttctggacgttgcctttgatccccagctctttacatacatcctcacacattttggcacctaccgttgaagttgcaaatcctgctccgcacaatactaaaattgttttattttccatactgttcacctcattttttgtatttttctgtttaaaagactacgatacccttgatcatctttccctggcgcatatcctcatatccctgtgccaaatctttcaattcataacggtgggtgataaactttgaagcgtcaagctggccgctcagaacaagatccaacgcgcgccggttgacttcgggagaatacgctgacgctccataaaccgtgatttctttatagtgaatggcgttggtgtcaatgacagcggcgctgcttgcggaaatccctccgaagaaaatcacctttcctctttttctcacaagtccgatggcatctgcctgcgcctgtcccaccgggcacgcacagatgaccgtatccgcaccccgtccgttggttttttccatgatgagtttctttaattcgggatcaccgctgcccatggtgagaacatttttaaagccttgttttctggcaagatcagccttttccggattcatctcagcgatgatcacttccttcgttccccgaattgaggcaatctcactgtggaggcagccgatagtaccagctccgatgacgaccacaagatcttccatgacgatatttgtattgatctgtgcattcagtacagaagatgcggtctccgcgatcaccgtatcgataggatccacatggtccgggatgatgttaaagcatccgttttccagcatatccgcagaaaatgacacatactcggcaaatcctcctgggattccttccgcagttccgatcattttcatattgtcacactggttctggatgccgtttttacagtaccagcagtgtccgcatgcgatcacaggcgccacagataattttgaaccttttggaaacttttcattgtcgctctccaccacttctccggcgatctcatggccggaaatggatggataccgggctttggaggagcctcccccataggtccttaaatcagaaccgcagataccgcaggctatggtctttagcaaaattcccttttccggacacacaggagtcgtaaccgtttcataacgtagatcgtttgctccatataatacagcagctttcatagacacatcttcctttccttattcatttaaagtttccaatcgctccaccagggctgtcagaaatttagctcccgtcgccccgtcgatcacacggtggtccatgttcagcgcgatggtcatggtttttcctatgacgatctcaccgtcctttacaagagggacttcttccatctttcccacggagataatggcggaattgggtgcattgacgatagctgtaaatgtggagatgttgaacatgcccaggttgctcacgacaaacgttccgccgcttaggtcattcatcgtaaaattccctttgcctgatctgtttttgatatcttccatgcatcgatggatctcctcaaggggaagtttatcggcatcccttatgacaggaaccagtagcccgcgttttgtatctacggcaacacccatgttgatagtttcattttgaatgataactgttccatcatcccaggaagcgttcatgacaggatactcggcgatggtatctgccacggctttgatcaaaatggttgtgtatgagaccttaaaaggcagactctttctgtaagcggccatctgctcacagtttacgactgaaaaatgtgtaaattgtggagcttcccagctttttatcatctgcttccccatacttttggctaaaggcgaaagttttttttcagtcatcgacttccacccatgcgatcgtatttgtgatctcaacggtatcgccttcgtcagccacgatctcggccaacataccgtccaaagctgactctacctctgtgacagccttgtctgtctcgatctccaagaggacctctcccttggaaatcttgtctccttctttctttttccactctaaaatcgtaccttcctccatatccaatccgatcttaggcattatcacttcttttctcatgctgcttctcctttcgtttcttggtttataattgaaatgttgtttctctgatgatctcgctcaccgacggatgcgggaaaacaatttttttgatctcttccactggcaccttctgttcgatcagagccgctgcgccccaaatgatctcagaggcgtaggttccaagaagatgggcccctacaagacatcttgttttctcatccatgatcagcttgcagactccgtttccacctgcgttttcagctacaaaacggccggaatatgccattgggagctctgcagtctttactttcaatcctttttctttcgctgactcctcggtctctcccacaccggcaaattccggaaaggtatagatgacagacgggatcgcctgataattcatctcatcgtctatgccgagcatatgattgactgctgcctcactctcccggtatgctgtgtgggccagcatgacttttccattgatatcacccgccgcatagataccttccacggaggtgcataagttttcgtcagttactacttttccatgttcaaccacaacaccgacgttttggagtccacagtcttcaatggaaggccttctgcctatggagagcaggattttgtccgctgtgatctgctttgtctccccgtctttttcgcatacaagaccatagctgtttacttctgtcaccttatgtccaagtaagaaggatacgcccttcttctgaagttccttttgaagcatcttggaaactttgaaatccatcgttcccgcgatcttatcaagcatttcgatcacagtgacttttacaccggcggtacaatagtaagccgccatttccaatccgatcacgcctgctccgatgaccgccaggtgttccggcatttcttccaattccagcatctccctgctggttgccgccagtccgtccatgagagcttcctttactcctggaattggggggatcagggtgtcagaacccgccgcagccagtacatgtttcgctgtgtaaacttccccgccggcttctaccagaaatccttcgctggttttttctttcagtttggctttctcgtagataactgtcactttgtttttcttcatggtcattccaacgccggaaaccagcatctgaatgaccttgttctttctggcaagcgcagctctcgagtcaaagacggcgtccgaaaccttcaccccataggcctgtccattttttgcgtgatcaaatattttggcggaattcagcagagtttttgtggggatgcatccctcgtttagacacacgccgccaagtcttttcttctcaaacagcattactttcataccgccctcagcagctctctgggctgccaggtacccggcaggtcctcctccgattacgatcaagtctaagatatccatagttctcctttcttttacagacaagagcgggctgcttctaaaatatcctgggcatcaggaagatacgccttttccagcaccggcgcaaacggaaccggaacattaggagcgcctactcttttgacaggggtttttagttgatcaaaagctttttcctggatcaccgcagcgatctctgctccgaaaccgcctttgacacaggcctcatgggctacgacaacatgtcctgtctttttcacagaggcaaggatcgtttcggcgtcaaacggctccaatgaacggacatccactacttccgcctgtattccttctttttctaactcctgtgccgccttaaggctctgatctaccatggaagagtatgcaacgatggtgatatcggttccctcccgtttaatgtcgcagcagtaatcacactcatacggttcttctggcacttcacatttcttcttgtacaggcctttatgttcaatgaaaaccaccggattattatcgcggatcgcgtgcaggagcaggcctttagcatcataggcattggacgggaccaccacacgtatccctggaatgtgtgccaaaatagactccagagactgagagtgctgagctccgtttccaagtcccgccccgccctgcgtgcggatgactagcggaaggctgacccgaccgccgtacatgtatctcagttttgctgcctggttcatgatctggtcaaagcaggttccgataaaatctatgtaggaaatctctactactgggcgcagaccgagcatggaggagccgatggcggttccgacgatagcagtttcagagatcggcgtatccataatccgtttctccccgaagttcttgatcaggtcataggagcagcgcagctgaccgccgtaaactgcaatatcttctccgatggaaaacaccttcggatcgctgttaaacgctgtatgaagcgcttcattgattgcttgccgcatagaaatctttctcatattgtcttcttcctttccttatttcacaaacatgttccactggatatctgcaaatgaagtgtcgtaaagatcatttttaaggtccccaggggaaggttctttctccttttttgcactttcgctggcagagagaaccatctgaagttcttccttctggatcttatccagctcctcttccttcatgccataggtctcataaagaagcttttccgcatgtttgatcggacacctttccttccatttttggacctcttctctgtccctgtaattttcgttgtccccgtaataatgtccggcaatgcggtaggtcttcatctccatcaggattggtccgcttttgctcctgaccttttgggccgcctttccgaattcctcgtacacggactcgatattatttccgtctacggtaactccttctattccgtatcccgcggctctgtcgctgatattctcaatattgcaggactttttctgactagttgagatggcccactggttattttcacatacaaagatcactgggagtttcatgacagaagcaagatttaatgactcatgaaaggacccctcgttggaagcaccgtcgccgaagaaacatacagcaatgtcctcactttcgttatatttaagagcaaaagctgcaccaactgcgatgggaagccctcctccgacgattccgttggcccccagcataccgatggacatatccgcaatatgcatggaacctcccttacctttacagtaaccagattctcttgccatcagttcggcaaacatgagcttcatatcggcgccttttgcgatacaatgtccgtgtcctctgtgggttgaggtgatgtagtcatgatccgtcaaatgggcgcatacgcctacagcaattgcctcctcaccgttgtaagtgtgtacggcggcacgtgtgagattcatttttgctaactcaatggcctcattttcaaattcacggatccggatcattttccggtagaattctaataattgttcttttgtcatggcagtcagatgttctcctttcatactttggctaccccgtagggggtaaaagtttttaatgctatttccatctttctaccgcaattatagcaatgtactttttggcgtacaatcggccccgaagcttttccggtaacatttgtttccgtcatattgaacactttttcttgcctttttctattttctttattaaaatctacttatgttcaaccgaattttatacacaccgcaaaggataaataatcaggagattgctatgaatcaaaaacaatatcagcttataactttatttacatcttctgaaaagaagaaatatacatatacagaattaacagagatcctgcatgtgggaaaacgttcgatcaacaattatattacagagatcaatgactttttaactgaaaacggattccataagatccggatccttcccgacaattcacttctgctggacagttccatcaatgagctgggactcatcagaaaaaggtattattcccgccccctgtatgaataccatttttcatcagaggagcgatgtactgtcatcaagctgctgctctgcagacagaatctagtctccaccgccgacatcatacggtctctggacgtcagcaaaaagacatgcctttctgacataaagcatgtctccagagatcttaaaaaccaggatattccgtttatcaccacatcccgcggctattctatcgatgtcactgaagtcttcaggagagattatctcatcaacagtttccatacgtttttaaatattgtgggagacaactcttctttttcaggcattgacatatggatctccagacattttgatctggaagcattcaagatgcaggtatttcctattctcctgacctggcagaaggaaaataacatcaacattgagggttatcagttctaccagctgctctggatcctggtggtcaccatcgagcgaatccgccagggaaatcctttgacttccttcccatgtgcttctgaccgccatacggtctgcatatccaaagatctgtacgcacgggtggaaaaggtttattccatcacaatcccgccgcaggaatcctattttctggcatcctatattgacgggctggcacttacaaaccttcctcagacaccgctcggcaccattccatccaacacggtgatccatacatttctggtgaatgtatcccatgatctgaagctaaagcttgcaaacgatgtcaaattatatcatcagctgtcagcccatataaaaagctttttttctctgctggagcgcaacacttcctttgatcagagtttttacaaggaactggaagacgaatatccggccatctgcaagtccgttaaaaataacttgtatattctggaacagagctttcaccgcacctacagtgaaaatgagaccgcttttctggtgatgcatatcgccgccgctgtctccaagatcctgacagagcggcaggaatttaaaattctgctgatctgcgatgccggtgccgctgccacttcctatgtcacaaacaaattaaaatactattgtaaagtggatgatgtccagacgatcacatcctttgaatacaagaattatatgagacatagtaacccttcgcccaatctgatcgtctccttctatccactggacgagacctccattccggtggtgattgtatctccagggcttccgtccaccgatctcataaggcttcaggaaaaaatgtatgcgtcccggaaagatgaaaacaatattctgaataagcggatggtcaagcgggctgaaaaccaggaagccgtggcacacaggcctgccagtattttttcacctcatctgatcgcgttggatctggacgcagatacatggcaggatgctgtccagttaagcggcaatctgctcatacaggatggtctgatgacccagaactatattgattccatcatcaagaatattcatattaacggtccctattttgtgttttggccccatattgctctggcacatgccaattccaactcagattctactccgtttgccgcaagcctgatccgtctgtcacatccagtattttttggaaacgagctaaacgatccggtgaaatatatctttacgtttatagcctcagatacatctgagaatgacgataagatcctgtccatcatcaatattgcgtccagccccactttgttccagtacctggatgaggcgaaaacacctgaagaagcctatgagatcatccacaaattagaaaaggaattgtgattattttcaagacagtgcatccggtttggccggaatatcatcggcacggaatacatcctgaaacgaaaataagacggcgctcgtaaagcaccgtcttatttcatataaactgtgagttatttggcaaatttatcaatgagttctatcagttcatcgactttttcgtcaccgttgttttctgccagagcatcggctatgcagcctttcatatgtgccctgagaatctctttgttggttttgcgtatcatggcttccgtagccatgagctgattggagatatccatacagtaacggtcctcctccaccatttttaagatgccgtcgatctggcctctggcggtttttaaaagtcttgtgatctgagattggtctgcctgcatactacctccctactggatgcctgtcacctggtatcccgcatcttccacggcctgttttagttcctcgtcgctgatatctgttttcagttcgacacaggcattcttgtcatcaaggcttacctctgcatctacgccgtcaagcttgtttaatgcgtcggtcacatgttttacacagtgctcacacatcattccttcaattgcgatggtctttttcattgctgtttcctcctcaacatgaattggttctgatgttactggttctactttctctcttataaaacctggccggaaaaacttcaggcgcagggcattgcttactacaaagacagaacttaagctcatggcggcagcgccgaacatcggatttagttttaaaccgaaaaatggatacaggcagcctgcggccagcggaattccgatcacattatagaaaaatgcccagaataaattctctttgatatttttaatgactgctttgctcagctggatagcagagaccccgtctaaaagatcgctcttcatcaggacaatatccgcggattcaatggcaatatccgttccggcaccgatggcaacacccacatcggctctggccagtgccggagcatcgttgatcccgtctccgatcatcgccacctttttgccctcttcctggatcttgcggatttgcgcttctttatcctgtggaagaacctccgcgatgacccggctgatgttcagctgtctctggatcgcctcggctgtctttttgttatctccggtgagcatgacgacctcaattcccatcttttcaaattcctggatggcctgcctgctggttggtttcaccacatcggcgactgcgatcagccccagaaggttcttttctctggcaaagtacagaggagtttttccctgagaggcaaaattcccgcttttttcttccaggtctcccaatgaaacaccgatgcgctccatcatctttaaattgccggcgtagaccttttttccggcgatggttccctcgatcccctctccggggacagatacaaatcctgacacctcagaaaggcctgcgccagtctcctctccataggagacaatggcatctgccaaaggatgttcagagggcttctccatgctggcagcgatttttaccagctcctcatgggaggttccaattgaggtctcaacatccgtcacctggggccgtccttccgtgacggttccggttttatctaagacaacggtctttacttcatgagctgtctcaagactttccgctgatttgattaaaattccgttttccgctccttttccagttcccaccatgatcgctgtaggcgttgcaaggcccagggcgcaagggcaggaaatcaccagtaccgcaatggccgtggacagggcaaactcaaatgtctgcccggaaaggatccatatgattccggaagccaacgcaatggcgatgacaactggtacaaagatacctgcgatcttatcagccagtttcgcgataggggccttggagccggatgcgtcctccacaagctggatgatctgtgccagcgtagtgtcatctccgactttggtagcgcgaaacttaataaatccgcctttgttgatggatgcactgatgactttgtcgcctgaagtcttctccaccggtatgctttccccggtcagggcgctctcatcaatggaagtcataccttctgtgatgattccatccactggtatgctggcaccgggacgtacgattacgatatctccctcatttacctcttccaccggtatctctgcttcttctccatttcgctccaccgttgcggtctttggagctaaatccaaaagcttgctgatagcttctgaagtcttgcctttcgacctggcttccaggtattttcctacagtgatcagagtcaggatcatagaggcggactcaaaatatagatccatatgatactgatgcaccaacgcaagatcctgcaccccgaggccgtagcccatacggtaaatggcaaataccccatagacaaacgcggcaccggaaccaatggcgatcagcgaatccatattcggagaacccttaaataatgttttaaatcctacctgataaaacttacggttgatatacatgactggaagcaccaggagcatctgggtcagaccataggataccgcattctgcgttccggacaaaaaggccgggagaggcagatttgccatatgccccattgatatatacataagcgggatcataaacaggacagagacccacagtctttgtttcattcctgcgatctcatcatccacaccggtatccttgctcttattggtttcttctctgcggtcatgaacaaacgctccgtagcccccgtcaatgacagcccggatgatctcatcatcgtttaccctggagtcgtcatactccactgtcatagcgttctgcagaaggtttacgttgacctcggaaactccgtccagtttacgtacacttttatctacatgggcactacatgcgctgcatgtcatacctgttacatcaaatttttgcttcataagcacctcctagacacccctcccccggggtatgggtatattatatgtgacgtcagagtttatgtcaacgataatatttctcagatagtattccccgaacctgcccagattatctctgaagacagcaaaagacagcaaaaagcagccttcaatgctgctttttgctgtcttccagccattcaataaatcgtccggtcaaaaaaggatcaaactgctgtccagaccagcgctccaattccctcacgatctcagcctccgaaaaatggtgccttccaaacggagcatatttcatacggtcgtaggtatccagaatcaggaccattctggattccaccggaatgctctcaccggacagcccatagggatagccgctgccgtcccagttttcatggtggtataagacaatctgcgcttccttttccatatccggtacggattttaagatccggtatcctgtctcaggatgtcgtttgatctcccgtctctcgctctgtgtcagacggccgtgcttattcaggatttcatcggagatagaggccattccaatatcatggacataaccaagcccctgtagaaatgaaatgcgtttatcttccagaccgagataactcccgaatcgttccaacagacgggacattcttaagcaatgcttatggatattaggatttcggttaaaaagagcgttgaggatcacatccaatgtctcggactttttcactgtattatttctgaactttttccggtacatcatatcttcggctgcagacagtaccgtgtggagatcctgttcaggattggtttttaccgcacagccccaggaaaaggacagacgaatgccggagagactgtatttggcaacttgattctccgcattttttaagaatttttcagcctcagctaattctgtatcagggaaaaaagccacgatctcatccccgccgatccgggcaaagatatacttatctttggcatacttttttaatacctttgtcactgttgtgatggcacggtcgccaaaggtatgtcccagggaatcgttgatcatcttcagccgatccagatccatgatcgcgacagagaaagggagttcatcagccttcccgtgataggtcagatagtcattataaaatgtacgattgtaaagccctgtcagggtatcacgcatacttctgtctttgatgatctgctgctcccttttcagcttagatacctcagtcacgatgcctgcaaataatactttggaatcctctgaagcagataaagccggacactcataccgatttcctgtgatgatcacatgaaggaatccgctgccggataaaagccttgcttctatagagcatgtctgatttttgttcaaaagctgatggatcataaaacggaaggtctcccggtcttcctcctgtatcagatcttgaatgttcatcctgcgccgttgtttaaacggaatcgataccatactgcagaatcgcagatttgcatcacatatctgaccatgttgatcaaaaaccagataaccggccggagcattgtgaaaaagactctggaaccgttgttcctcctgacggcttgctttcagctgtctttccagcttctcattgtgtgctctgagcttttcatttttggaagccagctgctcaatggattgttctccttctttcttttgtacttttatttcattcaatttttcggctgtatgctgataaccccgcctattcaaaatagaaaactcccccttgcggtatgttcaagctgtaaattatttctatatgtatgatagataccaagactattatatgtttccatattttaaaatacaacataatatttgtataaaaaaaagtacggaaaattaaatagacaattttccatacttttcgggtactttccctcttttttgactaattatacaaaacgaaaagtcaactggtcgctttcttctaaatcccctaacagcccgagctctttcatcttgtccacgacggctttcggggccttggtccggtcgcggaagttttccatggaagtaaacggctctcccttggaggcctcctctgcttccttggcagccttctcccccatgccgtcgatggcagagtaagggggcatgatcctgccgtctataatctggaagtctttggcctttgcacggtaaatatccaaaggcataaactcaaatcctctggcgtacatttcatcggcgatcttcatttctcttaaaaggtccagatcggcattttttacctcgaatttaggtgtgttctgtatctctttcatcctagtgttcagcttttccttgcccatgcacatgtcctcataggaaaaggacttggcgcggatgctgaaatatgccgcataataagccagaggatggaacactttaaaccaggcgatccgccacgccatcatgacataagcaacggcgtgggccttcggaaacatgtatttgatctgtttacaggaccagatgtaccactcgggcacgttttgggctctcatggcctcttcctgctccggtttcaggccttttcccttcctcacactctccatgatggtaaaggacaacgcttcgtcaagcccctggttgatcagatagaccatgatatcatcccttgtacagatagctgtggaaatggcagcctccccttcctcgatcaatttctgggcgttgccgagccacacgtccgttccatgggacagcccggatatacggaccaggtcagagaaactctgaggattggtatccaggagcatctggataacaaagtccgttccgaattcagggattccaagagatccaagctttgttcctccaatctggtccggagtgattcccaggacttctgtgccatggaacagggccatgacggattcatcatccagcggaatagactgggcgtcaacgccagtcaggtcctcaagccttcggatcatggacggatcatcatgtcccaggatatccagctttaatagattagagtcaatggagtggtactcgtaatgggttgtgatgatcggagaattcacatcgttggccggacgctgaaccgcggtaaaatcatagatctctttgtcgtggggaactacgataataccgccaggatgctgtcctgtggtcctcttgaccccagtgcaccctttagccagacgttcaatctcacatttgcgttttgtgacctcacgctcctcaagatactttaacacatatccaaacgcggtcttctccgcaagagttccgatggtccccgcccggtaagcctttcctttgccaaaaatgacctccacataggcatgggctttgctctggtattccccagaaaagttcaggtcaatatccggttccttgtctcccttgaacccaaggaaggtttcaaacgggatgtcatgcccctccttgttcatctttgctccgcacttagggcacactgcatccggcatatcgcagccggacatacccatctttgagtacttcctgactgcatctgagtcaaagtccacatagtagcattcaggacagatgtaatgggccgggagcgggtttacttccgtgataccggacatggttgccgccagagaagaacctacagaaccccttgagcctaccagatagccatggtccagggaatcccaaaccagcttttgggcgatgatatacatcaccgcatagccgtttcctatgatggaattcagctctttgtcaagcctggtcgttacgatctccggcagatctggaccgtagatatcgtgtgcttttttataacagatatcccttagatcctggtctgaattttcaatgaccggaggacatttgtccggatgaatcggtgaaatattttcgatcaggtcatttattttattgggattggttatgacaacctccctggccttgtcgctgcccagatactcaaactcgcctagcatctcctccgttgtgcggaagtacaggggcggctggctgtctgcatccttaaatcccttacccgccatgaggatggcgcggtagatggagtcatcagggtccataaaatggacatcacaggtagccaccacaagcttgtggaaggtttcccccagttctacgatcttgcggttgaaatttctgatatcctcaaaggaattgacattttcatgccgggaggattcgatcataaactgattgttcccctccggctggatctccagataatcataaaattcaacgatttttgcgatctcttcctctgagcgctggtccacgatggcgctgtaaagctctccggcctcacacgccgaaccgatgatcagtccgtccctgtatttgttgatcagggacttgggcattctcggacgccggttaaagaaacggacatgggactctgagaccagacggtttaagtttacccttcccgtattattcttcactaggatgatcccgtgatatgtacgtccctttttaataaaatcttccgagcttgccacaaattcgttcacctgatccaggttgaagatctctttttcctccagcatctgtatgaacttgatgaagatctttcctgttgctgtcgcatcatctactgcccgatggtgggtttccagtttaatatttaaatttttgcagaggttatccagcgtaaacttagcaagatgcgtcatcagacttctggaaagccccagagtgtccacgatggtgggttcaaaattaagacccagccgctttgcgttctcatggatgaatccggtgtcaaaccctgcgttgtgggcaaccagggaggaatcaccacaaaactcaagaaatcttggcagcacttcctcaatggtatccgcgtccattaccatctcatccgttatagtagtcagctgggtgatcttaaacggaattgggatctggggattgataaactcgctgaaggtttctgtgatctctccatcgacgacctttacggccccgatttcgatgatacggtccgtctggctgttaaatcctgtagtctcaatatcaaacacaacgtagtctgcgcgcagagactggcccttggaccggattgccagatcccccagatcatccacaaagtatgcctccaccccgtagatgatcttaaacggatcatcctccggcagccttaagtcctcataggcatgtcttgcgataggaaaggcctggagaacaccgtggtcggtaatggcaaccgcaggatgcccccactcgtaggcccggtttacgatgtcatgtatctgaaccacgctgtcattgtcactcataaccgtatgcagatgaagctccactctcttgtccagagaatgatcctgccgtttttccctgaaatcagagatggccttgatgcccaccacagatcccaatgagatctcacggtcaaatttatcatacatggccaccgcttttacccggtagaatcctccctttttcaggtctgtgagcacttccggcagctgctcattgcgcacaaagatcttgcaggagatggtgtctgtaaaatccgtgatatggaaaatgatgatggtcttttcgttccgtatttcccttgtatccagatttatgatctgtccgtggacgaccacttccccgatctcgtcaaatatatctttgatctccatcagatcgccctcacagttacgaccgtaaagcagcgtcggatcatccttaaactttggcttacgcttaaacttggaatcataagagaatgaggattcttttttcttttttctggccttcttctcttcatcctgttctttgctgagcaggtccgcatgttctacgataccctcgatctccttctggagtttgtactggctttcctttttcagagaccggtcctttgtcttggaaaaatcgaaaccgaccttgatatccatgccaaatttgtgacgcagggctgactcaaaatactccttgatctcctcggctttgctcttgttcacaaaggtattttcaaatataaaggtgaccacgttgccgtcgatggaataatccccttttctgaccacattaaaaataacctcccctttgccttttaactcaaagaggaagctcttcatataatgttcaaataaatactccaggtcatactgtgccgaaagctggaaatattcctgaaagcggatcttgacataccgctttgagaaaagctgctctctgatctgctgttccatacgccatgtatcgatccttgggatcagatggtcgcttgtaaaagagatcataagcgtattttccgactttttgaacacaacctggcggatgcagacagtacaaaacaactcttctacatcctttgataccttcaggtccggaaagacctggaaaaattctttggtattttctttaacggcctgcatcttattcaccccaatgctccaattcatatcgaagggtatttaatagctcttcttccggaactttgcggatgacctgtccttttttcatcagaagcccttctttgatgcctccggcgatgccgatatctgcttcttttgcctctccaggcccgttgacaacacagcccatgaccgcaaccttgatatttaaatgttcaaaatcagcagccatggtctctacctgtcccgcaagactgatcagatcaatgttggtcctgccgcaggtcgggcaggagacaacctcaattccaccgcttcgcagtcccagcgtctttaatattagtttagcactggcaatctcattgaccggatccccggtcagggatacacggactgtgtcgccgagcccctgatggagaataatgcccagtcccaccgcggatttgatatttccactgtacacggttccggcttcggtgatccccacatggagaggataatcaatctgttcggccaccagctcataggctctggcgcacatgagtacatcggatgacttaatgctgaccaccagattatcgtagtcaaaggcctcgatcatacggaccttatccacggcactctccaccaggccttctgcggtgacaccgtgatatttttccaccagctctttttccagggaaccactgttgactcccacccggatcgggatgctccgttccctggccttgtcaatgaccgcgcggatgttgccttctcctccgatattgcctggattaatccggatcttgtctgcaccgtgttccatggccgcaatggccaatctatagttaaaatggatatcggcaaccagagggatatgaatcttttccttgatcctgcccagggcttctgctgcctccggagtcggcaccgtacatctcacaatgtcgcatcctgccttctcaaggcttaagatctgcgctatggtagcattaacgtcttccgtctttgtattggtcatagactggatcagaaccggattgccgcctccgatcttccggtttccgatctggatgactcttgtattctctctcgtaaccatactgagactcctttacaacataatcttataaatatcctgaaacatgacaaaaatcataaggcccagcagcagaaacagaccgaccgtgtgaatcgtggcctctacatttctggaaaccggctttttcctaatagcttctatgatgagaaaacataatcttcctccgtccaaagccggcagcggaagcaggttcataacacccaggttcgcgctgatcaaaaccgcaatgctcagcatcgtggagagcaggacgataaagccgtgagtggcagcctggttatacgtatccccaacctgtttgacaatgcctaccggacctgagagatcctttaaggtcagctggcctgtgaccaatttcacaacactctttactgttacccggatctggaatcccacctcgtgaaatccatactctatggtcttaaggggatttaatttctggtagccctcccactggatcccgatcatatatcttttggcatctttattgtactgtggtgtcacagacaagtctctttcttgtccatcccgtcttaccgtgatcggcacctggcctcccttgtaatccagaataaaataataggacaactccctgttgttgtaaatcctcttgccatttaccttcaccacctggtctccggacttaatcccggattccaatgccggtgaattttcagtcactttggctacattgggcaaatccgctcctgatataccaaccataatgaccgcaaggatcagggcaaagataaagttaaagaatgggccggcaaagataaccgccattctggcccatacggatttgttcccgaatgcgtctgcctccggccggtcctcgtcctctcccatcatacatgcccctccgaacgggagcagcttaatagaataataggtttcccctacctgtttcccaaataaggtgggaccaaggccgatacagaattcgtccacacggatgccgttcttttttgccacggaaaagtgtcccagctcatgtacaatgataataataccaaagattaagattgcaataacaatattcaagtaattacctgctttctatgaattcatatacccattgctctgtttccagtacctcctcaagggatggattctctatcacatgatgtgcattcatcgcatcttcaatcagctgatatatctcaagaaatgatatctcttcctgtaaaaacaatgctacagccttttcatttgcagcgttcagcacagtcggcatagaacctccggtccgtcctgcatcatatgcaaaagaaagcccttttagaacatccgtgggcggctcttcaaaagaaatacttcccaatgcggcaaaatctaaacgttctcccggaagaaatctgcgctccggataaaataaagcgtactggatcggaagcttcatgtccggagtacccagctgggctttgacccctccgtccttgaactgcaccatggaatggatgatactctgtggctggaccaccactttgatctgttcaaagtccaccccgaacagccagcgggcctcaatcacttccagtcccttgttgaccagagtagccgaatctatggtgatcttttttcccatagaccagtttgggtgttttaaagcatcttctagtgtaactgccgtaagttccttttgtgtcttcttacgaaacggtcccccggatgcggtgatgatcagggaatccacttcttttgcgtcctctccctgaagacactggaagatggcggaatgttcgctgtccaccggcaaaatagaaactccgtattgctccgccatcggcatgatcagatgccctgcagtcaccagggtctctttgttggcaagggcaatatccttttttgcctggatagcggcaatggtaggcctgatgccaatcatacccaccaccgcagtgacaaccagggaacaggagggttccacagccgcctccaccagtccttctggaccggagaatacctttacatccagatcgctgacacgcagacgcagttcatctgcactctgcctgtcatatagtaccgcaatgcgcggatgaaactccctgatctgctgttccagcaacgttacgttgcttccggctgccaaagccgtcaccgcgagatcctcatttgcccgtacaagctctagcgtctgggtacctatggacccggtagagccaatgatggaaataaacttcactacattgtgcctcctgagatcatcattgtcagataataaataaccggagcaatcaatatgatgctgtcaaaccggtctaaaataccgccgtgtcccggaatcagagtcccaaaatccttgatcttggaatcccttttgatagcggacgcagccagatcgccgatgacagagatcgcagctccgacaccgcagatgataccaaacatcatcatcggattaaaattgaagcggatctttgtcttcagataaatgccgtaagcggctcctaaaataacagcgcccacaataccgccgatcagtccctcaatactcttcttaggacttaattccggcgtcatcttatgctttccgatcagcatgccggtgcagtaggcaagagtgtcatttccccatgcggcaaggaacagaagtacaataaattctcctccgttttgtcctacacgcagctgataaatataagaaagcataacgcttacatagacaaatccaaaaaagcaggccataacctggttcatgtggtatttcggaaaacggatcacataacatcccaatagaaaaatcataaataaaatgataatggatgtagaccattgtcccagatcaaaaaataatgctgcgtagtaaagaatcgttcccgtatatcccaggactgcaagagatgacttttcgatctgaaaaatttttaggatctcattgtagccgatcaatgccacgatcgccgttaaaaataaagttactattcctccaaggtaaagcccaaggacagtgactgctaccaaagcaattccgctgataagtctctgtttaaacataagtctatattcctccaaatctccgttctcttccgttgtagtactcaacagcctttttcagttcttttttgttaaaatcaggccagagcacatcggtaaaataaaactctgtgtaggccagctgccaaagcatgaaattcgacaacctctgctccccgctggtacggatcatcaaatctggttccggaattcctttggtgtccagatatcccgcaaacacttcctctgtgatcccttctttttttaacgttccggaaagaaggtcatctgccatcctcttcatagcccggatcatctcatcccggctgccatagtttaaggcaatggtaaaattaatgcctgtgttgtctttggatgcctcctccagctgtgcgatcttttcgcggagatcatcagtcagcccggtcacatcgccgatgacccggaccctcatattattcttatttgctcttttgatacaggtctttaaataatctctcaagagcttcatcaaggcatccacctcatccttcggacgcttccagttctctgtggaaaaagcatagaccgtcagatatttgattcccatatcatatgcgtcctcgatgatcctctccacagtcttgctgccctgcgcatgccccatattccggggaagaaatctcttttttgcccatctcccattgccgtccagaatgatcgccacatgctccggcaccctcattgactccatagaacacctccgttacatccatttacaaagcggaccaatccgcctccactcattgaaaaaacagggccgactcaagccagccctgcagcttatctttgttatactgtcatgatctcttttgattttgcctccacagcatcgtcaatcttcttgatgtatacgtccgtgagcttctgaacttccgtttcctggtccttgagctggtcgtcgtttaattcattggacttgttcatctttttcaactcatcgttggcgtctctgcggatatttcggacagcaaccttagcattctctccacgtttcttgatgtccttcgcaagatcttttctgcgctcttccgtaagttccgggaagtttaagcggacagcagatccgtcattgttgggggtaatcccaatgtcagacatcataatggctttttcgatctcaccgagcagattcggttcccaaggctgaatcagaattgtccttgcctccgggacagatacattacccacctgctggatcggagtcggaactccgtaataatccactgtgactttgtctaaaacgtggggattggcacgtccggcacgaattgccataaactctgttgtcatactctcatatgatttctgcatcttttcttcaaatttctttaacatctttcttcctcctattatttaaacggtcacataggtaccgttaaattctccttttaatagattggcaatgctgtctggctcattgagaccgaagaccgcaaggggcatcttattctccagacacatgatagtcgcggtcaagtccactaccgcaagcttttggtctaaaacttcatctaacgtaatggaatcgtatttttgggcctctggattgacggcgggatcgctgtcatagacaccgtcaatagacttagccagaaggatcgcgtcagcttcaatctccacggcacgaagagcagtggccgtatcggtagaaaaatacggatgtccagttccgcctgcaaaaaaggcgattttcccttcttccatggctttaactgccttgtccttggaaaacagctctgtgaaggagccgcacacaaacggggtgaacacctcagtgtcaagtccggcagtgcggaaagcgtccgctacataaatacagttcatcacagtggccagcatgccgatctggtccgccttggtgcgttccatgttctcactggtgcgcccgcgccagaaatttccgccgccgatgacaatggagatctgaagtccctggtcagaaagggccttcacctgtcttgccacatccatgcaggtggcttcatcaaaaccggtctttttatcccctgcaagggcttcaccgcttagttttaaaagaactctcttcatatcctttatatcgttcatgaacatacctcatctatcgtatttttctgtttctctctgatgaattatagcataaacaatagcaaaggacaactgaaaatcagctgcccggatctatgactttcctacagagtttcactgtccaatatgacggtaaaaggcccgtcattggtcaggctcacttccatctccgcaccgaaaattcccgtttccaccctgggaattatagccctgcactgagcaatgatatattcatacagttcttcagccagatccggttttcctgcattggtaaaggaaggccggttgccttttttacagtccgcatagagtgtaaactgggagataagcagcagactgccgtccacatccttaagggaaagatttgtctttccgtctgcatcgtcaaagattctaagccctgtcatcttcttgaccagcttatccgccgtattcctcgtgtcgccgtggcccaccccgatcagaacaagaaatcctttctcaatgctgcccactgtcttttgatccacgtcaaccttggcgcggctgactctctgtatcacaaatttcataatgtccctctttccattaagatccgaagattctttccgtgatttcttctgcttttgtataaatcctttccggttcttccccgataaagaattccccgtcctcatagagaatgtttcccgcgaccatagcaaggcgcacattctgcttgcttccgctatagacaaggttcttcgtcaagttatgaaacggcctcatgttgggctggtttacatcgatgaggatcaaatccgcctgctttccctcgctgagggtatcacagtctgcaaggcccatggcggccgcaccacctaaggtagccattttaagcacctcatcggcatcggtgacagaggcatcattctcccggtacttggataatccggtcaccaaaaacatctcccggaacatatccagacagttgttgctggcaggaccgtctgttccgatcgccaaaggaatccccatatccatcatctgcctcaccggggcgataccgctggcaagctttagattggatgcagggtttgtgatgacaaagacacctcttttctttaagatttccaagtcctctgtctccatatggacacagtgaaagcagcctccgccgtgctgaaacagatccagactgtccagataggctgtgggcgtcatgccggtgcgttccctgcaggacagaacttctggctgaccttccgaactgtgggtatagactggtgccttatatttgctggaaagtgcggccacacagcgcagattttctctggaggttgtatactctgcatgaaaaccaagctgaaagctgatcaaacttccaggctgattgtatctctggtaccactcctccatctgttcgaccgactgggaaaaatcattcatcgcgccgcagagtacggtcctgaatccacagtcccttgacgcctgcgcaatggtatcaggagtcaggtacatatcaaagttggctgtaattccgctggttagatattccatgaccgcaagcttagacagatgataaatatcctcaggtgtaagctttgcctcccacggaaatacctgcttgttcagccattggagcagcggcaggtcatctgcatgggagcggagaaaggtcatggcagaatgggtatgtgcattcttaaatccaggcataatcagcccacccctggcatcgatagatctctcccactgaagccctgacaaatactggccggaaaccttttctcctgcatatgcaatgcgggaatcctcgacccagacttctccgtccaggaacttcatcccgttttctagcgtaagaactttaccattatagatccgtatcatcaggatacctcctttggcaatttctcctgtccggtcacagcagctctgcgatccccgtgacggcggcatggattaatgccttaaactgaggtgccgctttgtccgctgtctcctggacttcttcatgggaaagaggtttcatggtgataccggcccccggattggtgatacaggaaattccgcagattttcatgcccatatgttttgccgcaaccgcctcacaggcagtgctcatacccaccgcgtcagcccccaggattctgcacatcttgatctcctggggagattcaaaattcggaccgctcagctgaacataaattccctctttcaaatcaatattcagttttcttgccgctttcaacagaacatcctgaaatctgtcattgtagattcctgtcatgtcgcagaatcgttctcccagcttctccagattcggtccgatcagcggtgacgggacaaaggtagagatctggtccgtgatcatcataaaatcaccagcatcaaactcatcgttgactcctcctgctgcattggtaaggatcagggctttagcgcccatcatcttcatcaggcggattggcaggaccacatcggtcatatcatagccttcataataatggacccttccctgcatgatcactacgggtaccttctctatatatccgaagataaaccttcccttgtggccttccacggtagacactgggaaaccgggaagatcacggtaatccaccacagtttcgatctggatctcctcggcataatctccgagtcctgacccaagcacaatggctaccaaaggcttaaaatctgttttttcctgcatgctctcatagcattgctgtaatttttcataaaccgcattcatcacggtccctcctttatgaaatcaaatctattttatattctgttccatgttctgacagccatttcttctgctgtttataatccggcatataccgtgccacaacctggtaaaatgccggggagtgattcatgacctttaaatgggaaagctcatggaccacaacatattcaagtaccttccggggcatcaggatcagtttccagttaaaattcaaattgcctttgctgcttgcgctgccccagcgtgtcttctgctcccggatcgttattttcttgtaagaaacgcccatccgtctggcatacagtctgcacagctgtgtaatcacagaccttgcctcctggatatagtcttcccgttcctctgccgtcatacggaagatcttttggtttttttctctttccccagccttctttacatgatgtgcgatccaatcttgcttttcttgcaaaaacctggtgatctcactctttgggaaattccggggcgcccggacgacaactctgccgtcgaaagccacggagaccgccagggtttttctcttgctgtagactacctcgtaggctaatgcctgttccaccggtaatacaccccttccatccaggctttggatgccgcaaagtattcccggagcctgtctttatgcctgtttcggtagatcatggaatccacgatgatgccatgggcatctagacccgctgtctctgccagatagtctgttcttgggatgtagagcttttgtgtacatacataaaatgtcttcccctggaatgcggactgggtattcttcatcgtttgaaatgtgtcaaatccgttccggtcctcatacagtttatcttcgggaaaccctcttagaagtagatacatcttcatgaattttacttctctggccgtacccgaaactaaaatgcagcttcctattcctgagcggtaaagccgcaacgctccgtctaagcggtcttttaactgcgctccgatgacaccgtttttcacaagggcaccgggaacaaggattccatcccgcttttttagtgcctcacaaaagaagacatccggcaccgcccgtttctgctttccgtgaagctttcggtaagcaaagaaagaaaatacggcaggcaggagccccgaaaggagccagggccatattcgtttttttctatgattcatctgtctgctccttactggctttcctcttgatcttgttcctgctgctgggatgtggtcggctgctgttccgtggtcgtaggttttggcgcttctgtcttctgtgtcgccgttgttgtcttctgacgttctgtggtagtcttatggtgctgtttccgtgtggtggatttctgccgggcagtggttgtactgcggtatctcgttgcggtactgttcgtgtgatcctccggcgtctgcccatcctctgaataagttgtatcctcatcggacgcatcctctgtggaggtctccgttgttgccttctctttcttatcctttttaaggccgccggaaaatgccacaacgatcaccatacaaatgatcacagccactgtcccgaagatcagtgcgatcatattttttttgctgatatgcattgtcctatctcctgttcttatattcgttcctgtattatttttattctttatgccgtcttcattataaaagaggaatggtagtgtgtcaaattttactaaaaagaaattaattcatatcaattcgctgggaattatgtagaatctttttcagttggtatatttgacttgtaaaatggatttttggatattatactattagagaaatcacattgacaaaaaataatcaaaataagttaaggggatgaaatcatgtactgcacaaaaaatattacagatgatttatattggatcggcggcaacgacagaaggctcgccctttttgaaaacatttttcctgtgccaaatggtgtttcctacaacgcctatgtactgttagatgaaaagacagtacttttggatacagtggacaaggctgtaggagaacagttttttgaaaacctcactcacgtgctgggagaacgggatctggattatgtaatcatcaaccacatggagcctgaccactgtgccatgttaaaggaagttatattccgctatccgaaagtccaggtcgtgtgcaatgccaaaacagcggacattatcaaacaatttttcaaaattgaaactgacgcacttatcgtaaaagaaaacgatactctgtgtacaggaaagcataccttcaccttcctcatggcgccgatggtccactggccggaagtcatggtcacctatgataccacggataaggttctgtattccgcagacgctttcggtactttcggggcgatcaacggcaatctgtttgcagacgaagtggattttgagacgaagtggctggacgatgcgagaagatattacacaaatatcgtaggaaaatacggagcacaggttcaggctctgttaaagaaggcatccaaggtagatattgagatgatctgcccgcttcacggaccagtatggcgcacaaacattggatggtttgttgagaaataccagaaatggagcacctacgagccggaagaccagggcgtgatgatcgcctatgcatctatctacggcaatactgagaacgctgccaatgtactggcctcccgcctggccgacaaggggcttaagaatattgctatgtacgatgtatccgtgacccatccatctgtggtcgtatctgaggcgttccgcgcaagccatcttgtatttgcctccccgacatacaacggcggcatcttcccgaacatggaaactgtgctgttagacttaaaagcacataacctccagaaacgtaccgttgctttcatgcaaaacggtacatgggctgccacttccggaagacagatgaatgaaatgatatccggtatgaaagaaatgacagttctagagccagctatcacgatcaaatccgcattaaatgacaaccagtcagaagaaattgacgcaatggttgatgcaattttagactcaatggaattataaagatacgtaaaaaagaagcttttggaatccattttacttccaaaagcttcttttttattctttcatccgccgatctgtgacatcctgcggctgtctgccccttcatccagaccctgctctgaaaagcggtgcttttcaggtttctccatgacagcctctgcgatgagttgtgaaagttcctgtcttgacaccccggaacgcagaggttctctcagcgatatgccgcggctgtagtacagacatggttttaaacatccttctggtgtcagccggatcctgttacactgctgacagaaattgcagtgaaccgcatcgatgaacccgacaaatccgagaaatcccgggatcttaaaatacctggccggtccgttgccccgcttgtgttttgtctcctcgataccggtgtaccgggtatggagaatgttcaggatctcatcgccgctcattccggtaaactgcctgccatagccgatgggcatcatctcaataaaacggacatccaccggtttttgcctcccaatctccagtaaatcaaagatctcattgtcattgatccccttaatgatgacacagttgagcttggttttcagtcccatatctgcagatcttagaactgcggacaagactgtttctgccccgtctgtccctgtaatcttttgatatttctccctgtccatcgtatccaggctgatgttgataccgtcgattcctacagccttcagacgttcaagataaggctccagcagcagtccgttgcttgtgattgtcacctgttttacacctggaagaagcttcaggcgctctataaaggatactgcatcttttctcaccagaggttctccgccggtgatcttaaacttgcagattcccagatccacggcactttcgcacacgcttaataattcctcatagctcaggacctctgcatgttccactgccgggatatcctggggcatacaatacctgcatcttaaattacaccggtcagtgacggaaatcctcatgtagtcaatattccgtccgtagatatcgttcatcactgtatcctttctattttaaaaacaggtgaagcagcctgtccttcttcttttgatatggatggtagcgtattggaagatccatccatgtagatttttttacaatactttttctgtggctgaaggtccagaacccatactcaccgtgataagcccccatgccgctctctcccactcctccaaatcccatatgagaagtagccaagtgtatgaccgtatcgttgacacagccgcctccaaaggacagatttctgaggacccaccgttccatatttctattttcggtaaacaggtagagagccagcggtttttccattgccttgatatactctgctgcctcagagatattttgataagaaatgacaggaagtaccggcccaaagatttcttcctgcatgaccggcgactcccaggcaactccgggcaggatggatggggcaatctttaacgtctccctgcatccgtatcccccgcaggcagcggtttctccctccatcagtttcataacccgctcataatgcttaacattgaccattctgggatagtcagagtttaaaagcggatcatctcccagcatcctgcggatccactgaaccatctcttttacaaggcggtcttttacagattcgtgtaccaagatataatccggcgcaacacaggtctgtccgctatttaaaagcttgccgaacacgatcctctttgctgccagtgataaatcagccgtggaatctacgatacagggacttttgcctcccagctccagggtcaccggagtcagatggactgccgccttttccataaccaccttgcccacggctttacttccggtaaaaaatatatggtcaaacttctctgagagaagctgctggttttcttctcttccgccctccacaacagccacaaaacctggcggaaaggcttcttctacaatccgccggatcattctggataccgccggcgcatccttggacggtttcaggacgcagcaatttcctgcggcaatggctccgatcaaaggcgccagggtcaacagaaggggatagttccatggggatatgatcaatgccaccccaagaggctctgcggcttcaaagcttttggcgtgaaactgagacagaggagtgggctttcttttcagcctcatccagctcttcagatgctttttggcatatcccagctcactgagcaccagtccagtctcagtcatataggattcaaatccacacttattgagatcctttttcagtgcgtactccagctgcttttgattccttcgcagggcctgttccagacggcagagagcttttatccgaaaggcatacggccgtgttctccctgtatcataaaaattcctttgaagttttaccaatctgtcaatagtcataacaaaccctctctgatattttttagaaaaatggaaagaccagctgctcataatcagactgcttatggagtgcatctggcgctttatgtaataaaaattctgtctgtccgtcatccaaaagccacgcccgcgcatccttttcatccaggaccagcggcatcctgtggtggacagaccgtacagattcattggcttctgtagtaaggatcacaaagcgctgttctttgccaaactgctgccagcagccggccatcaaaagcagttttccatccgctctctgaaaaatgtttttgtttttctgactgtcccattcataaaacccccgggaagggaccagcagcctccgaaaacgaatactgtcctgaaacattcttttttccatgactccttctgaccgggcattaaagatcagctggtttttttcaaatcccggatatccccactgcatcttctggaccccgatcccctgtggtatctttacgagaacgtccgctttctccgatggatggatatcctggtcttttggcgggccggtttgtggaacgatctgaaacagatcatgtagttcttctgtcactgtctgatcaataaaatatcttccgcacatgaaactctcctgtcgttatgctttgttttttctgcgtttaatgacctttaaccgagtaaattcttccctttccttctcctccagcgcattggagatttcggatacaaggctgctgtaagccgggattgtgatattttttaaggcattggcacgcttttgcgtctttttgatgctggccgccagacggtaagcagaattctccaccatagaaagccggaccgtcagatccttcaccctccggaatgcctctcttgctttgtcaatggattctcttgtggtactgaaggaataagtcggtacattttttttggcggtgtaatccaccagcgggatctcggttcccatgatactgcggctcttgatgcggatggagtcttcaatgggcactgtgtatgccagctggtctacctcgctgatcccatgttcaatgttggcgtcctgaaggcactggtaagcataggtaaatgtcacatcgatcttttcctggatctcctttgcctggtcaatgagactcatcagctctctgatcaaaatattccgttttttatccatcagatcatagccctgtcttgccaggtccagggaattcttggccagcatcagattccctttggtgggaaacgtccttggatccatacgctcacttcctttctgtcatcagccttttaatacatctgggagtctgtggccgccagaggcccgccgtcctttagtaccttagtgtaggattctttgtctccggtcttcttgtagtagcggtctaagacctttgtgtcgacacggtcaagctcttctctcggcaggatgccgagaagctcccagccaaggtcaagggtgtcatccattgtccggttttcctcaataccctgtccgatatagcgttgttcaaattctttcccaaattccagatactttttatcaatgggcgacagctcatcttctccgatgacggaggccagatttcttgcatcccctaccttggcataggcagagaacagctgattcgccagatcctgatgatcctccctggtgtatccctccccaatgccgtccttcatcagtctggaaagagacgggagtacactgatgggcgggtaaacggcctggccgtgcagactgcggtccagcacgatctgtccctccgtgatatatcctgtaaggtccgggatgggatgggtgatgtcatcgttgggcatggtcagaatcgggatctgggtcacagagccatcaattccttccacgatgcctgccctctcatagatcattgccagttcactatataaatatccagggaaccccttccggcttggaatttctcctttggaggaagacacctccctcatagcctccgcaaaagccgtcatatctgtcagaatgactaaaatgtgcatattgttttcaaacgccagatactctgccgcagtcagtgcaaccttcggcgtgatcagcctctccgcaaccggatcattggccatattcagaaacatggccacgtggtcaagggctccgctctcctcaaaggtcctgcggaaaaaatcagcatcgtcatgtttgacgcccatggcagcaaacacgatcccgaagttgtccatgctgccttccccgagagatgcctgggtcacgatctgggccgcaagctggtcgtggggaagaccgttgcccgaaaagatcggcagcttctgcccccggatcagagtcatcaggccgtcaatggccgagacaccggtacatatataattcctcggatattccctgcggactggatttaatggaagtccgttgacgttacgttttattttggaggcaacaggacccaatccgtcgataggcttgcccaggccgttgaaggtccgcccaaggatattcggcgaaagggaaatctccatgggacgccccgtgagccttgtatgcgtattagaaagtcccatattgtcagtggtgtcaaacacctgaatgacagccttatcctcatacagttcaatgaccttgccaagctttttttcctgcccctccacaacaaactccacaatctcctcataaaaagcatccctgcatccctccagcaccaccaaagggccgttaatgctgtcaagacccaaatattcaatcggcataccaaaactcctttcagatattttcgatcatttttcttcattatctccagtcggctctggaaagtcctccttccgacaatgaagaaaaacgatcgtaagatggcacctaaggagccactttacgaaagttatttaccactattggagaagcgcatttcaaaagcgcgacggaaatagtcgtaaataattcatgcattccgttccatcaccctccggtaaaagtcgtccactgccctcctgtattcatcaaacatttccggcttgtcgttgggcacatcgtatttgatggagatcacagattcaaagatcgtttcctccttcagcacagacatcggcatattcatagagatgagcagtttcgccttttcatacaggtagagaattacatccatcatctcaaactgcttctccatagggacacaggtgtcatccctgtgaaaggcattctgctgcaaaaatcccagacggatgacgcgtgcaatctccagaatcagtttctggtcatccgggagcacatcgcttcctatgagcttgacgatctccatcaggctgctttcctgattcaggatcgccataatctgatttctgtggctgacaaactccatggagacatgttcggagtaccacggggccagatctttcagatattcactgtagctggtcagccagtggatggcgggaaagtgccgggagtaggccaggcttttatccagaccccagaaacaccgcacaaaccgttttgtattctgtgtcactggctcggagaaatcccctccctgaggagaaacggcgccgataatagatacggagccctcagagccgttgaggtttttcatcattcctgccctctcataaaatgcagacagccgggatgcaagataagcggggaatccctcctccgcaggcatctcctccagacggccggacaattctcttaatgcctcggcccagcgggatgtggaatctgccatgatcgccacgtcataccccatatcccggtaatattcagccagtgtaaggccggtatagatgctggcctccctggctgccacgggcatgttggacgtgttagcgatcaaaacagtgcggtccattaaaggattcccggttcttggatccatcagcttggagaactcatccagcacctgggtcatctcgtttccccgctctccgcatccgatatagataatgatatccgcatcggaccatttggcgatctgatgctgggtcatggtctttccggtaccaaagcctcctggaatacaggccgtgcctcccttggcaatgggaaacatcgtatccagtatcctctgtccggtgatcagaggcttggaagccgggaaacggaaactgaccggccttggaatcctgatcggccactgctggcacatagagaggggaatcacatcaccattgtcctgcctgaccgtgaccagcgtatcctcaatggtatagctgccatcatcaacagcgtgctccacgaccccttcaactcccggaggcaccatgcatcggtgggtgatggcggatgtctccggcacttctgcgatcacatgccccgtcttgacctggtcaccggctgacactgtcacatgggtcttccagagtctttggcggtccagggaatccacttgggtgcccctgctgatatattggccagactgggctgcgatctgctccaaaggtcgttcgatcccgtcaaagatgttatgaagaattccgggtgccaacgttacggaaagcgcatgtccagaggtcttcacctggtcccccgggcgaatgcctgtggtatcctcaaatacctggatcgtcgccgcatcccggtccaatgcgatcacctcgcccaccagcttctcgtctcccacatagaccatctctgacatcttaaacccgacgtctcccttgacataaatgactggcccgttgattccataaatgctgcctgactcagacatgatcctcacctcccaggaatagaaaatccgcatactctttttccagcgcagaaccaaaggaacggtcgatcaaaacgtttcttgaacggatcacggcccggatgcctccgacaaagtcttctctgctgatcagaagagaagctcccgtccgctcttccacctgagcctttaacgcttcgtctgtaggattcagataaatgacgatcccttctccgcctgcatacttcatggcctccgtgaccttccggcacagcaggtccgtgtattttgtacttttcatataatcagacaagagcccccgaacctggtcaaacagcttgcgcttcaattccttctggcgttcatttaattgcctccgaagcttaagctgaaactcagacagttccttgttcagcttaagctttgtacggcttttctcaatctctactttgatttccgcctgcatcctggctttttctttgtgttcttcaaatctgcgggagagcaggtcagaatgtccctggatcagggcatttccctctgccctcgcctccttcatggaaaccctctgcagattttgaatcttttcttccaatgtcatttcaggtcaccttctttatatcatcagagtttcagtccaatggcttcatttacataggatgtgataaagtttttcttgcgtcccgtgccgtggcggtccgggatttccacgatcaggggcatctttcggtttagcttgatctcatcgatcatatcggggaattccctgccaaacttttctgtaagcagaacaatgccgatggtctcatctgtcatgaccctttttaatgcttggtaaagttcttctttttcgtggaccacgatcccgtccacgccggccagacgcattcctgtacaagtgtctacattatcactgattaaaaacatcttcatagctcacagctttcccaggatcataaaggcgatgaccagcccatataggcagatgccttcagccagccctgcaaagatcaaagatttaccgaatatgctgctgtcctcacttatagcgcccaatgccgcactggctgcgctggcaacagcgatccctccgccgataccggaaagtcccgtggaaagcgctgccgccagatagccgatgcccgcggaagaattctgggcagcctgtgctgcctgaaccctgtcgggatacagcatgatgaccgcggcgatgagcagcgtgccgaaaaaagcgaaaacattgatgccgagagcttttttatatctggacttctttctcttccccagcaaaaaatagccaaacggtatgatgacacttaagagtaaagccgcaaccagtactaattttgtcaatgtattcataatgatgacctcctttgatctgtgatatcctgtttttttctatgcctgtacggcttgaactcctttccgcccccctgataaaaacggctgaatatttcataatactcaagcctcagtacctgaatgcctacgatcagcccctccataaggcagacaaacagattgccgaatacgatcacggcccagttgatatgtcctgcctcggctcctgagagcatcatgaccacgcccatcattgccccgtggctgacagcaaacgcgccgatccgtacgaaagacagtgtgttggaaaaatagctgagcagagtctcgaataattcaaaaaatgcctgtactaaaaacataagacgcccttcctgcatctccggcttgtgctttttcgccagggcagaaagcggttcttttaacgcaatgagcagcagcgggatgccgaacatgacagtcagtatgacggcaccgggcagcctgcgccctgtggcaaacaaaaagatcgccagaacggcagacccataaaataccagccctgcagctccgctggccccgaacaaagattctcccagatttccggaacgtgctgaaaacacgatgtggaggatcatggtcagaagaatcaaaaacattccaaacacaatggctgccacaaacacagtattcattttcccgatgccgggaacattcatcatggcttcctgaggtttcagccatctggcctgtatgacgttttcaaatccaaagaaactgccgtacatccagccaaaaaaggcagaacaggcgccggccgcggcaatgatccccgccagatctatctttttcataaggtagagcagcagaccgccagcaaataggcataatccctgccccaggtcaccgaacatgataccaaagatcagtggatatgtcattgcaataaagatggtcggatcaatctcattgtgggacggcagaccgtacattttcacaaacatctcaaagggttttaaaaccttggggttgtcaagctttgtgggtggctctccaaagtagtcctcgtgctcatcctccaccatcaaaaacagcctgcggtcatttttgatatcttctgaaaagttttttacatcttcctcagacatccacccgcatataatatagaagttctcgtgcttatcctccacacaggccgccatctttctcacatcaaaattagcagacaatgtggcgatcaactctctggcggcatagatcttaccggcactttcgtttagagccgcagccatctttccattaagcttctccttttctgcggtgagaatcttgagcttcttgtccagatcgacgaaggcttcctccggggttccaacaaattcatctggaataaaaatccgttcaaagtgaagagacttaaaaatggcgtcaatttgctcagacttggaccgggaagtaaaatacaccccatatccatagctgttgttctgtactccctcaacaaaaattacgtctggattctgtctgatgaattccagcatcttttcaaaatactctaagggcacccgtccaaaccggaacttaacaaacttgtaatgaaagacttcccgcaggacaaactgcatgggtctgaacggctcgatcatcttcatccgttccgtcaggttcttctcctccagttccagagcttccttttttgccttaaaatcattaaaaatctttcctgcctggcttatggtcctcagggcctggtcagaagtcagctccggaagatagtcctcttttttttgggtcagaagcccggcaaacctgtccgcctcctccagtgcctttttataaggattggactccgtaaatggctgcaggttgtcaaccgtttttaattctgacaatgcattctccagctggatctcatactttgacagatagtcgttggtgacccggtcgatatcgtgttttggacccgtaatcgttataaatttcattttcacaatcatatgccgatcactcctttcacataacccgccgcaggttcagggggcaggccgtaccggacacgttccataatggtgatcagcctctgtatctcttcctctttatagaaaagatacgccgtgaggcttgcgatggaatagggatccctccttctctctgtcaaataaagacggtgaaggcattctctatacatgtattcgatggagtctacttcctccatgcggtaccgttttccatagtacccgccaaacaccactgcgctgaactccttgatccccgaaacttcggtcagtttctttaaatcttctgtgggaatatgaaaatggatcggaatcagcagcgcataaatatccgcaggctgcatatcgtaatattttttggagcggtagatccactgcagatttaacagatcgatctgtgtgcccgcttcttttgtaaagatctcaagttctttctttttaaggatctttttcttttctttccatactgatgaaaaataatataggtttagggccagatcataatcaaacaactccgaggcccctgcctctacaagttttgacagaggcgtaccatactctgtatccctgagggcttccaccagctctctgatattctctgccctgatcaggcggtcaatggaaatctgggaatattggtcaaaaaactgctttttataatccaggtcaaagggtttctgataatgattaaaaataatgcggaaacagtaattgatcaactccacctcgtaccgtttcagatacaacttcaaaaatctcctctgctccagccccgaaaacctataaagcttggtataatcctcatacaagggctgtatcagcaccttttcaatcttcccccgatgaagatccgtatcatccagaactgacaagatatcccggtaggcaggaaatcctttcagacggctgactacctctgggacacttccaagctctgacagcattttaaaatcttcttccttcagcagttttgcgctcatagcccttatcttcgtgaccatggcactgtattttatcatgcttcccataggctatacctcgctgatcctttttacgatctccctggcatactggtcccctcttcgttcatactccgccataagcccctggatctttgcctcctgttcctttcttaagcgggctttttcttctgacagctgtctctccacctcatcagaggtacccgaaagccgctgttttgtctccgcctttaatgcttcatcaaactgtttttgtttctgccacatctcctgttccagctcttttttctgctcgtctgcatgtcttatgatggcggcagcggcattctcaatctccgtcagtttttttacaatggaatccatctttacgccccctttttgcagtccttttatttctctccattatacaccttctatataaaaaaaacatctgaaaagctaaggatatttttcctgcttttcagatgcgaaacttagttttaactggcacactctgtttttaatatgtgcaataactgccgttcgtccgaaaccataaagtccggctgctttcccttttccggaagctcatctcgtctccggttgaaccagatattgttccatccggcttttatggccccggaaatatctgtggcgtaagtatccccgataaaccacgtctctttccggtccagcccgaaccgtttttgggcaagttcaaaaatctctggatccggcttacgtaccccctcgtctcctgagacaatgatccgatctttgggaatccacttttccagcccaagctgtttcactttgttccactgaggccgtgaaaatccgtttgtgatcactcctataaatatgtctctctcacggcagaagtccagtatttccctgctttcctccgtaagcctgatctttgtctgctcaatacggtagacatcatgaaactgcatcacttctgcctgtgtaagctggaggccataagacaggaatgccttccggattcggtccaccaccgggatatcatgctttcttccggccaggaataactccatggaagatacgggatacttctctctaaaaacttggtcacaggcagcacaaaacgggattgacacatcataaagagtgtcatccacatcgaacaagattgccaacatcttctacctctctttttatctggtctatgtttgcttaacccactggccgtccccttttggaacaaaacttccgtcgccgatcccaagggcggactttgccagcatatctgccatatcgttgtattcgtcattggaatgtcctttgaccttgacgaacctcacttgaagccggtctttgatcccgtcatagaatcttttgtaggcggctgttccttcttttttggtcttccactcaccggtgcaccactttgcaatgccttcatagtcgtaatagaccgccagcttctcataaccgctgtcagcggcatatctcatagccttttcagctcccttgatctccccggccacgttcctcattgaggccagcgccggatccgcatacttctccgcaaaatacagctccccatccttctccttcagcaccataccgtatgagtattctttcctgctatggtcataacttccatctacataagcggtcagagtatgctcatcgatctccatggcctgtcctaacgaagagtcaagaaaggcctgcgcctcctccatcgtcgggaaactcttaaactgggcacatgcaaacccggaagtctgtgcctggcactccttccatgtacggtaaatcccaggggtccgtccttgttttactgcataatatttatttgccacgttctagtcctccattttttctatcactttcattataacagaaacaggagacatctgaaagtacagatgccccctgtctgattgtcgatatttgataataagagatgaagttttagttattcgacaaatttacagaaaaactgtatgtagcgtttgccttggacaagaccttctgctttacagagcagtcatcgatcagataggagaactctttcatcacatcccatagatctctggcttcctgcccgctcagctccgttgtccgatcgtttagtaacttcccaacggctgccgctgtcttttttacgttttctgtgctaaaatcatttccaagcaactctaaaaaaacttcagacatatatttcatatttgctccttttatcatctaaaaagtaacacagctcatactcttagattatagcaaaatactgaaaaagtctattcttttcgacagacataaaaggaaggaatccgtctctattcgacagattctcccttcatgcttttattgaaagtgtccaacaaatctgataaaatccgtttttgtttcggtgtcagattctccaccttcaggagaagtttgctttcgctttcaataatttccggatcaaactgatctttcaaaatttcgtttggtgccgttttcaacgcccggcatattttgacgaacaaaggcagacttggcagcctgatccctgattctatctgcctgatgtgccctgcattgacatcacaaatttctgaaagagcttcggaagtcagccctctctccttccgaatctggttgatcctcttacccaacaatctgcgttccatatgtatggctccaatcggtcttattttctctctctcatatcctttcacagcctgatcacactagtttttaatacatgcatttcattatatacaaaagggttcctgttccactagatgccgaaatgtatgttcatgtaccttttagcatacacagcaggcggagaggttcatacttcctctcattatgtcgaattttgtcgcgcataattctgcctccaatcaaccatactaaacataattatggaagaaaggagcagaatatgaaaaagagaattaatttttgggttattggaatagcagtctttgctgttatcattgcagcatgggccatagccttcaattttaaaaactcgaagaatgcttccgttgagagtctctcgttatataggaaagaccaggatactattatggaaaaaatgatgaaggatatgttagatatacctgtatcagaaaatgaggctgttgattttctagaaggaatgatcccccaccacgaatctgcagtcgccatggctgaaagctatctcaaacatggcggggaccaaaaaacattaaagccgcttgcggaggatatcatcacagtacagaaggatgagatcaaacagatgcagactctgatccaaaaactggacagcagcaagaaccactcaagaagcaggtcatcctcttatatgaaggagtaccggcagatgtttcaccaatcccattccggtcatacctcatccgcagacgcctcatccattgatgaagcctttgcagaaggtatgatcgaacaccatcagatggcggtagatatgtcagaactgatccttaaatatacaaaacaaaaggatgtcaccaaactggccaagaatatcataaaaacacaacaggcagagattcgtaagatgaacgtggttttaaaagaaaggaaccattctcatcactgagatccgcctttcttcatggcggcagttatttcggaaaactttccgatgatatcgtcataattgtctcttttgtgaggcaccatgcaatggctgcagtcttttataccgttttgatatctaaaattgccgccacagtcttttccaagcatataaagcgggcaataacaaaacagacagttaaaattgtcagggtcgtccgtttcgtgacaagggaaaaactcacaatccctatggctaaaaaactgatagttctttgattttttagccatgtctccctcccttctgctgcttgatcacaaggcggaccagactttcgatgtctgccttgtcagctacatacacatccataccaagagatcttgccgctttggctgtctgctccccgatacaggccgctttcaagcctttgataccggtgtccggcagagctttggcaaagccgcgcacagtagaggcactggtaaagacagcccagctgatctctccgttctcgatcatttcttttacaggaaccaactgccatctttcatggcaggtctcataaaccgccacatcatccactctgatatccggtttgccctcaagaatccggatcagttcctggtttcctaaagccgcgcgcgggatcaggatatgttcccctccggacagaacgtcaaaaagcgccctgcctagggaaactccgtcgtagatctccggcatcaagtcacaaaatagtcctctttcttctaacgcacgatttgtccccgctccgatggcagcaatcttacagccgccaagaatacggatatctctcttttgttttctcaattcttcaaagaaaatcctgactccacctgggcttgtaaaaacgatccaatcataagagcttattttgtccagtgctgaagagagcatgctttgatcttcttttggcttaatcaatattgagggcatttcaagtacttccgcccccttttcccgaaacatggccgcagtccttgaaatgagatcccttggacgggtcaaaagaatacggcaccctgccaggggaaggtcctcataccaggcaaactcttctgaaagcttacagacctctcccactacaatgaccgcaggggtttcgatcctgcttcggcgcacggcatcctccaatccagaaagagttgacaaaactcttttctgccctgctgtcgttccctttgagagcactgctgccggcatctcagaattcatcccagcttttgtgagggactttataatatccggaagggatgagattcccattagaaataccagggttccttttgtcctcacgagcgcttcaaaatcaatatcatattcggcgccggcctttttatgccccgtaatgatatgtaaggaagagcttatgtcccggtgggttaccgggattccattgtattccggcaccgcaacgggagatgtgatccctggaatgacctcaaacggaatgttatgctgtctcagcagttccaattcctctcctcccctgccaaacataaagggatctccccctttcaaccgaaccacataatttccttttttcgcctcagaaagcagtatctgattgatttcttcctgtgtcattgtatggcatccagcacgtttccctacataaatatattttgcctgtctgggaagcgatgacaatacttcggggcccaccaggctgtcatagacgatcacgtccgctgtttttaatacttccgctgcctttatagtcaacaaaccaactgctcccggtcctgcaccggcaagccatacttttcctgtcttcatcattaccctccttttattttccatcatagcatattgacaaggttctaacaactcgataaaatgggagaaattgaatgtttacaggtgcctttcttttggaaggagaataggaaagcgggtgagaatcccgcacggtcccgccgctgtataggaagagctgcatttcaatcatgtcactgggaaaccgggaaggcgaaatgccgcagtgaggcctgagtcagaagacctgccgtaagcatgcgatttacactgaagctgcgaaagacagccagtgtagaatattaccgtcggaggattcgcaccctcctgcgcttatattcggtgcgtcagtttttactggcgtttttagcggtgtatgtttccgctgaaacacatttgtgaatcgaaaggagcaaacatgaaaaactcacaaaagatccttgtaaccgctgcattggcggcagctgttatcttcggcttcggccccacagcaaacgccatgcacatcatggagggataccttcctcccaaattctgtattgcctggggagcattaagcctgccgtttttagccgcaggatttctctccatcaagaaaacggtccgtaaagaccggcggctgatgaccatattggctatgtcaggggcattcatcttcgtcatttcttcgttaaagattccttccgtcacaggcagttgttcccatatgaccggtaccggtcttggagccattttattcgggcctgccgctgtcagcatcttgggtatcatcgtactgatcttccaggcagttcttctggcccacggcggattgacgacccttggcgccaataccttttccatggccatcgcaggcccgttcttatccttcggcatctataagctctgtaaaaaattcggactgaaccgacgggtcagtgtctttttcgccgctatgctgggagatatttttacatactgcataacgagtattcagctggctttggcatatccgtcagaacagggcggatttatggcttctgcgctgaaatttctcggggtatttgctccgactcagctcccccttgccattgtggaagggattctgactgtcgtgatcatcattgcgctggaatcctacgcacgccccgagcttaaactcctcaacttcatcaaggagggacaagcatatgaaaagtgataagaaaaaagtcatcctcctgcttgcgctggctgcgttcatcgccgtggtccctctgtttgccttaaagggagctgaattcggcggctctgacgatgccggaagtgtcatgatatcaaagatcgaagggaaagaatatcagccttggttcactcctgtactggaaacctttatcgacggtgaacttccaggcgaagtggaaagcctcctgttctgtgtacagactgggatcggggttgggatcatcgcctataacttgggacgtttaagggaacgcaaacgccttctctccggaactggggcagcagaaaatgctgattgacaagtactgctaccggtccaggttgagaaaagtaaatgtcatggaaaaattctgtttttccatgacaacacttctactctgtatcctcagcaggtccctggcagcctctgtcctggtcctttttagctgcggatggctgaccgtaaaaaagggcggtatcccgctgcgccagtatggaaagcttttgcgggtccctgcggctttcctactcctgagcacactggcaatcctcgtcaatatctctaaaacccctttggatgcttatgcagttccggcaggttcctactatataactgggagcaccagttctctgatctttggtttcaggctgattctctctgccctttccgcagtatcctgcctgtattttttatccctcagcactccggtcactgacctggtaaacattcttaaaaaacttcactgtccgtccctgttcatagaactgtttctgctcatttaccggtttatctttatcctgatgtcggaggcttctgccatcagaacctcccaggaagcaaggctttccaaccggaactttaagacagccctccattccttcgggggcatggcctcggccctgttgatccgggctatgaagcgttcagccagattatacgatgccatggaatccagatgctatgatgggaccatacgggttcttctggaggaatacccgccgaaaaagaaagagatcatttatattgtcatatttgaacttgttctactgtttctcataataggaaggaaaatatacggatgaaaaaagaatctatcataaaagcacaaaatctgtgttacacctatgaaggagaggagcagccggctctaaacggactttctctggaaataaagcaggggaaaaagattgcggtcatgggcgccaacggatccggcaaatcaactttttttctctgcctcaacggaatcttaaggccacagaaaggtacgctgtctttttgcggcaccccatattcctatgacaaaaagagcctgctggctctgagaagccgggtcggcatcgtatttcaggatcccgataaccagctgttttcagccagtgtccgccaggaaatctcctttggcatcttaaatctcggggctgacaatgagacggctttaagagaaacagaaacgatcatggaggagctggatattacagagtttcaagaccggcccacccacgccttgagcgggggacagaaaaaacaggttgccatcgctgatatccttgtgatgcatcctgacatcgtgatcctggatgaacctgcagcggccctggatcccaaacatacttcccttgtgaacaagatcatcgaccggatgacagacgctggaatcactgtccttttgtcaacccatgactccgactatgccttctcatgggccgatgaagtgattctgtttcaccagggccgggttctcatatccggagcccctgaggaagtgttcgctgaccacacagcccttaaggctgcaaatctcttccagccggctgtacttgccatgttcgaaagcctgtgccggaaggaaatcataagcgccaaaactccggttcccagaaatctttcagaactggaacatatcatcgaaggaattcagagagttcccgtctacggaggaaaaacaatgcatcatatcaaaaagaaagcgatcttagctgtcagtttcggtacgagctatgaagatacaagaaaaaagactattgaggcgattgaacagacactggaaacacactttccggaacataagatttaccgggcgtggaccagccgcatgatcatcgaaaagatcagaaagagggacggcctgcatattgataccgtttccgaagctatggagcggatgaaagcagatggcatcaccgacgtggtcatccagcccacccatgtaataaacggagtggagaacgaccagatgaaagaggatgccgaatcccatagagattctttccattccatctcatttggagcacctcttcttacatctgagtcagacaatgagaccatggtgaaggctgtggcatctgagttttcctggatgtctgaccgggatgctctggtgctcatggggcacgggaccacccactatgccaacacggtctatgcagctttagattaccgattcaaagatatgggatataaaaacattttcctgggcaccgtggaagccttccccagcatgcagtcccttatgcggatggtaaaagaattccagccggaaagagtgatccttgcaccttttatgattgtggccggtgaccatgccagacacgatatggccggagatgacccggattcctggtatagccagtttctgtccgagggcctaaagacagagtgcgtcatgaaaggcctcggggaatatcccggcgtcagagaactgtttgtaacccacgcagaggaagcggttctttagcaccaacgtatccggaccggatcatctgccgggatcaaaatttctacatccagcggaagtttgatttgatagtacttagtgcgacagcactttctgatctatacggatccgtcattcttttaacttcaacgcctctgccatagaaatgccaggtatttttctcgataccacacggcttatgagccaagataaaactagggttccgacagcactaagcagccaggaactccaccggatataaaccgggatatccatggattcctggactgtggagagcatataacagagcagtccatatcccgccggcagccccagaagaatcccggccgcacaaatccatacattttgctgaaccatgatggtccggatctggctgtcctgaaatccaaggacctttagagtggcaaactcacggtatctttccagataagagagaacacccagattgtacagcatgacactgccgagaagcacggcgccaaacaccaggatgccgatcatcatcaccatacccgccatcaggtcatccatactttttgtcagatccttctgctgggaaactgtacattgctttttatattttccgaatccgttctccgatattttcccaatgactgccgtgggtctaaaagccataccgcttttctggaaatcagatctcatcaccgtgatcccctgggtggatggtgtccgtataactgcccgtactttggagcggatctcttttttctctccggataccttccacacaacggtatccccttttttgattttcaattgatctgcggtcttttttgacacagcgatcccatccctgatctctgtaaactggtcaagcttcactgccagtcggagatacttggctgactcctggacggttaaactcacctcctcctgttttccattttttttaatagaggcagtcccctccattagatattctccgtccgtcttttgcaacagatccttcttcccctttttgtccggcagatctgtgatcttacactggtaggactgctgtctgtgaaaggtccagtctgaaagatttgtaaaggtatcatacagagaaaaggcacagaacaacagagccgtacatccaaggatgccgcataaagtcataaaacccctgagacggttcctgctgatatccctcaaattccaccggctggagaaagacagcttttggggaagcctcatggaattcttcctgctcttagacggtacctcccctccaagactttccgccgctgttccccttaaataattctggcagacaaacaagctgatgcccagacagagaaaaatacatcccacaggcagcaccgcaaatgatgccggaagacttccctcccagcggggcagtacatacatctcttttaaaaaccggtagattagctctggaagtatcctgtatcctaaaatatagcccagtccaacaccggcagcacagatcagcaggctgtgggtcagataatggagtgtaagctttttctttgaaaatccaagcgctttcaaaatcccaatctgtgttctctgatttttcagcattctgtgcatggtagtcaccgtgatcataaaggccatgaaaagaaaggctccggaaaaaatatctccgatggactggtgctgtctgatctcatcagtgatcatggacaccgctggatgatctttttccagcacttccgtcattccatcagctccaaggatctttccggccagcttctgccctttataaggtttgtttgctttcagtgcgacctgattataaggaagctgtccggacacaggaaacagctttgggctgatccatgcaaatccgctgtttttgtggtcgggtgccatggtgccctttcctgcgctgtagatatattccgggcttaaaaccagtccaagaatccttccggacacctttcgatttccctggaccacggtcatcatatcacctgttttatagccgttttctctggcaaacaattcatccagccagattccctttttcgagctgttaaacgcttccccagattttatataaagcctggataccatatttgtctgcgcaaaatagcagtctatggatgttttatcctttccttcaagattcatcgggagaaacagacggccttctgctttttccacccgcttatcgcttttgagcttctctaactctgctttggagaaggcttttttgtaagcccactggtccgccagctcctgccggtctatgtaagacttccagctggtcttaaggccgttccactctcctgtgatgccggaaaatagaaaacagccaaaaaacatcatgagaaaaatagccagaaactgcactctattctttctgatatcacgaaatgtctttttgatcaaaagcattaccactccacctcacttatcttaagaggagacggatttatccttatgtctgtgatttctccgtttttaacgtatatgactttatctgccgcctgtgctatgccggcattatgagtgacgatcagtgttgttttcttatcttccctgcagagcctccacagctgctccagcaccaggcagcctgtctcactgtccagagccccggtgggttcatcacacagaagaatctccggattcttggcaatcgccctggcgatggaaaccctctgctgctctccccctgacagctggtcaggaaatttatgttcatggccccgaagtcccactcgatctaatgcttcttttgcagggatagagccctttttcagttctcccattaaagctacattttcgctgaccgtcagagtggggatcagattatagaactgaaaaacaaacccgaccttttctgcccggtaccgggacagctccctctctcccagaccggtgatatcctgccctgaaactatgacagtccctccgtctgccgtgtcaatcccaccaagaatgtttaagatggttgactttcccgctccgctgggccccagaatcactgtgaactctccctgacggacggaaaaagagacatcttttaatgcataagtctccctggttcctgtatgatagatcttattcacatggccaaattccaattgtttcatggcttatcctcctgattaacgactaatcccgcgcagagcatacggaaaactttgatgaattctttctgggcctctatggaatcctggtgctgcaaaagtacatgccggatgcaggcaataaacatttccgtgataatatccacatacggggaatcgctgtcatcaagtcccagatgccatgccatatgttccttaaactgcccgataaagtgttctttgacttttgaaaaacgtgttgttttcaggtcaaacaagatgagaagccgtttgtccattatatactgaagctccgtctcttccattactttaacgacgtcctccatctgcgaaaatgcctcttcgatctcctccaaggtgtaaacccgctgttctctttcaaaatgctgcttcacaagcttatgcagcccttttataggctccttcagcatttcttccaggatggcctccttgctgtcataataatgataaatattgccgatggttgtatttgctttctttgcgatcactctcatggaggccccttcgtagccatggatcagaaattcttcctgtgccgcctctaagattgtttctctgatttcttctttttttatctgcatcattctacctcccaggtccatcatatccagtttccctgttccttacaactcgatcgtgcttataaaaatcaaaacttatcaagtgatcattattgacgtataatcataatggaataaaaaaggaggaaccaatatgtcagatatgatagaaaaaaggcggagcatccggaaatatcggcctgccaccgtgccaaaacatatgattcaacaagtgatacaggccggaatccttgccccgtcgtcaaaaaacagacagccatggaagtttaccgtagtctatggggctgcaaaaacggatatgctggcgcaaatgagcctgggactttccagggaagctgccgacccgatgctccccaacagcaggaagcatctggacggagccatacacacgctgcacattatggaacaggcacctgtgatcatctttatcacaaacagcctcggtcttgatctgtcaaagccgctatccgcggaggaccggatctatgaaatatgcaatgcacagtccatcggcgcggcaatccagaatatgaccctggctgccaccggactgggacttggaagcctgtggatctgtgatattttctttgcctatgaagagctgtccaattggctttgtacagataaaaacggccagctgtacgccgcattggccctcggatatgcagatgaggccccagatgcccggtccagaaaccctatggatgagatcacagagtggagagaaacataaaagagcaagatatatgaaaaaatatctgcctggtatagatataatcgtgttttgaaaggaggattcaatatgtcaaacaataaacttgaaaatatcaaatcagtcattgattacatagaagatcatttgactgaaaaattggatctggacacggtggcaaaggcggttcattattcaaaataccatcttcaccgtatgtttacaaacacggttgggcttaccatccatgattatcttcagagacgaaggcttacggaggccgcaaaactgttggtcttttctgatcagcctatccttgacatcgcactgcttgcaggatatgaaagccagcaggcattcaccgacgcttttgtcgccatgtacaaaatgtcgccccggagattcagagaaaatgagagattttatcctctgtcactgcgatttgaatttgaagggagtctgtccatgccgaaacatgaaaataagccccactgggatatttcttttgcctcagaagaagacattccgtgctggatggatctggtccgtcttgtgatcgacggttttcctcatctacacgaagaggaatatctggatgtattacaatcccgcatctgctccggggaagcactgattcttaaggacggcgctgcggcagccggcattctgctgttttctcatgaaaacggaagtattgattttatgggctgccatcccctctaccggaatatgggcattcccagagcactcctttctaaagtcatgggggaactggtaaaagagaaagacttaagtatcacaacctaccgggcaggagacaaggcagataccggacagcgccgggagatacaagagctgggatttgcggaggcggaactgcttgtggagtttggttatcccacacagaaatttattttgaagcaggaggattcagaacatgaagagtcatgacaccgtatttcccgatgagcttgaacaccttgccatgatccagtccaggctggatgctgcactccaggacgcagaggcgtccgccggaagaatggagcggcagtatacgaataccagacaatatatgtcggatgcccgcggagaaatcgatcccaatgagatgttccaaacggaactgctgctgaaacaggctgaccagacaggggcctttgccgcggaggtatgcttaagactggcgaaactgaaagattctccctactttgcccggatcgattttcgggaaacaggaagtcaagagtccttttcatactatatcggacgtttttccttccgccatggatatgagctgctgatctttgactggcgtgcccccatatccggcatgttttatgactgcgagccgggcccggcaggttatgaggcaccggcaggcagaatagacggagagttgacaaagaaacggcagttttgtatcaaggacggtttcatggaatatgccatcgagagctcctctaatattcaggacgatgttctccagagagaactgagccggacgtccagcgaaaaaatgaaatccatcatttcaacaatccaaaaggaacaaaatcagatcatccggaacgaacatgcccacactctcatcatccagggagttgccggatccggcaaaacatccattgccctgcaccggattgcctttctgctgtaccggctgaaacatcagctcagtgcaagaaatgtcaccatcctctctcccaacaaagtttttggcgattatatctccaatgtcatccctgaacttggagaagagccgatctttgaactggccttttctgatctggcagaaatacagctgggacagaccgttggttttgaaccggaacgggaccctctggatccggaccatgatgaatatcatcagagaacccggtttaaatctactataggatttaaacagcttctggatgcgtatatcaaaaagctgccggataccgtctttcagccctccgattattcttttggcggctttaccgcaaagaaagaatggatacaaaaacggttccgcgcatatgaaaaacatccagtaaaacagcggcttaagatgatcgctgacgatatctgcgatctatttgcctctgaaaacatcatgaaggatgaaattccaaggacaggggccgtcttaaaaaacctgacttccatgcttaccattaaaaacagcctggcattatacagggacttttataaaagtctaaagaaaccaagtatgttagtccttccatcgaaaaggaccttggagtgggcagacgtctttccatacctctacctaaccgctgcttttgaaggattaaaagaaagcaagatcaccaggcatctggtcatagacgaaatgcaggattatacccctgttcagtatgcggtcatcaatctcttgtttccctgtcccaaaacgatcctcggtgactttgggcagtcactgaacccagatcatctccacacacttgaggatctccgcctgctgtatcatgacgcggaatttgtcatgcttaacaaaagctaccgctctacctatgagatcatatcatttgcaaagcagctccaggacaatccctccctggaagctgtaaaacggcacggtgaaaagccagtcataactgcgtgctgtgacaacagggataagatgaatcagataaaaaagctactctcaagctttgaaaaaagcggagctatgtctctcggtctgatcgctaaaacaaacacagaagcaaaaacactgtacgatatcctctccaaagaatttgacctgcacttgatttcaccggaaagttctacttttcataatggaatctccgtcacttctgtacagatggcaaaaggactggaatttgatgaagtccttattcctgatgcggatagttcctcttatcgcacagactatgacaggaatctgctgtatatcgcctgcactagggcaatgcaccggctgacccttatgtatgtagatgagttgtctccttttgttaagactgattaagttttaagataatctagaaagaataacaagaaaaataattcaccccggcggcaggctgttgtctgtcgccgttatgctctcttttaactcaacaaatctctgaaagacccatcagccggtttcattctccaaaagttctgtttatctgcatacaatgattctttgtagtagttaagtagtccagttcgtgttttctcacatcctatttttcctattcagatctattgcataacattccatattataatgttaaaaaataaactacttctgctgaaaacacaggaattgatatttgttcaatatctttcctggacggtttattaaaacaaaagtattttatcatactaattatgatagacatatatcaagaaagtaccctgtattaagctatatagttttcctactgcttggtatgctgattgtattatttcctgaacatatgttactcttgtacaggattacaaattaatccttctcaagactaagcaggggctcttactgcccctgcttgtcatagtattcttactgctgttactcttttacaaaaataatcatcttgttacgcttaaacttattacacatcctctgacagctgtctgaccccatatttctttatcactctggatatcaaataggaaaaagcgatcaaaaataccgtcagagaaatcacaggagttacaatccccgctgctgtaatctccgcatgaaattttgtaatccctatactgccaaataaagcaccaaacatacggtttgttaaaagccccacagacagtacccctagcagagccccagaaagcccaatgattccaaagcccaatgcaaactgaagcctcagctgacggactgaatacccaagacttctctggatagccagatcgcgcttctgctgttttaagaatgtcatagacagaagaaatgtgatgaaacccgacatacagagacataagacgtaaaacaggacaaccaaggccaaaattccattctggatatctgacatcatctcttccacctggtctctgacactttctatcttcaaatcaagtccgtttttccttcctatctgcccaatcctctttatcactttttgttcttttgactgatccttcaaaagaatctcacaagaatggtacttgtatccagagaaaatctttcgaaatccttcaacagtcatacatccaatttttcctccatcgttgctggactgatacaagccgaccaccaggtacttcttctcttttccctcataagtgatctgcaccgtatccccaatattctttgagagatattttgacgaaatttccgtcagcatcatctcgttatcatacttcgggatccgcccatcaagcggctcctgataatttccgtcagtaaacctgctgatcacggacaagagcattttctgcccgtccatatccacgtattcatgctctgacgaataaacagactggacatccttttcctgctccatggtcttcataaattcctcaaaactgtcgttttcctttgtacccggcgtaaacgtctcagacacggaaatatcagagtctgtatttccaaacaacgccgctgtctttttaatatccttcatattttcgttcagtgcagaaatgctgaccaatgaaaaaaccataaaaccacacactatgattaaaagcatatattgaggcagacggacggatacatttttcactgccattcgaaacggcagcggaaggactgttaaacgctccatgggaacctgatatctctttttaaaataaatatcttccttcccattgcggatcgcctgtatcgtagaaagcttataaattcttttaaggctgagccaggaaaccagcagcacaaatactgccataacagtcacagaggccaggactggtactgggcggacaccgccgtgccataagatccctgaaccgtccatggcatacctggccagcggggatacggtaaataccgatccgatacatccgcctgcaccaccaagcataaataaaagtatcatatacaacctcttccccgacaccagcgtcctttttgagtaacccagtgcattgagaacaccgatttccttataatcatcctccagagatgaggcaatcagataccggatggtaatgagcatgataaccaataaaagaaggctgaacagaaagatcagtcccataaaaatatccgtaagaatcatggatgacatcttcatcattgagctttccatatacagagaaccggttctggaaaaccctgtcttttcattcaaagtttttatccggtcagtaaaagttgtgccggcatgcgccttcgtccaaaggctgaccagagaagcctgatagtgctgggctcccggtgatttcattagttcacggaaggtctcctgatccaggaacagctgcttatatccggtcatggctcctcccagaaagggatcctcaaaaaatccagcaatcggatacttctttttctgccccgacatctgcagcgttacatcatcctgcagctttaactgctctgaagactgtaaggatacaggaacaaaaattccttttctatgcaggttgccctctgtcaaggtatactgcccaggaaccgcacggatgatgatcccgtttgaaaaccatttgttcccgccgaatctgacattgttgtcctggccgagcaaaagaatatcttccttctgcacacttttggtttctgtttgttttttaagcttctgatagactttttccgcctctggtttttgttgctttgtaaaaatattgatgacttccggggcatttaccttccgtgccataaggtcatactgttccctgctctgccacagaacggatactgctgtggtcatcaaaagggtgatcagcaggcttaaaagaatcagaatcaccgtctggctttttcgcttgcggatatcattttttatgaccataaagatacccatgctaccaccccattcctgacagccagccgatcagctgcttctcccggacaggggcacttgcctcctcataaggcggcaggcttaattctccctcaatcttcccgtcttttaaatataaaatgcggtcagctcttaaggccgcctttaagtcatgggtcaccaccagagtattctggcctgcccggcacagagaataaagcaggtctaaaatttcttttccagaagccgaattaagggcaccggttggttcatccgcaaataggatcttaggacggttaatcagagcccttacgatggcacatctctgctgctggcccccagacatctgcgacggcagtctccgggaaagatcctggataccggttctctctatcaactcccgtgcctcctgatgtgtttcctttttacttctccctttctttaaataacccgccgtacatatattctcaaagcaggttaaatgagacagaagattcatctgctgaaaaataaaaccagccgtctcctggcggaaccgggcagtatcccggtccttctttttgtgcaccggttctccacagacagaaactgtcccgctggtagctgtgtccataccgctcagcatataaagcagtgtcgactttccagaaccgctgggacccataatgaccgtaaattgtccgtcataaatttccaagtcgatatttcttaagacgtgaagctgctgtccttcgctggcatagcttttgcataggtttgatgtctcaatgattgttttcatgtattactcctccttatgctgctatcctagcaaaagaaatattaaaaagtctttaaatggtctgcttatcttttaaaagatacagagaaacctgaagccctgctttattttccagttccagtctcccctccatctgtctcatcagtacatcactcaagtacagcccaagacctgcaccctgctgatctagggcattccgtccccggtaaaatttctgctttgcatataagaaatcctcctcaggtataccaggtcctaaatctttgatacagatgacaacgtactctttttgttcttccattttgatctctactgaaaacccttctgcatattttctggcatttccaagaatattatctatcacttggatcagacgcctctcatctgcaaaaactctttccttgatatcacatggaaatacctctgtcccttcttcaccaagcgggcacagtactctttcataaatatcttgaaagtccgttggtatcagtactacttccagccggtccatatcattcagggaatgtaaaaacagatcatcggttaatgcactgacctcatcacatttcctcatgatcgtttcctgataacgttttcgcttctctggtgaggcatccagattcacagatagtccttcacaatagtttcggatattagcaaccggtgtctttatatcatgggaaatccctgcgatcattgttttattctgctctttgactgcttcttctttttttctggcttctttgagttccgttctcatacaatcaaaagcccagctaaatactccaaaagtcttagaacgttccgcttccagtggaaaatccagattacctctggcaatctccccggcaaagcgttccattctggagataggacgtatcgcataaaaatagaagtacagaaaaaaacacgacatacctgcaaacagtatgccacagactgtaccgtaaattcttaccaaaggaagatcccctgttcctgtatgaaaatttttagccttttttaataaagcttcttgctgggtcttagtgagagattgatcgtggatcatctcattccatacagggagcattttattggaaggatcggaattcttttttatgtaccatccccctataaaaataaggataaagaataagatataggacacaaggacaactcttaaaaaatgctttttcatttactactcctcaaaacggtaacccttaccgtaaacagtcaaaatatgcttcggattagagggatttttttcgattttctccctcagccaccggatgtggactgccagcacggaaggtgtggattctgagccatacccccagatttctgtaaacaaccgctcttttgtcaaaatctcttccggatgggcagcgagatagacaagcagttcgtacatttttgaggttaattccaatggcctgcccgccttttttactgtctggctcttctggtcaatgatgatatcagaaaaacagagtggctgtaatacggaatatccataagttctccggagcagtgccagaactctggaatgcagctctgccagtgaatacggtttggagaggtaatcatctccgccgagcatcagcccttttaccttatccgtgtcactggtccttgcagaaataaagataactggcacctgcgtttcttttctgagtttttctataaattgaaaaccattcattcctggcagattgatgtccaggataatcagcctgatgggctgttggtataaagcatcaaatgcatcctccgcactgcctgcacggagacattcaagtcctttttgttccatataatctatggcaatctctgcaagatccctgtcgtcttctacgatcaatatttctgattgaagcatatgtttccctcctgtttgttttataattatagcatgactttggaggggaattggttggaaatgatgagaagtaggaaataaaatatgaagaattataatagaacaaccacgcaggctgttaattgcttgcgtagttgttatcgacatattattcgtctttctttccatatggtgaattggattctgctgccataggaagggtggcctgtgggtccaattcatagatggtagctctgtgttcttccggctctgtgaaggatgccggcccgccgatgccaaaatacttttcaaaaaacacttttagtttgtcaataataccttgctttttcttggctcttccactgccgccaaaacgagaaacaggaggcatcaatttatcaatgtccgtcccggcagttttaatttcaccttcacgaaatgcgttatccaggaatttacgggtatcctccggcttcagcttttcctctgtaataatggtttccaaatcttcctctcgttgttttacaacatacctgtgccattcactcatgacatcatccacatcattgacccctgaaataaagttttcaatcaactgtttcttgctacggagttccgggctggcatcgattgccttgttaatggtaatgagtacttccttatcctcgcagtgggtatcgtgatacttttttacaagcattaaaatataatcgatattgatttcaatctgctttatcaattccacttcaaacacgatatcatctgtgatatccgtactttccccggcatcacgcctgcgtttccattcatcacgcaaatcctggtatcttccaaggtagtcctgcaggtcacgctctgttatcagttctttaccttgaaattcatcaaaagaaacgagcagattacgcatacgcaggattgctccgaacagtgaaataaaatccttttgattctgttctccaataatctggggagctgtaagtggaaacttatttgacaagtcctccattaaatccacatatcccggcatgggctttccgtctacagattcataaccgtaataataatctttgaaactgtgcagcagtacgatacctcccgcatccttatccccaaacagggaaatagcattatctacacgtttttgaagatttcggaaacatacaatatttccgaaggtcttgattgaattgaggatacggttggtacggctgaatgcctgtatcagtccatgcatttttaaattcttatccacccacaacgtattaagtgtagtggcatcaaatcctgttaggaacatattcactacaatcagcagatccagctccttattcttcattctcagagatacatctttataataattctggaatttgtcactggaggtgtcatagttggtatgaaacatcttgttgtagtccttgatggctgcttctaaaaaatcacgggagggttggtcgagggcagatgtattttccgaattctcttcatccagaataccgtctgtttcctcttcgtttgcactataactgaatatggtagcaatccgcagtttccttgtcgggtctgctgccatctgccgcataaattcttggtagtatagttttgccataggtacagaggcaacggcaaaaatagagttaaaaccgctgacacgctgttttcgtttgatttcatccacagcaccacgatcagcagaagccacctctgcaatatttgttaatgtattatatatataggttttattcccacgatacgtcttttggtcaaaatgctccagaatataccgtgtcaccaattcaatccgcttaggagccatcatagccttttcacggttgatgtcccaaaccatctcgtctgtaatttcttcgtccatgtccattgtcttgatatagtccacacggaatggcagaacatttttatcattgatggcatctacaatggtgtaggtatgtaactggtcgccaaaggtctgtccggtggtaaagaattctggattctttgctctgccagagttgaccgcaaaaataggtgtcccggtgaaaccaaacaaatggtactttttgaagttctttacgatggctatatgcatatccccaaactggctacgatggcactcatcgaagataataacaatatgcttatcataaactggatgattactgttctttttgataaaggtagccagcttttgaatggttgtaatgataatatgcgtgttaggatcttccaactgttttttcagaataactgtggaagtgttgctgttggcagcacctttttcaaaacggtcatactccttcatagtttgatagtccagatccttacggtctaccacaaacagcaccttgtcgatatatgggagcattgaagcaagccgtgcagtcttaaaagaagtcaaagttttaccacttcctgtggtgtgccagatatatccgccaccttctacgctgccatattttttatagttattagcaatctcaatccgatttagaatacgttctgttgccgtaatctgatacggacgcataaccatcagcatattttctgatgtgaaaatgcaatatttagtcagtacatttaagagggaatgttttgcaaaaaaggtcttggtaaaatcaatcaaatccgggatgatgcgattgttggcatccgcccagaatgatgtgaattcaaagctgttgcttgttttcgttttactactacctttcttttcgttttccttctccacattctttcttgtgctgttggaaaaatattttgtattcgtgccattggatataacaaaaatctgcacatactcaaataagccacaacctgcccagaaggagtcacgttgatagcggttaatttgattaaacgcctcacgaatggcaacaccacgccttttcagttcgatatgtaccaaaggcagaccgtttacaagcacggtcacatcgtagcgattatcatatttcgcgccctcttctttaccaagaacatactggttgataacctgcagacgattgctgtgaatattctttttgttaatcaaagcaatgtttttggtggaaccatcgtctcgctttaggacttcgacagagtcctcttggatttttcgtgttttctcaacgatatgctcattagggtttgcaatggaatctgcgaagaaatgctcccattcattatcagtaaaatggtagctgtttagttcttccagttgattgcggagattggcaatcaagtccttctccgtatgaatggtcagatattcatagccttgttcacagagcagacgaatgaattctttttctaatgcagcctcactctgatagatatcggaacgagccttgactggctcatattctgtaacaacagtgttctccgatgtttcggctacaatattgaaataaggcacatgggtcacctccttaggataattcgttaaatgttagtaatttatctctgtagtattcatattgtttttttctcgcggtaagctccgccgtaagctccgccgtaagctccgtgaaattgtctagtatacggacaatttcactctgtactggtaacggaggcattggaataacgaattcttctgttaccttcagcgaaatctgtggtaacgaacccataccagaagccgcacctctaaactgctgaatattgttcttcattacataatatagatattttactgatatcttctcatccgctgtatatgcccacatttcatttttgaaagtaaatggttcttcatagtacactacatcaataactccacgagattgaactagaacagcagggacccttgtaatatttgcttttggaatgtcttcttcaaatgcattaattaccgtcttacctcccgcgaaaactctaacttctccatccgggttatctatttccttcatttttccagctgtgataggagtacccttgagtcttgtatatacatcttttattttacaaaactccactccattcgggcataactcccgaatcagttcacctaatttgctcataatcacacctcgatttcttcaatgatagttcgaatggcttcacgcagttcatcttcacgcttgactatttcttcgatttccccattcagctttacgatgtcaatcttctcacgggtatcctctgcctccacataggtggatacagaaagattgtaattgttgtccttaatttgctcgtaggctgccagatgagagaagtgtgccactttctcacgttttgcgaatacattcacgatacggtctatattctccggagtcagcttattgttattggtgacctttatacattcagtagatgcatcaatgaacaatgtcttgttatcattcttatttttcttcattaccataatgcaggtggcaatggaagtgccgaagaaaagattgcccggcaattggataatgcagtccacaaagttattctctatgaggtacttacggattttctgctctgcaccgccacgatacataataccaggaaaacatacgatagccgccgtgccgttggatgcaagccatgaaaggctgtgcataataaatgccatgtctgccctgctctttggagcaagcactccggcaggagcaaaacgcgggtcattgataagcagtggatttttgtcaccttcccacttgatagagtacggcggattggaaacaatcaattcaaaaggttcatcatcccaatgtttcggagatattaatgtatcttcacaagcaatatcgaatttatcaaagccgacatcatgcaaaaacatattgatacggcaaagattatatgtggtgatattgatttcctgtccgtagaagccgttacgtattgcatccttaccaagaattttttcagccttgagaagaagcgagccagatccgcacgcagggtcatataccttattgatttcagtcttgcccacagtaccaagacgtgtcaataattctgatacctcagcaggagtaaagaattcaccacccgatttacctgcattagacgcatacatggtcattaagtattcataggcatcgccaaaggcatcaatgctgtggtccttgacctcacctaaattcatctcaccgacaccgtttaacagcttgaccaatttttcattgcgcttagctacggtagaacccagcttattattgtttacatcataatcatcaaacagtccggcaaaatcgctctcagcctcgctgccttttgcagattcctcaatgtgacgaaatacgcgctctaaggtttcgttcaggttttcatcctcagcagcccgttttcttacgttacaaaacagttcacttggcaaaataaaaaatcccttttcctgcaccaaaccttctctggcttcttctacatcctcatcggacatgatagcaaagtcaaagtctgtatttccggctttgatttccccctcattgatataattacacaaattttcggatatgtatcggtaaaacatcgtgccaaggacatagtttttgaaatcccatccatcaaccgctccacgcagttcatctgcgattgcccatattgcacggtgcagttcgtcccgttcctgttcttttttagtatcaatcattctcttttcctccgtcttcatctggaataaactccaaaatatcatccacgctacactttaaaaagtggcagttgttttctttgctgtcgaaagatatgtcttcaatgcatttcagccatgtgaccatatttgcagagaatacagccccctgttgtagtgatgtgtttgacatatctttttatctgtatcatttcataacattctgctctactccttcaacattgccaaatagctgtccagcctctcattcacatatccagcaagtaacttccccattgcatccggcttatgtttaccataatactcgtcgaaagccttataataggccacccgatccgtaaacttaatatcaatcggcggatatccagccttcatcagttccaaatttatgagcaaacgcccagtacggccgttcccatcaatgaaaggatgaattccctgaaattcaatatgaaattgggcaagccttggaataacatgctctgtactattccggtaactatctagaagctgctccatttttggctgaatcaaatacggttgtactggctcatgttttgcccccatgattctcacaggcactctccgataaacaccacgatcatcttttttatccattaatacaagataatgaatctgtttgatgatattctctgtcaagggcacctgttcttttaccaagtcctggacaaattcaaaagcctctttgtgatcaatcgcctccatatgatccttcagcggtttctgatcgatggttaatcctcgtagcaccatatcagtttcacgcagcgtaagcgtattaccttccatggcattggaattataagtgtactcaactatgaactcctccgtcaagcgttctacttcaccttctgtcaatggtcgcctggtatccagctcagctttcttcgtatcaatcattgccagcagactttcaaccgttttgtatcgcccatcctctggtttcaccgcatctgccggtattgcccaactgcgtccttcacgggtaacacctgggatttttccttctgaacaaagaattcgcactctccgatctgaaattccccatttctctgcagcttctttcactgtcataaacataaatctgtacctcgtttcaaaactagtatacgctctattcggaataatagcaatgtaatcggaataatatttttcctgtatcggaacaatataattttcccttcccctcctgttttactttccccatctcaagtgctaaaataaaaccagaacaaatgacaaaacaccatatcagcaagggaggtcctatggaaacaacaataacacgtgatgaagcctttaagcttctaaagaaatataataaagagccttttcacatccagcatgcactgacagtcgaaggtgtcatgagatggtatgccaatgaattgggttacggacaggaggaagactattgggggatcaccggacttcttcacgatattgactttgaattatacccagaggaacactgccaaaaggccccggaacttttacgggaaggcggcataggggaagatatgatacgttccgtctgttctcacggctatgggatctgttctgacatccagccggaccaccagatggagaaagtcttatttgcggcagatgagctgaccggcctgatcggagccgccgcattgatgcgcccttctaaaagtgtccaggatatgaaactttccagcatccgtaagaagtttaaagataaaaagtttgcggccggctgctcccgggatgtaatctcccagggtgcacaaaatctgggctgggagttaaacgagctctttgaaaaaacaattctggccatgcgctcctgtgaagattctattaaacaggaaatgcagaaatacgaacaataggcggtgatcattatgtgtattaataaaaaaagaaaagcagatgtacgtctccatgcagggcccaggaatttcctatggaataaaagaagcgccggctgcatggagtaaaaggcgctttcatattcttaacggccttgtttccaaaaacaatactgtttaaggagtgagaccaattatgaattataaaaatgcagcttccattcttcccgcatcccttttggaacagcttcaggactatgtacagggaggttatctgtacatacctaaaaaagaagaccagcataaaaaatggggtgataagacagggagccggaccaggacttcccagcgcaatcaacgtatccgaaaggattatcattcagggatgtccatagaaaaactgtcagatacatattttctttccgtacataccattcgaaagattgtatacggcagatgaataagctgaaaacatctgaaaaagcagtggatatctatcacttgatattcactgcttttctgaatggacggctatcttgaatatacccaaataacaaaatatcgtctcattcccttcctatggtaacctgcctcataagtatacccacagggcacaccgtattttatacccttcgggtgcacgcgcttcgcgcgttaaggtatacccacagggcacaccgtatttcatacccttcgggtgcacgcgcttcgcgcgttaaggtataaattgtttctgtatgatcttggatattgaaggctctttccacttctgttatcttttgatacaggaggtgttacttatgaaacaaaatcaaaacactgcttctttcggatttgctgataccaatattaccccggatggtccggtccagctggtagggtttccgagaattgataatcaatccagaggaatccttcatccattaaatgcccagatcctcatcttcagattccaggaagaaaccatgtgcctggcagctgtggacagcctgggctttaccgtggagctgactatgaagttaagaaaagagatcgccagcgttctcaatatttcaacagataagatcatggtatgtttttcccatacccattctgcacctaatgcagcggaggaacccgcttactttacctttgtatgtgatcagatatgtgttgcggcaaaagaggcagagaaacagatgaggccatttcatgtggcttgggggatcggggatcatttgatcggcatcaaccgaagatcagacacatccgctgtagaaccccggcttgggattttaaaactggaggatccggacgagaaaccggcactgcttcttctcagagtgtcagcccatgccaatgtgctcactagcgacaactacaagatttcttctgattattttggccttacaaggcagaagctttccaacacttttggctgccctgttatgatggtccaaggggcatctgggaatctccgtccaagatttcagcaggaaaatgcagattttatggagatacagggtgtggatgctttagaaaagccttacactgacactgaaaaacagaaatattttcagcaaagtctagatgcattggagaacatggcagactctgtcctagcttctgttgttcctatttggaaaaaattaaagacagagccggtccacagacttgcaatgttttctgtaattcatccctttgcagctgatgtcccatcattgaagcgggcagaggaaatcgcagaggaagccgaaactgaagctggtatagacggaaatggatggcttatggaagtccgcaaacttcgggaaaagaaagtatttacgcagacagcagacattgaatttcaatattttatgttaaatgacggctgtttctgcggtgttgccaatgagatcatgtgcgagatttcactggacgtgtggcagaaatccgaggattcgctcttttttctcaacggctacaccaacgggatcgacagctatctgcccactgcagaagagtatgacaaaggcggctatgaggttctctggtctaacctgatctactatccgtatcatggcagagtcatggcgctgaaccgggactctgccggacagttggcttcctttgccgtatctgaccgcagtcattttctgggcatgaacccttagccctaccccttctgttttttagatttcttcagagtcttccaggagcggatatggttattttccacaaaaggacttagttccagctgatactgggttccggcctttcctgccgtatgtctgagttcttttaaaatcatatcttcctttttctggagtgaaataggaacacaaaggtctgccgtaatcagggtatgttctcctgccctgataaaacggcagtttataagctccagcagcggatggatctcccctgctttttcattcaggtcatttcttagttgttttatttcgttggactcttctgctgcaattcctgcctgaaccgtacagctgcagttgtacttctgctcaagcatcaaagaaagttccagggcttttgtaaaaataccgctgtccttacccaatattttgacggaaacgatgtagtgcttaaggccgtagtcatggatgtttagtccataaaaacatgcaacgccctcctgctttgatatgatatcctcaacctcctgtaaaatactgccctctggctgtgttccgatcactttttctacgatctctgtaaaacttttcaatccattggccaggatgaggactgcaacccctatgccgcaccacccgtcaatgttccactcagtgaaccttgtgacgaaagcagaaatgaggactgcccctgtcgcaaaggcatctgataaagagtccttagacatggcttttaatgtctctgactccatggcaagaccagcccttttttgataaaagtacatccatatctttactgccacagagagaaacaatacgaaaaaaacgacggtttgataatccgattgctgtcccctgtataaagctgagaccgaagtttttaacaattcaaatcctatggtgatcacggaggctgacgccagcattccaaggagccactccagcctgccgtgtccgtatggatggtgtttccccgcgccgcagcctgccgcccagaggccgaacatggtcacggccgttgttcccgcatccgttaagttgttccacccgtccgccgtcacggtcacggaatggctgacagctcccgccgtgaattttaggatgctcagaaaaagatttaagacaatacccaatacagtcaactggaaaaggctggcgctttttttatcctttttcatgtatacactcctccccggaaccaggtgccctcttctttgagctgatcccaagtatttcgttcatgttccaggcaaaccatagagtcaccagggccgcacatacatcagccgccggctgggcccagacgattcctgaaagtccaaacagcctcggaagcacaaggatcagcgggaagaaaaagattccctgtcttcccagacttaagatacttcctgctccgctttttccgacggagagatagagagacgcatacaccatctggaatccgaaggtcagcagtaagactgcattaaaacgcagagcccggccgcccagcaggatcatctgcggatcagtgccaaatagtccaatcagctgtttggacaaggggaagcagacggccgacatgagaacacaaaagctggtggaccagagacagcagagttttaccgcctctttcagccggtcatactgtccggctccgaaattaaatcccgcaaatggctggaatcctttcataaaaccaaacaccacgtagatcccaacggtcatgatcctgctgactgcgcccatggcagccaccgcgtaatccccgtatgcttttgccgcagtattagtcagtcccaatgcgatactggcaaagagctggaataccagtacaggaatccctatttttaatatctcacagtagatggctttgctgggtgtcatgttcctgaaagacaggtgcagaagcccttttcctttcatcaggtaaatcacgtacatgaaggaattgacgcacagggagatcaccgtagccgccgctgctccccggatgcccatatgtaatccatagatgagcagcggatccaaaataacattgaggatacttccggtcatcatcgctgccattgtaaaccgggttgctccttgggctgtcaaaagattgttcattgtaacattaaatatattgaggatcgatccggtcacatagatgagagcatattccctggcatagggcagaatggtctgtgtagcgccaagtgcggataataccggtgtcaaaaagatcagaatcccggcgatgacagcacctcccgtcaacagtccggtaaacagagccgtggaggccgtccggtcagccagctcatactcttttgccccaagcagcctggatatataggacgatgctcctgccccgaacatcattccaagtccgatcaccagctggacaatcgggaagaccacagagacagcgcccatctggctggtacccagtcctccgacaaaataggcatccacggcgttgtaaagggcagagatcagcattccaatcatggtcgggattccaagttttaacagcgcctttgccaccgtctcctcccccagaagatgattgtttttcttcgcttctttcatttttcttacctccaaatttttatttatctgaacggttccaaagaccgtacaaatcctactcagttcaatattgaatatatattcaatattgttcaataaaaaaaggaaccggtttaaaaaccaattccctgtaaatacatttttgatatcttgtttagtagtttcatggcccactcctcgctttcatagtggtatgcgatctgcaatagtgcatctaaaaaattgttggctatgatgtgtacaaacactggatcgtaatgcctgcacagatcccggtgcgagttcagatggccctcgatctcacagaccaggttttccttttcacactcatattttgtcttagtgcttttatccatcataatgatgaattccttatggtgcctgaaaagacttctgatacagtcctcttccatctggctcagatactggtaattctgatggtccgatgatccgctgcctttcatgacccgcttccagtcaaaatgcaccgggcgtaggacttcatcaaacaatgcctctttatttttataataagaataaataagaccggccggtatcccggctctgtcagcgatactgcgcatggtcgcctggacatatccattttcataaaactcctccagggccgcatggagaatcccctgccggatctcttcttttaaaacttgtgccatcattcctcctaatattgaactgtaattcaatattataatagttctaattctttgtcaatatttttaactcattgacagcctatgccctaatagttataattagaactgttataaaaataacttttaacagaaaggactgattttcatgcagaatcatgttttgacctatgcaaaccattttaagcatttgtatcggcagacattccagcctttgtcggatcagtacgaactttcgcagctggaaattgatgtcttgctttttctaaaaaataatccaatgcataatactgccaaggatatctccatcatgaggggctttgccaaatccaatgtctcgaaggccgtggaatctctcagaatgcagaagtatctcacttcttctcctgaccctgtaaaccggaaggtgcaccggctgatcctatctgctgatatgaaagaccggattaatgccctggctggctgtcaggaacaatgctttgcacttttgctggatggtttttctaaggcagaacgggaaaaactccaggagtttttcagcaggatcgatgataatatcacaaagtcactgaaagaaaaaaaataacaagtatgaggtaacgattatgttatataaatttatcatttgttttttggcaggaatcggcgcggggctgggcacaggttttgccggtatgagcgcagctgctgtcatcagtcccatgctcatagcctttctcggaatgaatccttacatggcagtgggcattgccctggcaagcgatgtgtgtgccagcgctgtatctgcctatacctatggcaaacataagaacctggatattaaaaacggattggtcatgatggcctccgtgctatgctttactttagttgggagctatatttcaagccttgtaccaagcacagccatgggcggtttttctactttcatgaccttgctgcttggaattaagttcctcgtccgcccggtcatgaccacaaaaagcagcatggaatctgtgaacgcaaaaaagagattccttcagtctgtcatctgcggtgctgttgtgggatttatctgcggtttcgtcggtgcaggcggaggtatgatgatgcttcttctgctgaccagtgtcctgggatatgagctgaagactgccgtaggcaccagcgtcttcatcatgacttttaccgcgctgactggctctttaagtcattttgccatcggaggacgtccggatatgttaagcctgatattctgtgtattaagtaccttcctctgggccagggtcgcagccaaatttgccaacaaagcttccgccattgtattaaaccgtgccaccggagcagttctcacagtacttggactggctattgttgctgtgaattatttttagaacgtctagtcatcattcggaagatgctgaaagaactgtaccacaaacggaacggtgatcacaaatgtcagaaaatccgccacggtctgggatacttccactccggtgagccccaacaaacggggcagcaaaaagatcaccgggataaagcagattccgcttcttaacattgccaaaaaggaagcggtcccattttttccgatgctctgaaacatcatgttggcacatactgccattggctgcagaaacaatgtgagaagctgggctctcaacgcaaaggtcccgatttcaatgacagcgggatcattccggaaccagcctactagctgtgaggataggaaaaagcctatgaccgcaaggctgccgagacataactcccccgcccccagtgtaaaccggaacgctttccgtactctggaatatttttttgctccaaagttaaaagctgaaactggctggaatccctgtccgatgccaaggcccacggcaaatagaaaaaagcagatccggttgacgatcgccatagcggctacggctgcatcaccataaatgccagcctgtccattcagtaccatcgttgaaatgctggtcagtccctgacggatcaagcttggaaatccggttttgatgatggaagaaaaaacttggcggtccctggagaaaaaccggacagacagcctgctctgagtcttctttccgaaaaatatactaaacagaatcaaaaagctcaccacctgggacactgccgttgaaattccggctcccaggatccccatatgaaattttgtcattagtacccagtctccaaaaatattcagaaaacctccggctgtcagaccaatcatagccaaggatgcctttccctcataccgcagaatattgtttagaacaaagctgctggtcatcaagggcgcggaaataaggatacaggcggcataggttctggcaaagggaaggatcgtatccgtactgccaagcaggcgcatcaaaggatccagaaagataagcccaaaaaggcccaaaagaattcctaaaaggatagaccagataaagcttgtggatgcaaaggacgacgcactctccgtatcttttgctcccagttttcttgaaatattgcttcctgctccgtgtcccagcatgaaacccactgcctggataatggacatgaggccaaagacaatgcccaccgcgccgctggcactggttccgatctttccaacaaaataggtatctgccatattataaatgttcgtcaccagcatactgatgatggttgggatccccagggatatgaccagtctggaaaccggggtctccgtcatcttcttataatgttctaacgccttgtcttccactgctttcaccttcttttccaatcgaatcgataaactgctccaccataaatagaaaactatcctccgggccgatctccaggcggttcatatatccagtcatttcgagggaaataaagccatgaagcatacttctgaaagcccgttcaaaatgaatgataggttccttctcctttaccttctcagagatcaccctgatgataggtgctacgatccgtttcagtgcattttttaattcttcatcctccgacatttgaagacctatgactgcctgatataattcaggattgtttttggcataatcccggtaccagagtgccattttttttaatgcctgctccatacttctccctcttgaggcttctgtcaggcctttttccatctcatgtatcccatacaggccgacggctttttgaatctcgttgatccctcttatgtggttatacaacgaggaaggctgtacctgtagctcagcggccagctccctaagagaaaaattgttgaatcccttttgttctaccaatttgatagcagttttcataatactttcataagataaacttcttctgctcatataaatcctccaccacgctcaaacaaacactgttcgtttatattctaatatgaacagtgttcgtttgtcaaattcttgcgaataaatgctaggatattataagtacttccaagagagggctttttttatttgtttcttctgtctattcaccaaatatggaaaacagggaaattttatagggatgatgagtacacttctgtaaacggaaaagaaaagactttacaagatacttatgataaaatgtgactaatagctatgaaatattatcgcttgaacaacaaaatccaaaatgaatgacttctcttgaaagaactttctgatgaagaatgttttaaaagaaatgaatcttggaatcaaggttatccggtattcaccagaaaacaatcataatttgttgcttcatagtaagataaagccttgtatattccgtttatagttaatgaaaaggagtgggagaaaattagaatttgtgttttaaaaagtaatataaaaactttatgaacttcatttattaagtattaaggagaaacttaggatgtataaaactttaaattcagtattaaaaaaacccccgctttacacaaagacacaaattccattttgggacgatgaacatatatccagccaaatgcttaaggctcatcttgcccctgactttgagggagcaagcagaaaattgcagtttatcgaaaaatccgtacgatggatagaagaacttgtacctgccaccagttatcatcaactgattgattttgggtgtggccctggcatctatgccgaaaaattcacgcaggctggctataaagtaacaggtattgatttgtctcgacgctccatacagtatgccatagaatcagcggaaaagaagaacatggatatttgttatctctgtcacgactatctaaagatggatttaggcaaaacttttgattttgcatctatgatttattgtgattatggagcgttgtcaacaaatgacagaaaaattttaatgcaaacggtatatcagcatcttagaaaaggtggtaaattcttactggatgttttttcaacttttaaatatgaagagtttaacgaaatacaaacttgggatgtctgtgaaaatggtggattttggagcctggaaccgtatatttgctttaacgggtgttataagtattcaggcaaagttactttggagcatactgctcttgtttctggagatattatccgcaatttttatctttggaatacctatttttcgccgagaactctgaaacaagaagctacagacgcaggttttaaggttattgacctatatggtgacgtagctggatgtacctatcataacggaagtcctacaattgcaatactgttagaaaaataaattgagttaggacaaattagtttgatggaggtatggtatgacaacagtaaatattatttgctttgctatttattttttagttgcactgctcatgataagtatcggggtatcccaattaaaaagtcaggaacctgtaggcttttattcaggtgagaaaccacccaataaagatgaattaacagatgttatttcatggaataaaaagcacggaacaatgtgggtattgtatggaatcatcatcatgatttcctattttattggagcgatgattggtgattccgcttggagtgttgtaccaatgtgtggaggtcttttgattccagtagttttcatgattctgtatcacaacaaattaaaaaagaaatatctgcggtaaactctaaaaaagtaaactgtacaatcaatcattatatctgttttttctagacattgttgtctagtcacccaaaacggcattttctcgcttcgtgtcgtgttatggataagaaaacagtgctattctgtgagtgaaaggaggagtgcagcatgaatcaacaaaaggtcggaggtttcctcaaacaacttcggaaggaaaaacaactcacacaggaacagttggcagaacaattaaatgtatctggaagaaccgtctcaagatgggaaactggaaataatatgccggagatcagtctgctggttgaaatcgctgagttttatgatgtgagtattccagagattattgacggagaaaggaaaagcgagaaaatgaaggaagagtcaaaagaagttgcaatgtcgttatctgattatgcgttaaaagaaaaggaaaaccttataaaaaacatacgtatacaaagtatattcggagtagccgctttagcagtctattttgttattgatactgccggagcagcgatgccatcatatgcctggattgggcttttgtcaaactactgtcatacactgatctttgttacgccagttatgatattactatataccacaggactattgaaaacgacggaaaatcgaagaattcagagtacagcgccaaagagtatcttaatactactggccatcgtggctgccacagtggtaagttgttttatcaagtttatttcgtcacttttattttaagggttcaaacgatccctgtctgccggcatgatatgcccatcactctatttctccatcatatacagcatcgcatttacaatgcaggccgcaatattgctcccgccttttcttccccgggcaacaatataagggactccagcctccatgatcagttccttggactgtaccacattgacaaatcccactggcaccccgataaccagatggggatccagttttccctctctgatgagctcatacagtctgaccaatgccgtaggggcgttcccaactgcaaatataaacctctctcccatggaagccgccttatccatgctggccaccgctcttgtggtcccatcttcctttgcttttacagccacgtcctcatctgccataaagcagtgcacagatccaccgtacttaagaagcttctttttgttgattcctgctctgcccatctgtgtatctgtcacaatcgaggcgccgtctctgatggcctccagcgctttctcaaccgcgtgttcggaaaaacagagattttgggcatagtcaaaatccgcactggtatggatacagcgctttacaatcggctccgtgcctggaatcagggaaacatcccccagttcctctgtaataatctcaaaacttctcgcctcgatctgtgcaggcttcacattttccagctcaatcttcatcaatcctccgccccttcgttaagaatctcataaatcttatccatatccagatgttttctcagttcctccgccaaatgatcatactggctctctttcatctgcccaaagtccgtcaccggtatctctgacagatcgatccctttcttttctccgatggcccggacgactttctctgccgtatcacccacatcaaaaattccatggagataggtaccgtaaacatttccttcccaggtcccgcacagctttgtgatcccattgaccttatcctcaaagaatgtaagcggcttggcttctccgtgctggatggaattccccatatggatctcgtagccttcaattggtgcacctgagagcaaagaaagatctccctccagggcaagaaaacttcccttgaccctgctccttgtctttgttctggaaaatatagtgtcaatgggcagtagtcccattcccttgaccattcctcccgtctccacatggcatgggtcggacaggacctcccccagcatctgatacccgccgcagataccgaaaatgatcgtaccctggccggccttacggaggatcatatcttctaatccggattggcgtagccataaaaggtcctcgatggtattcttactgccgggaagcaggatcatatctgggtttcccagatccctgggctttttgacatagcgcagagacacatgtggaatcagctcaaagacattaaaatccgtaaagtttgagatcctcggaagccggatcacggcgatatccaccagacctttttccgtcaccttttcaaaccgttccgtcaggctgtcctcgtcttcgatgtcgatgtccatgtaaggagttacacctaccactgggatctgtgccttctcttccagcatggttacacctgggtccaggatggttttatctccccggaatttattgatgacaagtcctttgatcctcttctgctcttctttggtcagaagcataaccgtcccgatcagctgggcaaagacacctccccggtcgatgtcccccactaagagcaccggtgccttggcaagcttcgccatgcccatgttgacgatatcgtcctgttttaaattgatctccgctgggcttcctgccccttcaatgacaacaatatcgttttcccggcttacatcatcaaaggctttttgtatttctgggatcaaagtctttttatacgcaaaataatccctggcactcatatttcccaggaccttgccgtttacgatcacctgagagccagtgtcactggatggctttaacaggattggattcatggataccgaaggttcgattcctgccgcttctgcctgcatgacctgtgcccgtcccatttccagcccgtcttttgttatgtaagaattcagcgccatgttctgggatttaaacggcgccgctttgtatccatcctgtttgaagattcttaaaaggcctgcagtgagaaggctctttcctacatttgacatggttccctgaatcataatcgtctttgccatgatgtttctcctttcgtaaacgtctgaagcaactggatcagctgtttattttcctctcgcgtacggaccgcgatgcgaaaccaccctctggaaagtccctggtagttgctgcagtccctgatcagaatcccttctctcaaacagatgtcataaaaatcctccggtcccttaaaaaacaaataattggcccgggagccatacacctggaatccggcacttgtcagcgcatttctcaaaaggcttttttgttcctccacaaaacggacagaagcctccacataagccgtttccaaaagcgccgctgtccctgcggcctgtgccggggccgatactctccatggctgggtgacttcctctattttttcaaggaccccggcatctgaacacattccatatccaagacggatgcctgccatagcataacgttttgtaaaggccttgagcaaaaacaggtttgaatattctcccaacagaccagacaattcatagtctctgccatccggcacaaaatccaaaaagcactcatccaccgccgcaagtacgtgattttttctgcatctttccagcagctttatcagaagctctctctggatcagttccccggtaggattgtttgggttgcataaaaacaccatatctaacgagtccgtgatctgtgagaggatcccgcctgttacccggaagccttccttctctttcaggtaaacatagtctatctcacagcccacgctggaaagcgcctgttcgtattccgcaaacgtaggagccagtaccagagcgcgtttgggcttgactgccagcgccagggcaaagatcagatcagccgcgccgtttccgcagatcagccaggattccgggacctgctcataggcagataaggcttcctttaacctctggcaccggacgtccggataatgctccacatggtctgccgactgccttaccgcctccctgacgctctttggcgtaccaaggggattcacgttcgcggaaaaatcgatcacatccctgtgctggtaaatatctcccccgtgtttatgatttttcatgcccatactccctccagtcagaattttaatcccaggatgataagaacaactccaaaaacagccgccgccaaaagactgcatccatacatcagcccattggctcttttgatgtcctccggttccggttcccttaaatcatcgccgatggtcggtttttcataaagctttccgaaataacatgcgttccctgccagttgaatgtgcagggctccagctgtcaccgcctctgtatgggcggcgttggggcttttatgattccttttatctcttctgtagatccttttagccatagaggcatcgtcttttgtaaaaaagcaggcggcgatcatcagccatgcggagatcctggccggcaggaaatttgccagatcgtccagtttcgccgggtatctcccgaagttcagataggtatcgctgcgataaccgaccatagaatccatagtgttgatgcctttgtaaagaaacagaagcggtgccccgcccaatgccatgtagaacagcggagccaccaccccgtcagaggtgttttccgccaccgtttctaccgctgccttgatgataccctttttcgtaagctctttggtatctctccctacgatcatagaaaccgcttttctggcgccggggatggaacccttttgaagctcttcaaaaactttcatactttcgtcctttaatgactttgcggcaaccatctgataacaaaagaaggattctaaaagaaaaccggcagcctgattccatccgtaacatagtttcagaagaaaaaatggaatacagaagcttaatgagccgatcaataagatcagaataataccccccagccgttctcccccttcagatttaggtaaaatagctcttagccctttttcaagaaaggatatggctgatccgatcagacggacaggatgatagagccagtggggatctccgatcaaaaaatccagaaatactccgagaaataatgccgctgctcttacctccatacgtctgcttcctttctaactgtgcggatgctgcggtttccggcaatccactgttgttcttctatctgtatcttaaatccctccaggtttttgacctgccattcaaaatattccctgtgtgggacaaccagcgcatccagaatgctcatgatcgttcctccgtggaccaccatggcaaaggttttataacgattctgcatacaatgttctaaacaaaagaaaaatccctgcagacatctggtctgaaactgctccctgctctcccctccgggaaaaggaagtgtccctctgctgtcgatccattgctgatacaggggttctccagacaattctttataattcttcccttcaaaaataccaaaatcgcactcagaaagcagctcctgggtgataacatcacggtcaggataaagcagggaggcggtctgtacacaccgtctcaaaggacttgtatagatcacgtccgcccgagggcagaccctgttcttacactgttcttttccctccggactcagctcctcattggttctttttcccacataccgcccgtccagatttccaggagtcctgccatgacggatcagataaccggtcatcatcccttgatcaccgtccctatgccgcacacaaccctgtgcacctctgtactctttttggccaggcatgttaagagccttccttccgtctcccggaagtttcggtcaaatgcatccaccgggacaactccgcagcccaactcattggcaatgatgaccacatcgggatttgcctcaaaaatatgttttgcttccctttcccagtctcccatatccgccatcctgcgcctgacccactcatgaaaatgatagatgcagtggcaggaatagatctcctctaaaccacactgggcaccatctgccatctgttccggcaaaaggcccaggatctcttgtgcatatgcttttttcccctgaaaagctcctcctataatcaatatcatgtctctctcctttagataatgtttgccaggacagccaggcataccgccagagccagctcgtttacctgcaggaaccaccccgcaagatccccagtgatgccgccgaactgtttctttgacatccggtaataccagagaaatgtaaatagcgctgccaaaatacataacataccggcaatgagatgaaacagacacatcagtaccagagagccgaaagcccagaaaaccgatgaaatgcggacggtctgtttctttgccgccccggaaaaggcggcggcaagccctgtttcctttgccattggaaaggatgctatggaatatgcgctcagtgcccgtgacaaaacaaagccacagctaaatactgggagcaggtccgggcggatctcgctgacagcacctccccaggcaataaaatagcagacgcaggcaatgaccgcgaacgcaccgcagtggggatcctttaaaatctccagctttttttccctgtcctgataggagttcaatgcatccgacgtatccaggaaaccgtccatgtggattccacctgtgacaaaaacaggaatcaacaccagacctgctgtataggccaggattcccagatcaagaaaagctccggcctttgcccagaggatcacaagaagaccgatcacagcccccaccgccggaaaaaagcagagggtatatttcatattttcgtctgtccattcactttttggcatagggattctggaatacatcgaaaacgcaattttcaagctgttccacatctgcttcattgtttgtctcttcctttctgttcgatcggaatgccgcagactacctccaccacctgatcagccatctgtgccatccggcagttaagtaagcccagatactcctgataccggactgtttccggggcatactccattccgtcggagaaaatctcgttggtgacgatgcagacatcctctgccttcataaggagtttttccaccccagacaagatctctttaacggttcttgatccggccccattttccatatacttctcattggctgccagatttgacatacagtctaagagcacatgagatccttccggcagacaaagccctgacaggccggtaaaacactccacagtgtgaaatcctttgtgtctgcgcatttcccggtgcctctggatcttcttttcgctctccctgtcatagggaaacatggtcgctatgtagattttgggcgtttcccaggattcagtgaggctttcggcatattctgattttccgcttccgctgccgccagtgactaaggtaaacataagatctcctttcagacaagagggacgtactgctctacatcgatttcctcaaaggtactcatcccgtgataaactgccagcgccagatctaaaagcggatacagggccagcgccccggtcccctccccaaggctcatggagcagtccagacaggtctccaatccaagggcatctaaaaggatcttggcggcaggctcttttgacctgtgggaaggaaggatgtagtggacagcatccggacatatggttaccgccgccagggccgcagtgccggagataaagccatccattacgataggaatctttgccgcggctcccccaagaaacagcccaaaaagggccgccagatcaaaccctcccaccttagagagcacatccaccgggtcctgcggatctggattgtgtaagtttaccgcctgttcgatcacacggatcttcctgctaagcccctggctgctaaggcccgctccccgtccggtcatctcacttacggagcggtttagaagaacggaggccacggcgctgctggttgtggtgttgccgatccccatctcccctgtagcgatgatctggtatcccttctttttcagctcataggccatggatatcccagcattgacagcgcttaaggtttcctctctggtcatagccggctccttaaccatattttttgtgccataagctgtttttttctggatcagtctggtttcacaggcgatccccacatccacggcaaacaggtccacattcagatgcctgcacatgacactggaagtagcctttcccgtaagcagattctctgacacgatggcggtgacgtcctgaccggactgggagatgccctcctttaccacaccgttgtcagcacacatgcacaccagcgcttttttagaaaggtctaagttacagtcccctgtgatccctgcaatcttaacaatgaggtcttctaatttcccaagactgtgaaggggctttgctatactgtcccatcgcctcctgcattctttcatcgctttttcatccggcagcatgatgttaccgcagatttccctcatatccatcctgtctcctcttttctgtctgatattcatggcatttcatcaaaaacgcctttggcagttcctggtttccatagtaataaaaatgaggaaatccggcaaacaacgtttcggttccatggatacattcccagttctggctccccaccggctttttggcacaaaagccatctccgcagccatccgagtcataataatggaattcatgggcattaagctctgcccctttgactccaaacatggatccctctttctgggttaaatgaatatagccaaaccttaccagcttgtcccgtttgaatgcttttgccgggatcactcctgccatctttcgcagaatgccgtcctgatcttccatttctctgtgcagatataaaaatccgccgcactctgccatacagggaagccctgaggataccttagaaaacacttcctgtctcatggatttgttggcctccagttccctgccatacagttcaggataacctccatacaaaatcagcccgtccagatctttgggcagatgcctgtggtgaagcagagaaaacggaacgatttccgctcccattttcctaagcagctccagattctccctgtaaataaaacaaaatgcttcatcctgggccactccgatcttgaccggacggtacccggccttttttagagaaaaaggctgtggtgtcttggtatcttcctccagtttgggggcattttctgcgatctgaaacagtgtatcccattcaatggtttctttcatgataccagcaagaaggcaaagcttttcccggatgtccctgacctcatccggcaggaccagcccgagatggcggctttccaacgtacatccgcggacctctggcacatatccggcaaccgggatgtgaagctgctcctcaatgagtttcttcagacgcggatacatcataggcgagatccggttcagaaggatcccccgaatcccgctgtctttttgccatgacaggaatccgtggatctgtgcaagaacggacgtgctcatgcccttagcattcactgcaaggagcgccggcgttttggtgattttgcaaagttcataggcgctggcttttgtggtcgttcctccgagaccgtcatagtatcccataacgccttccatcacagcgatccctgcattctctgcatggccggcaaggaactttctgatctgatctggggaagaaaagaagggatccaaattccacgattctgtcccgatggctttccggtggaacatggggtcaatatagtccggcccgcatttaaaggaaaccgggttttttcccatttctgccagagcggcgaggataccgcaggtgatcatagttttcccacctgcgcttgccagtgctgtgatcatgattctgtcaagcttcatgttccacctccggatttcccataccagaaaggataaaaaccggattctctcccatcatcagatgatagctgcccgcttttttagcctttgccactgaaacgttcaccacatccaggtccgccaccggaagccttttgaaagcctggactgcctcagaaagcgtctccagggtaatacagtttatgacgattttaacccttggatttttcaaaagaagcgtctccagtatcggaaaaaggcttccggaagaaccgccgataaacacatgagtcggaggctccaggccgcttaatgcctccggtgctattcctttgatgatctgcatcgtatctgcccggaatttcctgcggttttcatataaaagttctgccgcctgaggatttttctccactgcgtagacccgtccccttggggttctcattgccatctccaccgacacagagcctgtccctgccccgatatcatagcacaccgcatcctctgtcagacaaagcttagaaagagtgatgctccgtacttcctccttggtcatgggcacctttccccgcacaaacagatcatctctaagcccatgggtgctgtgtgggctctttgccttcgaattctggacacagagtacacttaaacggtctgtcttgcagtcaagaaattctgagggcctgccggatcttattttttcatccggataagaaagccgttcccccacatggagggtcacatcgttcattccatagtccaaaagctcccctgccagctttctgacttcagttcctgtgccaagaatggcaaagactttttcgttggaagcgatcctgtgaatgaaatctgccttttggccatggctgtttacaaacacagcatcttcccatgataaatggagccgggacataaagtaagataaagatgaaattccgcagacaagcttaatatcccattcggtctctgttgaaagaagctcgcagagcttttttgccccgctgtaaaatcccggatctccggacatggcaatgacgatgtgttcataaaaaggatgttccttgatataagacaggataatttccgcccggtattcctgaaacagatctgcctgtctgtgctctccggccgctgtttttgctgtctctaaaggccgaccggctccgatcagaagatctgctttattacaggcgcttattgcttccagggtcatagtctctgtgccgcccatgcctacgcctacgacgcagacttctggacaaaacgggatctgaaaccgcttttgaagcagctttacgcactctcttaacgtaaccccagactcttctctcggacggccgatgactacaagcctggcccccgcctctctggctgcctcctgcttttcaaagaatcccccctcttttccggaatccttcgtcaccatccagctgcagtgaaactgtctgagaatagccgtattcagctccctggaaaagggcccctgcatacagatcagatgatttccctgaaatcccagcctggcacaattttcgaccacatccggcagagagagcactctggcaaagattcttttctcataatcggtgacttctgtatactgggccagatctttgctcccggtggtaagcaggatatttccctccgtctgtgagagaaactgcgccgcctccctggcagaatccacataaatcacatcttctgcgcactctaatgccacatctctgatgaggcgtacatactccgtctgtgttttcgtacaggcaaagcggatattgtccgtgactttctctgcatagggatgtgtggcgtccaaaaccagatccggcctttgagtgacaatctgatcctctatttcctctgcggtaagtctttgatgggataagatcaaatgtttcccctgctccatgaggctctccccgtattctgttgcagtaaatgcatacaccatcacgccggaccggcacaaaaattctgccagcttccgcccctctgtggttcctgcaaataaaaatactttatacatctttgtatcctcttggagtgaccatggcaccggacacgaccttggtctgggaattacccacaaatacggtagtaaacatatccacgccggtgtccctcagtctttcaagcgtcataagttccttttcctggccctgtcttccgatcatctttcctatgccgcacaccgtgtccggagatttatattgaagcatcaggtcacatgcttttttcagataatcctgtctctttttgctggacggattataaaggcagacagcgaaatctgccttggaggctgccagaaggcgctcctcaatcagcgcccaaggtgtcagcaggtcacttaaactgatcacacagaaatcatgggtcagcggtgccccaagcaacgcggcccctgcagtggccgccgtgactcccggcacgatctcaagctcgatgtccggatatttggcaccgatctcatacatcagcccggccatgccgtagactcccgcatcgccgctgcagatcatggatacggttctgcccttttgtgcttccgaaaatgccatgcggcaccggtctgcctcctttgtcataggggtagacaaaaactccttgcccggaagatggtctcttaccaggtcgatgtatacggtatacccgatgatcacatcactttcctttaaaactcttgccgccttgacggtcatctgttcaaaatcgccaggaccgatgccgaccacatatactttatgactcaaacctaatcctccattcttttaatgcaagggccgccgtgaccccgcatccagcctgctttcccgctatgaggcggccgcccttccctgccgccagtacggcgcttctctcgcacacattgtctgctcctgtcacactgctgacaaaatcggatgccgaaaacacaccccgagcctccatcagttccccggcatcataggttacaaaaggcatcccctcttccctgcagaaggcaaggatccctggctcctcctttttcaggtcaatactcgccgccagccctactgcattgggttctatcctctcatttttcagcatcctctgcactgactgccggattgtctctgctttggttcctttcctgcatccaattccaagcaccactgcctttggtaccagccttaacgtattaggaaaaggacgacagttgtctctcaccgagatacagatgccagactccgtgtccctggctgtaaccagccctgcgggaagctttcctgatacaggaaaatcactgtgaaatcccaccgaaatacccgccagaagtgaggccgaaatttcctttgccgctgcaaggtctgtgatgtgcagatcgttgtcctttgcaaacaaatccactgcaaacagctgatgaacgtcagtagccgtggtaatgaccgggacagctccagtaacagatgcggcctgctctgcaagacgattggctcctcccaaatggccggacagcaggggcacggcaaaggttcccttttcgtcaatggcgatcacggccggatccgtatccttactccttacaaaaggagcgacagcccgcaccgcaatgccacaggccccaacaaagataaaagcttctttctggttaaactgccgcccggtccagtcgtttagcggttcttctatacaaaagatgtcatcctcctgtatatgcctggatttcaccgaaatctctgtttcaaacccatgacattccagtcctgtctgcaatttctgtgcaatcctcagcccctgctggctgaaacagatgatggctgtcttcatttctgctttccctttctgtaccctgtggtaaattccggatcataaagcctggaccgctgatagtggtgatgagagacagcatcccccacaattatcagggctgtttttgtgatcccgtaccgcttggcagtctcagagagggtccccaccgtacagagtctggtcatctcatcttcccaggtcgctttatatacaatggccgcgggggtttcctccctataaccgccgtccaccagtctgccggaaagctcctccaacatgccggtgctcaaaaagatgaccatagtggcctgatgggccgcaaaggattctatactttccttttccggtaccggtgtccggcctgccattcgggttatgaccacactctgtgacacaccgggaagcgtatactccaggttcagggcagatgccgccccgcaaaaggaactgacgcctggacaggaatcataaccgatgcccttctcatccaaaagatccatctgctcccggattgccccgtaaagacacggatctccagtgtgcaggcggacggtgtcttttctagccgcctccccttcctccatcacctgaagcacttcttccagagtcatttttgcgctattgtaaagttcacattcggattttgtataagaaagcagctgagggttcaccagggagcctgcgtaaatcacaatatccgctgtctcaagaaaacgctttccccttacggtgatcagatccggcgccccactgcccgctcctacaaaatgaatcatttggtttcctcctgttcctttacaataatcagagaataataccctgcctccagcggaatttcatcggtacatccatagagcttttcatctgtcatgccgcagttttccaccattttcccggaaagatttcgctgtaccagcttctccttaagcttcgacagattttttcccgccttcataaataccttggtccctgaaagctttaagctgttttccacctcataagctgccggaataatatgaagcggctggtttttttccgcaagcccggtatccatcctggccgccgccgcacagaaggaaggaattccgttgatgatctttgccgtaaatccctgctttctgagcatccggtgcagataaagataggtggaatatacggtggggtcccccagggttaaaaatgccacatcctcccccttcaaaagatattccctaagaacactggcgcctgtctcatggctttcccgtagctttgtctcatcccttgtcatgggcatatgaatccctgccaattccttttccctgatctccgggcagatcttcaccgcaatctgaaatgccgtactatcctccggttgtctgccgggaactgcgatcacactgcattccctgatcttgcgcaccgcttttaaggtcataagctccgggtccccaggccctactccgattccatataaaactccactcattttttctccttcagtctcttccataatgtatctgtgtgctctgtctgtccaaggaatccgtaaacattggaaaataccaccgccccggttttgattcttccataggcacgccgggaaaggttctctccgatcctccttatcacatcgtccatagccggtttcaaaagaccttctgaatgcagatagtctaaagcctcctccgttgtttttgcctcaaggatctgctttaccgtttgaagtccaacaccgctcctgaccgccgcagccgccaaaagctccgaacggcagtcagcctctcttgagtgggtattcatgatcccgcctgacaccttgatgaattttccgatgtgtgagacaaacaaaatgcccttagcccttagatttactgccatatcaatggtctcaccgacataattgctgcactttaagatctgatccttttctattttgtactgttcctttacataatccgcgccataatttcccggcgtcaccaaaagataaccgtttccctcacaaaggcggatccgcatctcaacttctatgcttttcacgagggcttcctcactcatgggctccacgatccctgtggtaccgaggatcgatatgccgccctcaattccgagacgggggttgaacgtcttttttgctgtctcttccccctccggcgtccacactgtgactttcagtcccccttcaaaatccgaacagtcaaggacttccctgaccgcctccgtgatcatagcccggggcacacggttgatggccgactcccccggtgcctgggaaaggcctttttttgtgactctcccgatgccttttcccccttcaatgagaatttcaggggaaggaatctttgttacatccgcataaatatggatgccgtctgtcacatccgggtcatcccctgcgtcctttttcacacagcaggaaacagattcctcggagatctttaaatccttaaggggcagtgagagccggatacccgcaggagtcagcagggaaacgttctgcacctttcctcccaaaagaaggcaccttgccgctcctttggccgctgccgccgcgcaggaacctgtggtgtaaccgcatttaagctccttattctgtttgatgatcacacggtcttttaatcctctgcccatacaaattctccttgatcggtacgttttattccttgagggcgaaataggaatccatcactcgcagggtctgatccacatcctttggcttcatggcattgttaaagaaaatagcctcaaactgggacggcgccaggtggatgccatggtccagcatatagtggaaatagtcggcaaatgcctgtacatccgaggttttcgcctcttcataattggtcaccgggatatccgtaaagaacagacagcttaaggatccggtccctgtgatctgacactttgccccgtgctttttaagaatatctcttacaccgctccggaaagtctccccaagctcctccagatgtccatagatctccgggtgctcctttaagattgaaagttctttcagacctgcggccatggcgacgggattgccgcttaacgttccggcctggtagacacttccaaggggagcgatcatctccatgatctcccttcgtcctccgtagcatccaaccggcattccgcctccgatgatctttccaaacgtggccagatccggagtgaccccgtaagccccttgggctccctgaagtcccagccggaagcctgtgatcacctcgtcaaagatcagaagggtgccgttttgtgtacaaatctttcgcagttcttttaaaaagccttcctctggaagcacaactcccatgttggccgccaccggctctatgatcaaggccgcgatctggccctggttatcttcaaataatgttctcacactgtccatatcgttataaacggcagtcagggtatccttggcacagccctttggcaccccggaactgtccgggatccccgcagtcatgacaccggagcctgccttgaccagcagtgcgtcaaaatgcccatggtagcagccctcaaacttgataatcttatccctgcctgtgaatcctcttgcggcgcggatagcgctcataaccgcctctgtgccggaattgaccatacggaccatgtcaaaacagggaaccagctcacagagcagttcacccatttggacttccatctccgtagccgtgccaaaactcaggccgttccttgcggccccgattacagcttcctggatctctggatgattatgccctaagatcatcggcccccaggaacctatgtagtcaaggtaccgttttccctcttcatcgtacacataagtgccttccgcctttttgataaagcgtggacagcctcccacagactggtatgccctgaccgggctgttgacacctcccggcagcacccgtttcgcacgctcaaacaagctttctgatcgactcatcatccgattctcccttccttcataaatcctgcaatctccttagcaaaataggtcagcaggatatcgcagcctgcccggtagattccggccgtggtctcacagatcatctgctcctcatcgatccagcctttcatggccgcggcttttatcatggcatattccccgctgacactgtatgcagccacaggaaggtccaccgtattgcgcacctcccttacgatatccaggtaagacagggcaggtttgaccataatgatatcagccccctctttgcagtcctgttttacttcctttaatgcctccaggcggttgtggtaatccatctgatagcttttccgatccccaaaggaaggagcagacccggccgcatcccggaacgggccgtaaaatgcggaggcatatttggaagcataggacatgatcggaacatccgtgtagccgttttggtccaacagatgtctgatctcacctaccctgccgtccatcatatcagacggtgccaccatgtcggctccggcctgcacttgggacagggcggtcttggcgatcatgggaagggtcttatcgttgtccacctggtctccagtcagaatgccgcagtggccgtgggacgtatattcacacatacacacatcggtaatgtaataaaggtccggcacttccttttttgcttttaaaagcgctctctgaataataccgtcttctgcccatgccccggtgccgcactcatccttttgtcccggaattccaaacaacataacgcttggcactcccgcatccgccatctcagtgagcacttccggcatccggtccagactgtacctgtactggcccggcatggatgggatctcttctttcttatcttccccttctgtcacaaagagcgggtaaataagagaagatgcatccattctcgtttccctcaccattttcctcaacaccggcgtagaccggagtcttcttgatcgtattgtcatatccattttaacttccttctttctgcctctatgattccgatttcatctgtttcgccagacagcacccaagctcttttgcatcctccaaactgcctttgacactctgtttccggtagatcttttccgcctcatcataaaatagcccggtaaggcacaagccctttcccaagacagtgccgtacgccgcgataggggatgaacagcctccatccagcgtacgcacaaagctccgttctgctaaagtcacaagctccgtctgcctgtcgtggatacaggaaaaaaaggactggtcaaaatcctttctcacctgaatgcacaaggttccctgtcctgccgccggcagcatctcttccactgaaagataacggctgatcctgtcctgaagtcccgctcttttaagccccgccgccgccataatcaatgccgagtactggccttgatccagcttattaagacgagtatgaatatttccccggacactttgaaactttgcatccggaaacagttcctttgcctgcaggacccttcttaagctggaagaaccgatcacctgctctcggttctccctgtcctctttaccaggcagtaccagcacatcccttggatcccctcttttgggaaccgctgcaatgggcaggtcaggagaaatctccatcggcaggtccttcatactgtggactgccatatcgatcctgccgtcgagcagcgcttggtccaattcctttacaaaaagtcccttgccccctattttatccaatgtcttatgaagaatcttgtccccggtagtcttcatcgtcaccagctccacggaaagatccggataatgttccttcagctgtctgattacaagctctgtctgggccacggccaaaaggctttcgcggcttccaatcctcaatctttttggttccatatcatactcctgattctgtctgctgtctgctttgtctttttatggtctgtacctcccgacgtgactccgatgacaatatccccgttctttatgacagaaggaaaataaaagctgcattcctccttgcagtcacagatattgaccggaaggcctgcttttcgggcctcctgaaaaactgcgtggttgaccgcccgtgagtctgtggccgcaaacaccatatcaaagccattaagatccccgggaacataactcctctggatccactggacaaacccgctgcagatcatgtcctcgattccgctgcataccaaaggagagatgaccgtaacctggtcatggaacatcttaagtgtacggagccggcgcagggcgatgtttccccctcccaccataataagctgcaaatcctgcatatcaatatataacggaaaatacgacataaaagccctccttaataaatactgacctcttctgctgaggcttccagcgcctttaaaatctgcggccattcttctctcggcaggatgtccttaagcccgaagaggatccgttccaatgctgatgcagaagcccgttccacttcctgtttaagcctgcagacatcggctccctccttccgaagctccttataagaattctttaacttggcgttggtcagctctgccgcagcgttgctgactgcatggaccagaggaatataatttctgaaatagtaccagttcataaattcaccggtctgctcccgaagaatcttccgagccttctgcatctctttttcattgactgatgcctgaatgcccaaatcatccataccaagcagtttacagccgttaagttctgagagcttcggatccaaatccctgggaactgccagatccgcaaacacataagtgtgctgtttttgaaatgtctccgaagcctgctgtgcatagaccgtataatgaggactcctggtggcgctgaagataaaatccatagcacccatagcctcataacgttccttatatgggactacctggcagcctgccggaatcatcacatcctgttttctgtattgtctcaaggtcatggacacttgggcttttttatgtacaagccaggaagccagcagacgtcccatctccccattacctatgaccaggcagcgtttcccctgaaaagaaccgtaccgctcttccaagattgacactgccctctccggcacagaggtatccctgctgccgatccgggtgtcggtcttcacctttttggcggcggtcaccgccattctaaaaagtgtatccagcactgaatccggtttacagcattcccttgccctttcaagggcgtccctgacctgggagacgatctggtcttcgccgagaatctgggaatgaatcccgctggccagctccatgagataaagcaccgcctcctcaccggatcgtctgacaaacagcctgcgtttggaatcgtctattatagatagctgtgagaacaaatactcaagaggatctcttcccagatgataaaaccacagttcagtccggttgcatgtagacaggacaatacaggaagcctttggatctgcatcctttacggactgcataaaccgtaccgcccctgaatctgtaaatgcaaagggttcccgctcgtccaccgatgccgtatgataatcaattcctatcatcgaaagttccataaataactccttttttatatctgagagaattttagcacgttttgtggaaagtccgcaactttaatgaccattataccataacattttccacatgatttccgttcagctcttagaatgcttcactccaatcatgtagaaaatggacgtaatgtctgctggagaagggcttcttttgacttatatcattttacttttttgtgtgttctctaagagttacatattcgttctggcttattggtaactcattagaaaatagatgtaatatctgttgatagatgcaattcagaaaaactatcgtaagtggtgccttttgtcttgcagctgccttttccagcggacatgatgtccatttttaccagttctccggcttgcattcgaaggaatgtaaaattttctatctttcagaattcttttagttcaatctgaaacataaggagagggaaggctgtccctctgacagaacagcacttccctctattttatgtatttctctataaattcctcaatggcaatcggtctggaaaaataatatccttggccgcagtcacattgaagtttctttagaagctccatctgctcctctgtctcaattccctctgccgtggtttttgtagctccgaatcccctgcacatataaatagtagagcggacaatggctctggccctttcattggtcatgatctccgatatgatgctcttatctaatttcacctcatcaaatttgatattggagagcagtgtaatatttgaatatttagcaccgtaatcatctaaggatagataaaacccggcgtccttgatcttttgtgacagagccaccaattctgaggttttaagcttcgacacggattccgtcacctcaatacaaatctgtcctgcgtccacatcatattttctacagactgcaaggatccggtctacaatatcatattccagaagagtgaccctggaaaaattcactgaaatctttcctatgtcatggccctggctgtgcatcttatttatgagccggcagacacattccagtgcgtagaagtcgatgtggcggatcacaccttctgcttcatataaagggatgaaccgatccggaaatatcagatctccgttgttatccactcttctgatcagcgcttccgctccagaaagttttcctgtcccaagatacactttgggctgcaaaaacacccggtacctgtcctggttaatatcttttatgacctgtttggcaattgtggaatcatggttgtatccctcataaactgaaaattcataatacttttgtttattggcatacataagctcatccgcatggttgatcagctcattgatatctgtgatagcttcctcccatgtagttccgatggatgcactgatctctttatgctcctttaccttgtttctcagcactagttcctttttatgaaactcttcctggctgatattcctgcacaggacaacaaattcgtctccgcctatgcggtagatctgttcccggaacacggccttcaagatctctgccatacagataatcagcttatccccgtactcatggccaaaccggttattggctactttaaggccgtttaaatccacataagcgacaccgatattgctgcagccgtgcttttcaatgtcaaacacctcttccatgtatttgttccggttccagagccccgtcaaaatatccacatagcttaaatgctccagtctggaaaccattctgcgcttctgcaggtcattggcgataaaataggtcactgattttaaaaggtctggattctccctgtttcttttggggtcatccacgcctataaatccgcagacctttcccatctcatacagcggagctgccatcaggctatgaatcccctgcccgttgagtatgtcatatgcctcactttccggatcaatctcctggtcaagggatgatacggaaaagcttccgctcttttcaaattgtctgagccatttttccagggttgacagtgaaatctcctgaagatttccgatctcacttgtgacattctctgcacaccattcataagtattgcacgcaattttctgatcgtggtcaatttcaaaaatataagtccggtccccgccataatgctccgcgatcaattccaaaagcctgtggatggcacagtccagatccagcgtatcatttagagttttaatacactgcagaagtgtttcgtcctgttgcactttactgcccagcaactttttctgccgctctttgtccgtgatatccgttgcgatctccatccgcacacgatagccagggacaggctctatgagataatctacgatcacaaagtatcggtccagatatttattataacgggtccagcggctgctgccttccgcgcgcagcctctcattggtacagaattcacatggttcccgcttcccctgaaggagctcataacacttctgccctttataatcatctccggtaatctgataccgttttttcccggatccattgatgtataaaacttcataagtatcaatgtcactgacatatataatattgtcggtgctgtccaaaattgcttttctgaggatattttcattcatgtcttctacctcttttgtttatcttaaagtttatataaaagtcattatagcatatttttcctgccgccgttgctgtctttttcagattcatgtataattaaattccagacaacaacgactgaattacaggaggaaccgccatgtcaaaactacaggaactgcttcgtcaggcagatgcgtacaaagaaatcatactgaaggctgatacccattcagataaacctatagaaaccgccgagctccagaccactgatatcacagaaaacctcataaaggatctgcacagaaccatctatagcggaacagattcctcacaggcaggccgataccgcacttccccggcaaaagatccggatgcggactttctcccgccttccccggaggatctgccccggctcatgagccatctggaaaaccagatccactcctcaaaatctgccctgcatccggtggagcttgcggcaatggcgcagaaacgcctgatcgatatccatccttttgcagacggaaatgaaaaaaccgcagaagccttggggaatttgatcctgtccagatcaggctactgcccggtcacagtccctgcctgcagggaaaaggattttttggacgcacttgcatcctccaggagatccagcgatatggaacctttatcaatccttcatgcagagcttgtcattgaagctcagagaaatcatatccgcagcatgggaatctcgctttaacagtgcggaattttaggagttttatagaataaagtggacaagtccgctttacgcgccgatgtacagctgcaaagcagccttccttggcacatcgtgcgcatcatgccttcatggcttttttcttccatagggagaactatcctatggaataacattaaacagcatccgtttgtatgctgtttttttaaaaccaatgataaggtttcttctttgttcttcgtttccagctgagattctgatactaagaaaattgagaaacaaaagaaatccgcatggcattcactgttcccattcccttttttgccggcgatttgttatcatatcaggcatgaacttccattttttctgtcacagagaggtatgtctgctgtctaatcagataaggaggtaacatacatgagaaaatattcaaacgaagaactatctgaattgatcgacaaagcggctgcaggtgataaagaatctctggaagccatcattttaagcgtccaggacctgatctttaacctatctctgaggatgctgggcacatttgcagatgctgaagatgccacacaggacattatcctaaagattatgacccacctgtccacctttaaaaaagagagttccttttccacttgggttttcagcatttctaagaatcatctactcaactacaaaaaacacatgtttgcccatcgtccgctgagctttgaattttacggaaatgatattgaaaacgccccgctttatgatattcctgatctgacacaaaatgtggaggagtccatattggcagaggagctgaaaatgtcctgcaccaatgtaatgctccagtgtctcgatgcagaaagccggtgcatctttattcttggaaccatgtttcagctggacagccggacagccggtgagatcctagagctgtctccggaagcttaccggcagaggctttcaagaatccgccacagaatggctgattttcttgaagcttactgcggcgaatacggaggcggcaaatgccggtgcaaaaacaggatcaactatgcagtccaaagccgcagactggatccctcaaatctggattacacaagcgctgaacctgccctagaccaagtccgtctggagtttaaaaatgcaatggaggacatcgacggcctctcacaaaaattttctttctgcaggctctacgaatctccggaaactgttacaaagtttgtctcagactttttagattccgtgtcactctctgtcataaaaaattcataaaagggggattcttatggatacaaatatgatattgtcatacttaacggatttaaataagaacaacaaccgtgaatggtaccatgcacataaaaaagaatttcaaaaggcaaatgcacagtttgaggccttactgcaggaattgatctataagataggagaatttgacagcagcattctgtactttaagccaaaagaactaacctttaaaatcgtccgggatacccggttcagccatgacaagaaaccctatcttccggcatttcgggcgcatataggcccaaagggcaaacttcccgtacctgtgggatattatcttttaattatgccgggagaccattccttccttggaggagggctctttgctggcatgtttaaggatgcgactgccatggtaagggactatatatcagaaaatccaaaagagtgggataatgtactccattctgatgaatttgaacccttttttactgtacagggcgattccctaaaaaatgttcccagcggatatgacaaggaacatccgcatgccgaatatctgaaatacaaaagctggtacgtggaatatccttttaaggacaatgacctgatggatacagattgttttatccggcatgccgcagaaatattccaaaggatgaaaccatttcatgattttctgaataaggctctggccgggtttgagatgcctaagaggccttaacttcacacgttttaccaaaaaaccgtctgccttaagtatgatccggcagacggttttctcttatgatcttattttcccagctgtttcacacagccggactgaatggccacgatgtttcttttaatcttttccctcggccagtcccaccacttggactcaagcagcaaggagacagtctcttctgaaaatctctttttaataggtttggcagggacacctcccacaaccgtataggccgggacatcttttgtcaccactgcgcggcttccgatgaccgcgccgtcaccgattgtgacacctgccataatgacagcctcgtaaccgatccatacatcattaccgatgatgatatctcctttgttgtcccatgcgtcagtgacattttccatcctaagctcccattcttcaaagaagaggggaaatggataagtggataaggatgacatggcatgattggcgctgttgaaaaggaacttggcaccacatgcgatggaacagaactttccgatcacaagcctgtcatgattgattggatagtggtataaaacattattggtctcaaataagaccggatcattgacaaagtcgttatacattgtataatctccgacaatgatattaggatctgtgatcacatgttttaaatatattgtttcgttatctcccgtacggggatatatttgtttttctggaacagccatttgaaatcctcctgtagtctgatgttttctgcaactattccagtcaatgcaatacaaagtttcaacagcctcacctcttttgctttcttgatacaaccctattttatcatgaatattttatcccgtcactcaaatactacctcctgaggtgattagatttgagaaaggaagccgcagatccatattggtgtctgcggcttcctgggtcctattgtttattcatcaaagtttatttttaatgccctcatggaattcagaatcgcaatgacggaaactcccacatctgcaaagactgcttcccacatattcgccatacccagggctccaagggccaataccagcgccttgaccgccagggcaaacacaatattctgttttacgatgcgcagtgtctttctggagatatacacgattgacgcgattttccttacgtcatcatccatgagcaccacgtccgcggcctcaatggctgcgtcagatcccatacttcccatagcgatgccgatatctgctcttgtgaggactggtgcatcattgatgccgtccccgacgaacgcaagcttttctttatcccgctgtctttccaacaaaccttccactttagagaccttatctcccgggagaagttcagaatatacctcatcaatcccaagttctgccgcaacggattccgccgcttcttttctgtctccggtgagcatgacgcatttcttcactcccacacgcttcatgcttctgatagcctctttagccccttccttaacggtgtcagagatgacgattgccccgacaaattcgccctgccttgccacatagacgacggtgcctgcttccttgcaggaagcataatcaatcttctgctgtctcatcaatttgccattgcccaccagaatctcttttccgtcgatcataacacggattccgtgtccggcaatctcctctgcatcagacacacggttcatatccagcgtctttccatacgcttctttgatcgaaccggcaatcgggtggttagaataaccttcccccagtgcggccagctccagcagttcctcctccccacagttctgcggaaggatctgcgtcaccttaaattcaccctttgtcagtgtccctgtcttatcaaagacgatggtagtcatctcagatactgcttccagataattgcttccttttaccaacacaccgatcttggatgcggctccaatccctccaaagaatcccataggcacagaaataacaagtgcacatggacaagaaataacaaggaaaatacatgctctctggatccattcaccccatccgcctcctaagatcagtggtggcagcacagcaagcagcactgctcccactgtcacgaccggggtatagtacttggcgaattttgtgataaaattctctaccttagcttttttgctgctggcattttccacaagctccaggatttttgccactgtggaatcctcaaactcttttgtcacctttacttttaatgtgccgctgccgttgacgcagccgctgatgatctcatcccctgcagacgcttttcttggtacagactcccctgtcaaagccgcagtatcaatcagagattctccttctgtcactatcccatccagaggaatccgctcgccaggttttaccacaatgatcgttcccacttccacgtcatccgggtctacctgagtcagttctccatctgcctcaatgttggcatactccggacagatatccatcatcgcggaaatggactggcgggatttccccaccgcataactctgaaacagctctccaacctgataaaaaagcatgacggccactgcttctgaatactccttcacaccaagggccccaaaggtagcaatcatcattaaaaaattctcatcaaagatctgtccatggctgatgtttctgactgctttgaaaataatgtcatacccgatcactaagtacgggatcagatagatcaaaaacaaaagccaggaacccttaaggccatcaagccctcctgtatgctccgctgtcatcagccctgccagcaaaagaaacgctatgacaatgcggaccagcattattttatgttttttggtcatatttatagtctccttatttataatatgaaaccccgaaaactggaatcatatcctatgcatccggggtatctctgctacattaaaatcttgcagtctggctctaccttggcacaggcattgaccaccttctgcataatctcatcaaattgctcgtcttctgcattgatcgtcattttctgggtcataaagcttacacttgcatcgttcacacccggaatctttttaattgcttcttccatcttggcagcgcagttcgcacagtctaaatcctctaatttaaattttttcttcataacaaccttcccttcttttatgattattcctcaatatgatctcttccctgggcaatgattgtccttacgtgaccatctgccagtgaataaaatacggattttccttctctcctggactttacaagctttgcctgtttcaggatcttcagctgatgcgagatcgcagactgggtcatgttgagagcctccgccaagtcacacacgcagacctccgcttcaaacaggacaaataaaatcctgatccttgtaaaatcgccgaatactttaaacagctcggctaagtcgtgcagttcttcttcctcaggcatcttgtcacttacgattttcagcaaatcatcgtgtacctgaaatgtatcgcagcattccacgtcatttacagccaatttctcacccactttcttcttactatcattcatatgaacaattattcatatgtttataatataactctttctccataatgtcaatggagaaagcaaagtttaattgatattttttttcaagaacaaagtgggcaagccacttcatctccccacctcctcactctttgaggggcttgtgcactttgcgcgccaaatgcgatttgacgtagtcaaatgattttcttacgcatttgtgtgcatactgcccgcagggcttttttattccatagggaggttcgcagaactttcctatggaacaaaaaaaagaaacagcggcaagccttcttttcattgtctgcttgccgctgcttctctcgtattgccataagggtcatatatggctttaatcgttccactccgttgcgtccttcggcatcggcgcattataataccccagtttgtgcaaattaaaccattctgcgatcttaggctccggggcggcttttaaagtgagcaatacccccttggcaaattctaaaggagccgttccgtttgccgtgataacatttttatcgctgacagcctgctccatcatgtacagcttttctcccgtgtacgccgcgcctgcccattgtttcaagtcgttcagatcattgcacgtatgtctgacatgattcagggcgccggttgttccaagaaatgcggaggcgtcgcagatgccgcccagcacctttttctccgacaggcattgacagaccaaaggcttgatttccgcggcattttcatttctccatgccatgcccccgatcaatatcagtgcttcataatcagacggtacagagtcaatgccataatcgggcaccatatgaaaccctccgatcgatgtaaccgtatccgttgttaaagatacagttttaacttcatactgaccttctcccagcatatagagcgcagaagacaggtaggcagcctcccaatccgcatactggtccaataatacaaataaaatctgttttttcataacttaactctcccttttgttttcttggcggctcctatgggccgtgataatggtataactgtaagcattgatcgtaatgacgcagttgtctatgcctacataccagttcttcccgtttcttttgatatcggcttcagcggatttaatcttcgtttggcaccactggaccacatcatctgtgtccagggagagattctttttgatccgtccaacgcccaattctgttgtatgcagtttctctaagttttccagtaattgattctttccgttcattctcccataacaccattcagacttcagcaagcccatcctccccgtttgactcaaaatcagttattccatagttctgcttcaggattctattttatcactaagaaaggctgaagtcctcttaattttaacaatgattttgtaagttatctgcttctttcttaccatcaggcctcagcggtccatagaaataagatgctgttgcgccgccatcgatcagaacatccgatcctgtaataaaagcgccctgatggctcatcaaaagcccggcaacgttagcgatctcatctgccgttcctggcctgcctgctggacattttgcaaacatcgttttgtagaattctcccctttgcccgttaaattcatccatggcaagcggtgtaaccacaatccccggtgaaatggaattgatcctcgccccctttacgccccacttgaccgcctctgccatgacacgtttctcattacacctttttgccatctgatatgcatgaagggtattcctcaaatttcgaggctgcagcacttccagagataacaattgtcctgtaggacaggttgccagctgttcatcaatttcaggtgacagagccggcatccgatggccggactggctggaaatcgtaactccgacgccgccttttgtaatcacctttccgacttcttccaacagcaccgctgttccgtacagatccactttgagaatcgtttctatggaagcctggctgggcgaaacccctgccgcattaatgaacatagaaatatctccgtaccgcattgcctcttttataaaattcaaaatggactctcttgaagaaagatccatttccatccaatctgaatcaaatccggcatgattaagaatctcaactgctgcctctgcttgatcctgatctttatcacccaccacgattttcctgccataacccattcttctagcaatcgccattccaatctgccccgcaccggttaacaacataacatcactcataaaacgaacctcccaaatacttttttctacactgctcttctgagtttattgtaaagatgcagaaaaaaaacagcaatctcaattccgaatgataaagataagaaaaacttatacctacagggcacaccgtttaagggcgtccaggattcgcatattgtgggtgatgatcaaaaacgagcctttgtggttcttctggttttcttcaatgcctctggagaatctccatagccttgtttaactcccacttaaagttccacatctgcttctataatcaaagtattttagatcccactatttttataggaattctcgcagcctcattgtttacctgttctctgtatgatgcaaaatgaacggcagtaaataagaacatttctcaaaacatcttccagatcttagtgcatcaagtcgatttggtgatataccaaaaattactaaggagccggaattctatccggctcctttgaataatatagaatcaaggtgtataatagtaaagactttttaaccacaacgaaggaggttccccatgaagatcaagacagaagtgcagtttcaaggccataacgtttctataacggatgtggaaaagatggtaaaagaagatattaaatcaaaagggttcaaattaaattccctaagctcgctggagatctactaccagccggaaaaccgttccatcttttacgtagcagcagccaaagacggcagtatcatcgacaatgaagatgcattgaccgttgaataatttatgaaagccatacggtaatacatataccccgccatttggcaggggtattttgttatgatctgcgtcattccagtgccccctttaccctctttttccgtctgcacatccggtcctccgcctgtctgacctggtttgcataagcgtgcttccttcccttcagaagaatcttccttcctttttcgtttcttgtatagaccaatctgtacgggccaatgctcttttgcatgatccaggcaaataaatctgcttcatctctattttttgcaaacagctccggtacacaaaaataattctgcatgcttttccatctctttttcgcatagagcagataccgctggttatccacctctcccaaaaattcactgacgcatgcggcaaacaggtctttttccctgactgtccctcccgtgagacagacataaaacataaggccctgttcttcctccaccacaaccttggtatctgattcaatctgttgtgtttgaaatagcgcatcccggattccttcgccgatggcttttagacgcttcagaggagtcatcagcttgacaattccggcgccaaaacgaacggtcaaaaatagaaacaggacagatacggctgtcactgccagtaaggaaaacacactgtatgtatgtgctgttttcgtataaatgctgatggtaaagatctccacaaatatattcatgagctgaaaaccgatgagattaaaaaaggagacacccggcttcagattctctttcggcactccgcattcatcagccacttccatttttctgttgatgactgtggcttgttcccatttctgccggagggattccctgtccgctgcccgttctgccatatccctgttgatcttttccacctgcttcggtgcagggacatccccggccagtccaagtctttcgattccgttttcgatgatatctccggtataactaacaccgagaactccatccatcctgcgggacagcatggcaaaatcttcggacaccagggtatccttaagtcccaaaagctgtcccgtcttgtccttcttctctggatcaatgcacactaaatgccagatattgctcgtcttcttcggatttcctgtcattgttctgatagcacgccccctcatctggttgctgaggataaaggaaccgacaaagctggcaagaatcaaggtgttgatacatggagaatcccatccttcccccagaagagactttgtcccgaccatgacctgtacatatccggcttcaaagacctgtgtggccagccttactgcatcctgtcttctcccccggatcgtgacattcaaataccccagaggaagccctgagcgatcattcatctcccggaaaacgattctgccgctgtctataagcagggtctgcgccgctttctccaaagcaccctccgcttcagctggaagtatcaaaaactcaccgcacaaaacaccaagccggagctttggcggcaattcccggcggagcagctcaaataaagacaggactccaagcttgcttaccggctgtgacagatcaccgatggcagttacatattccctgcgtatataatctgtcaggatcagcagcttcaaatcctcccccaaagttccgtattctgtcagaacaatctgtctaacactttccagtttccctgcgctgttcaccagcatcttttcaatggatggattgacaagaagcgtaactttcttacgctcaatacagttcctccgtttcagatccctataaaggtcattgcgtagaccgggctcccactcatagctgtcggtatcatcaaacagcattccctgcaggagctgttccagtttcgggatatcaaagccgggtaaagaatgaatattcaagattttcagccatttgtgcgggtaatggattcctgctgagtccaaaaagcttaaaatagacaccaggtaggagggatcttccaacagttcatccgcggaatcttccagattcatgattccccgacgagacaccacagcctttttcaatgactcattttcaagcagttccctgaagatctgtcctgtctccctgcggaatctgctgatcgtttctttttcttcccttgtcgggcggctgaaatatacatagtcctgatgtgggcacaggctgtggtcccggaccaactcaggcacgatgatctcctcatcgatctccccgcagaggctgatataccgtttccatgcagccggtgtggagtcatagggaggcgtggcagtcagggaaaccacctggatatcccctaattgctgtaaaaaactctccagtgctttccaccactcactgcgcagatggtggcattcgtccaggcagatagtgccgatgcctgcctctctcactgtccgtaagagatcaaagcctctgaaatcctcatctgcctgtgacatgccggaataaagcgactggtatgtcagggatgtgatcagagcaggctgacggatatcgtccgagagaatatttccgtcatccctttctaaaaaagcttccctgattcgctggagccactgctgccggattaccagcgtcggagataagatcaagcacggtctgcccagacgtctgatcagctcgattcccagagtggttttgcctgaccccggaggcgccacaatgtgaatctttccatcttttaaataagtgtccgcagactccaggatccggctctgataaggccgccatgttccttgaaagcttagaatattgtcatagagattcatgcttcccctttctggattgcctcatgttcttttccgccatcaaattctttactcattataccttcgaaccaccggtgtatcaaatcaatattcataaaagcaaaaaagacaaaggaaatatcctttgccttttttcttacaattctcccctggactcccgttctgtcaattcttccataatattcggatacatcttatccagtttatatagaaacagtgtgatgatcactgccacccacacgaccataggcccaaatttatagatgttaataatcatatgtatagcgctgtccggctgcaccatacttccggctgtggagctcagataacctgcagctgacaaaaggcttgtgatgatagcagaagtcagccctgccccaagcttcatcccaacggaacttcctgcaaagatcagactctcctgccggatatgggtcttccattggccgaattctaccacgtctccaaggaacccgaatactatggaattaagaggtgccagcccgattccccggatcacacagctgaagaccataaatccgaaattctgtggattgataaagaagattagatgccctataaatgcaaggcaggcaccggccaaggacatattcctcttaccaaaacgtctcagcagcagaggactcataaaagttacacccacaatgatcagtgtctctgtcagatacagggtgctgtacatccatgtgtcattgtggaaaatatatttgcaataataaggaaggattgttccagtcacacagtagataccattctgcatcgtccacagtatgaccactgcccaaaaatactggtttgtcactaaagctttcagtgccttcctggcaggcactttggactgctttttcttggcctcgatcacgacagtttctctacacttaaaaaagcagactagaagcaggatcaacgcgatagaggcccagagagccatggttttgatccatgcagcctggtcatttccgaataatttcactaccggcatagtacaggtaactgccaggatccttccgaatggagacagccccattctcaccacactcagcatatcccgctctgaagaaatcctggtcatcatagcggacagactgctgtacggaaggttaatcgctgtataacagaccgtgttgcagaaattataggtcacgaacatataggcaaactgcacagtggctgtgctgtttggaaccgcaaataatagaaccgctgagatagcaaagggcacacacatccagagcagccatggtcttgattttccccacttagtgtctgtcttctcaacgatcacccccataatggcatcggagactccgtcaaacatcctggacagaagcatgaccagaccgaccgtcgctgcactcacacccacataatccgtataaaataacgtgagcagtgtactgatcataccgaagaccacattgcacgcggtgtctccgcatccgtaggcaaatctggttccccacccgagtctcccgggggctaaattttccttgggcttattctttttattcattcttatctcccttccttattcatcagagaagctctttctcgatccgttctctcgcttccggcgcctgcttctccatcttttccgggaatccgaacatggacacacatgcgatgttgtctcctccggcttttggcgcgtctttctttaactggctgttggcaaagtccatatcccttaacgtctcaaagatcccgtcaaagtccacgtctccctcacccatagctaaatgctggtggatggtcacatccgcttttccccttccgtttaaccaaggcgggttggcgatatagcggcagtccaacgtctggttgaacgtgtccgcaaacagtacatgggtcagttcttcccctgcatattgtaacatggattgcacatctccttttccctcgtcataaaagaatccgtgaggagaagagtacacatacccaaggttcggggagcggaaggatttcaccaggtcacaggtctcattgtttaattcacagaagtcatacggatgggactgtatttccacccggagcccctccctttcaataatcggtaaaagctcttccatggagcgaaaccacatgccgttgcagatctcctgctggttgggatccccggagagttccgtgttgatcaccggaactcccatgtccacggcgatctcaatcatccgcttccagttggccactgccatctgtctctgctcctccgtgggtcccgaccagcggtacaccacaataaaagatgaaatctctatcccggtctcttttagggctttcctgtattctgcctcacattccctggaaaacagcgggtgtttatagaatgggttgatccttggatgcggagactgttcgatgtacttataaccccagtccgcgacttgatgcaccatctggttgatatccatctgctttgccagcacatccacatcaaatgctatcttcataatacaatacctcctttatgacaaaacggatattcatcccaaaaaggagttatgaatatccgcttatgtcttacatactctggtctgtttacttgctgatggtctggttcagtgcatcgatagaagtgagaactcctgcctccacagacatggtcaggtcttccatctccagggatacatctccatcatatcccatcatgctgagaactgagaagaattccttccaccactgtaaatccttaccgcatcctactgctacatagttccacacacgttttgcggactctgtcaccggccttggctccaggagtccattggtgtcagcaagaccccgttcaatacgggcatcctttccgtgtacatggaaaatgcagcctttcagcgctctggccgccgcaatcggatcagccccaaggatcatcatgtgggacgggtccagattaatgccgatcattggatctgtcgcttccctgagttttaacatagtctcggctgaccacaccatggttcccgggaactcttcaatggcgatctgttccacaccgcatttcttgcagtgggccgcaaattccttccagaaagcgatggtcactttccactggtattcataagcgggtgccataaagtccggccatgatacagtggatgtgatccagtttggagttgtatctgtctcatttccgccaggaagtcccgccattgcaacaatttttttaactccaagctttccagccaattcggcacatgcatacatggaatctttatacccttctccggtttctgaaggccacaatggattgcaggacgtattcagtgcagaaatccgcattcctctttttgaaagttcctcctgaaaggcttccagcttagccggatctgagagcaactcttcggtgttacagtgcttacgtgcaccccagccccctgcggtcatttccaccgcattaattccaagagatttcaccttgtcgagcatatctgtataagaaagttctgcaaatacatcggtacatattgctaactgcatatcatttcctcctaattattcaaaatcaacccagactccgcctttgtcagcagattctacacatttggttacccatcggatgccttcaataccggcattaatatccggataaacgagattctttaaggtctcttcatcgcctcggtcttttgcgtccattgctacggcaaatttcagataaatatttgcccagctctcaggaagaccttctgcgtgcagtgcaccgagccgctcatctgcattgcactcttcatacagataaggcatggagcggatcatcttgcggatcggttccccctgtacctgatacagaagttcgtttggctgattatctgaaaattccacagatgctttggaacctacgatacggatcctgtggccgtccatacatccggcgtttactgcggatgcccacatacgtcctactgccccgttttcatagcgcatcatcacataagcgttatcttccaatggtgcacgggattttacgaaactctggcggtcgcataagagctctttcagtttcagctccgggcataccagctcggacatataaaatgtatgggtggatagatcacccagtacaaaggatggtcctgatttttcagggtcaacacgccatttctgtccttctgactccttatctccgatctcgtcacacgcaaatccgtgagtatactgaagttctaccatatggatgtctcccagatcgccgttctttaccatctggcgcatctgtaagagaagctggcttcctgagaatccgtaggtaactcccacaatcttgttcatcttttctgccagtgctttgatctcttctccctgttccaccttaaagaataaaggtttctcacagatcacgtgaagccctgcttccagagcagcttttgtaatctcaaagtgggtaaagttcggtgttgctatagaaaccacttcgattccatccgggcgttttgcttcctcctcaaacatcgtcttatagtcagggtaaagtctgtcttcgctgacgcctaaatttttaccaaaatccttgcagcgttcgtaatcaatatcaaatgctcctgccacaagttcaaacgccgtattgtctcttaaagctcccaggcggtgtttatagcctacatttcctgtacgtccgcctccaaccatagcccagcggtaaggtcttttgatcttcttttcaccgtttaacatcttacatatctccttcacataaacttcattatttttgttttcctaattggacagggaatccctattgatacagaatgcgcattttggatatattgaacaaattttatgtatcttccttgctttatttgttcatttcctttactgtaactgcattataatctataatagacttatggtaaatactgcatcttgtctaaaagttcatcattcttgctttgttaataattaaaaaaaggagagatcattatgaaaagtgttgacccggggattctaccccagtccgtttgtttttcttttaccccgtcagaaacggcgaagcagctgtatttctatcccacctggtgcgggcactatttctgcaataagaattactatatgaagcggcagtcttttccgcctcttctgatcgtattcgtcagagagggagtctttcattttgaatacagggatatggtatttgatgcccagaagggcgatgtggttttgctggactgcagtgagccccactattattacgccgatgacggattggagtttttgtatatgcactttgacggttccaatgcccatgatatctgccaaaatatcttaaaccagagcggtcccctgatccagcaggaacataacgtactaatcggacagcagttatatagtatggtaaagtttcatatgcatgacggcatcgagaccatgtttcagagttccatgagggtgtataagatctttgaatgcttgctggcccctgacaggcagcagctcaaagaggataatcccattgacactgtgatccgctatatccgctcgaatataggaaaagatatttctctggaagaaatgtctgaggtggcaaatctaagcaccttttacctggcacactgctttaagcagcagacaggcttttcaccgaaggaatatgtgatcaatacgaggcttgaccagaccaagattcttctcgccagaacgaccaagtccgtagctgagatcgcctatgaggtgggctactcctcaagcagcagccttaccaatatgtttgtaaagcggatggatatgtctccccggcagtaccggatgatctatcagagttcctcctagacagagattatctttcccaggccggaatatccatataaaaacacctctgaacgcagcctggaaagctgttttcagaggtgtttccgcttattattttaaaactaacgttcttcttttgtgtgatgaaaatctcttttatttgcctttttgcactgatacattgcagcatcggcctcctttataatctcatccatcgtcatggtattatctttaccttctacattcaccacaccataactgaagcttacgggatattctttatcattctcttccacaaacttattcagaagggccgccaatctctcctccactatctttttatcattatagggaagaattaggcagaattcatctccgccgatccgtgcgaatacgtccgagcttcggaaggaattctcaatataagaaacgaatctacatagataatcgtccccttcattatgcccataatgatcattgacagattttaatccgtccaggtccagatagcacagagtaacaatctgcttttctttcaaaagtgtttccatatactcttcaaaggacagtctgttgcggataccggtcagggaatcataatatgccttgttaaacagattgctctccaattttttctcatctgtaatgtcatccacgatgtggacgaaagcatcatggcccgcccattccgtggcaaaggttgtgatccgatagtagccgttctgctcatcccccagttcccaaaccttatactgcttgccgtcctgccaatttaaaatcttgtctctgaaaaaaagcctgtctttacagaattcgcataagtcaggatccacctgctgttcctctttcctcttgttgcagtatacaatatctctggtatctgcatccactatcaggatccactcttctctctttttgatgacatccaccagcaagttattatattcttcgattacctgggctcttttgttggctatttctgctttttcttttaaaagcgcttctctctcctttagctgggctgtcagcgtattaaaggcctcagaaaagtctccaagataagatacacgctgagaataatccccggccgcgacctgctttgcctgccaggtcaaatgattcaggtttgcatggagatttttcatatttgaacacaacatattctctctggacggaacaggaccagagagattcccttgagaaatatccgctgaaaatgtaagcagctcctctacggactgctgtaagaccaaaagcccctgtcctaactttctgtagggctcatccagggcttctatatcaggcgctgtgatcggccgttcatacaggatacttctcagatattcaaacagcacctcacaattcttgttctccatgtcaactccccactactttcaactttttttcggctctacccggaatctgcacaccctgtccccagtggcccagcagtcaacttcctctgccgaatattccttcttcatgtagaccgtcatgaccccggatataaacccctcatcatagttacacacggtctcccccaaaagcggcaatcctgagcagtccgcgtcctctgagatggtcagtataaactttccactctcttcgtcatatttttcaatacggagaacaccgatcttcagttcttccatgcgctcctgcagctgcgctacaaattggttcagttcctttgtcaggtccagcatctttttggcgaaatacacgccggctcggaatcctgctcctctcagaacacggatctgctcctccctgccgtatcgttcctccaattcttccctcaaggaatattccatcagccggtaaacagcgactggaatgtcctcccctaaattgccccggccgtccagattatagtccatatactccgccagccctaactttttctgatccttcagaaatatattttcattcattgcataacccctttccagccttctgccaacatggagacatccattctatcttgtattattgtaagcctccccggcaaaaacttcaatgagatcttactttttctacattatttttgcctattatatacattcagactgggaaacctagaaccggacctgcttcactctctggttgctggtatcagatgaaagtaatagagcaaatcgggcagacctacatcatctgacataaaaatgctccctgacaacataagatgcgttctgtgcatcgatgtcagagagctttttatagaaaaatcgaactatggtttaatttcattcaatttctgtgttttattcattgtgaagcagcttatgctcctttccttttaaaaggccgtcatagacagtcgcaacgataggattctggctggaaagtttgatctgggccattttatcgatcttgtaaagaccctgcactctcgccttcttggttctcggtccgatcggcaccggctggcctcctcctgtgatgcagcctcttttgcaagccatgacttctacaaaatcataatgtacttctcctgcttctatcttatccagcacctcagacgcacagcgcagtccattgactaccgcaatctttacgtcacggtctccaagcttcacggaagcttccttgatcccgtccaccccgcgtacaccggtaaaactgatggcttccaggtcttctgccctgtcactgttcatcagccggcgcagaactgcctccgttacacctccggtcacaccgaagatcgcacctgcgccggaggagataccaaacggcatatccagtgcctccggctccagctgagccagatcgatgccggcctcctggatcatacgggctgcttctgtggtagtgatcacatagtccacgttctgttctccgtcattaaagtgctccggccttgtgatctccgctttctttgcagtacacggcatgatggagaccaccattaccttcctggaatcactggcgtcattcatgcgtgcttcctctttcatcagcgccccaaacatctcctgaggggaccggcaggtagaaatgtgatccttaaactgcggatacctgttctcacagaatttcacccacgcaggacagcaggaagtaaacaacggaaggttatcccccacctccaggcgctctaacagttctttggactcttccataaccgtcagatctgcaccgaaattggtgtcatatacctcatcaaatccgatcctccgcagtgcggccacgagccggccgagcacattttctccttttggaataccgaacttatctcccacggccactctcactgccggcgcgatctgtactacaacccggatctcaggatcagacagcgcatcccacacctgctcgatattctgtttgatcgtaatggctccggttggacagaccgcacggcactgcccacatcccacacagtctgtttgtgccagatccttgttaaaggccgtcgtcacctgcatcttagatccgcggaacgcaaagtccaggattcccattccctggatttcatcgcaggtcctgacacagtcgccacacaaaatacacttgtttggatcccggataatacattcggaagacaaatccttcggcagctgttttttattattcggaaaacgcacttccttgatgcccagctgcctggatagtttctgtaggacacagactccgtttttcgtgcaggtagtacagtctctgcagtgggaagccagcaaaagctcaatgatcatttttctgtggtgtttcagtctcggggtgttggtatagatcaccatcttatcccggggagtctcagaacaggatgcaaaaatccttccccggtcatcctcaacgacacacatgcggcatgcaccatatgtggaaagctctgaatgatagcagaaggtaggaagatctattccggacttgcggatcacagacagaacatttttttcgtctgtaaattccacccttctgttattgatcgtcatataactcatgttcgtctcctcctacccttcaatatggatcgcaccaaatgcacaggcgctctcacaggccccgcatttaatacatttatcattatcaattacatacggctccttgatctgcccgctgatggcgccggccgggcagtttcttgcgcatttggagcatcctttgcaccgttccggactgatgacaaatctccgaagagcactgcagttgtgggatacacactttttgtcgaccacatgctccacgtactcatcccggaacagttttaaagtactcattacaggaagcgccgcgctttttcccaatccgcagagtgccgtctctgtgatggtcgtggcaagctcctccagaaggtcaagatcctcaggttctccttttcctcccacgattctctccaggatctccagcatccgttttgtaccttcccggcatgggacacatttcccgcagctctcattctgggtaaagttcataaaaaaccgtgccacttccaccatacaggtgctgtcatccatgacaaccagccctccggacccaatcatggcacccattttcttcaaggaatcaaagtccagttttacatccagatggggtgtgatcagacatcctccggacggccctccgatctgtacggccttgaacttgccgtctcccttgattcctcccccgatgtcataaataacctcctttagagtcgttcccatcggaacctcgatcagtcccgtatgcttgacgcttccggtaagggcaaacgcttttgtaccaggacttttctccggtccgatccctttaaaccactgtgctccctccccgatgatcataggaacattggcaaaggtctcaacgttattcagtaccgtcggctttccgaacagaccctgttccaccgtcctcggcggcttcacccgcggcattccacggttgccttcaatggatgcggtcagcgcgcttccctctccgcacacaaaagctcctgcacccttattgatatgtaaatggaaggaaaaatccgttcccaggatatgatctcccaacagcccgctttcttccgcctgttcaatggcacgcttcagccggctgatggcaagcggatattctgcccggacatagatatatccctcttctgcccctactgcataggccgcaagcatgattccctcgatcatcttgtggggatcgccttccatgatactccggtccatgaacgcaccaggatcaccttcgtctccgttgcagaccacatagcgcactttttccggctgtccggccacctgggaccacttatatcctgtggggaagcctccgcctccgcgtccacgaagatttgactcagtgatctcacggatcacgtcttccggcttcatctcaaataatgctttctccaaagcctcatacccgcccacggacaggtattcttcgatatgctccgcatcaatgtggccacagtttttcagcacatttcttgtctgttttttatagaaaggaatgtcttcctgtttttgatactcaataccgtctctcttaaaaagcaggtgacggatcggctcccctttttctatagtcctatgaaaaatctcatcacagtcttccggctgaactttcgtatataagataccgtggggctcaatcctcataagcggtcccatctcgcaaaatccgtgacagccgcttttcttaatgccgatctccccatccccgtgtgcaatctcagggccaaaatggatctccacgtcaggatattcttttaccagttcacacatccggtcatagatctcccctgatccgccggaaaggcagcctgtgccggcacagatcagaactctgcatttactttttttcacctgttctctggaagcttcgcggatccggccgagagcttctctgttttctatctttttcatgatttaagctcctctcagttctcggatcaattcagctgcggcgtccggagtcatagccggatataccttgtcatttaccgtgagcaccggcgcaagtccgcaggcccccaggcaggagaccgtctccagtgtgaacagcatatcgtctgtggtggctttttcccccgaaagccccagttcactgtacagccgttccagaatagcaaccgacttgcggacatggcaggccgttccattgcagactttaatgatatactttccttttggctcaaaggaaaaattctcataaaatgtcgcaacactgtacgcctttgcctcatcgatggacagtttacctgccacataactcaaaagctcaggcggaagatagcggtattcagcctgaatgtcctgaatgaccggaatcaacgccgcctgtgtaagcccgtgagacgctatgatttcatctgttttgtcataataggcctgatctaacatgtgatacctccttcaaattgtgcattttggttaattttttatcaatcactgttaattatatgtcaaaattgtcggattatcaataacaacgttctgattctcagtaaaaaagtacaaaaacaaagtaggcgggtccacttcatctccccaacccctcactctttgagggacttagcaattttaagcgctaaatgcgattggttgcgtgcatactgaccgcaggttttttttattccatagggagaactttcctatggaacaaaaaacaggccccctttccttaagggacctgctatttacgaattcgtcaatctccgttatgattcgttagtggatactaactcaattgtcactgcagaggatatggagctagtggaatgcctgaaatatgtcagcttagaataaactttccctctgacacggaccagatcactggaaggttcccttaccacctagtattctaatcttatccccctcaaccaataatgcctggttgtcatttatcacttttaaatccaactcctcggaatagttattgataatctcttctaccgcctttttgaactcccggttctggtaatggggcacaacataaaagccagtcacgcttaatcccgaagaattctgcaattccggtgccttttctttatggtccattcgggctgaatactcaatatcaggggctgttgcgatggccccggcagactcaccgatatagaacttccctttttctatttcacttaccagcagcctgtccgcaccggtcctttttaattcctgcatcaagaaaaaggtattgcctccggttacataaatataatcgttcttctctaacttgtcttttatcgtgtcataagatgcggtagaaacttcaagttcatcaacggacaatcccagtctctttaatctccatttcccaattttcacaaagaaccctaatggctcaactttactggccgtgggaatataggttactgttttgttttttagatcaggttcgattgtttttaagatattggcaacgttttggaacatagagactaacatcatccttttcattttatctcccctcctccgttcttggcttttgaaacagaaaattattgactctctctgtgacccatatttcatcgtccgtgatctttaggttataacccgcaatcacatcatggtcaaatctgttcagaatgtcttcaaatccccatgcagtttcccgctttttcggaaagcggatgcttgtttcaaatccatctatatagtgaagccctgccgcttcccctatctcttcccactctcgttttgtataaaactttatgtgtccgtcctttttcatctgcatgtatgcatccacaaaccgttctgcatcattttcatttggtgcaggatccgcaacaaaacatcggaaagtgatgcaatgcataacggctgataaccggtacctgtacccagatcaaggatcttcctgcctggtctgacttccaagaaatccaagatgagcttcaagtgcttttcatcctgtgtctggttgttataaaagttttccgcctgaaagctctcttcaaatcctcctcttgttttattgatgctgtcttctatgtcattgcttataatcctcattatcctttattataatcaaaccaaccatggaaaacaataagacagactataacagctgataaaagaagccgtgttttgtacactgccagatcagcattccatgtcccaccgcaggaatccttgtctggagatcccattcggggtacagcttctttagtatgatactgtctcccgtaagcagtgcagtaaatgagatataatgttctctggtcatttcatgctccgatgaaatataatagtcattttctatcatttccaccgtaagctgttcatccttggctgcctttttcggctgagctgcctttagttttttgccgcagcaggtgatcccgctgtcagtcatagctgttatcaagttaccgcagtccgggcagacataaaacttcatttttttcatatttcctcctaaaatatcattggcggacagatcccctgaaagcagcttctccaaatcaattccaaacagttctgataatttaggaagtagagacacatccgggcatccaaggcctctctcccattttgaaactgttttatcgctgatattcatacagtccgccagctgtaattgtgtcagctgtctttcttttctcaattcacagatcaatctgcctatttttttattatccatctttctcacctcatttgtcattataaaaaccccagcataaaaacacaatcaacgctccgtagagtttacgacaaaactcatttgctacgaaaaaaatccggtataaccggattttaaatgacagcctgctatatttctgttttaatatcttttcttagccacatagcggtcgactgcaaagcagatcattgacaatatgaccagcgaaataacattgaccgcatcgctgatcatatctgacgtataatctttcaagaaataggatgtcaaatgattaattgtcaggctcacagcaatggccaacaaaaataaacctccgaacgcaccccacaatctgtgttttaattgataaaacagaaagtacatacaccaaattcctgctaaagagactcctgaaacagcagaacctaatgtatacaccagaggaagatttaaaatctgccctaaaacaaacagataaatgaatatcgtaacgctgagtacataaagtgtcatctttatacagccctgtttcgcctttaataaaggcaataaaagcagccagctgaatacgagggaggcagtgacaaccaaagaccatgtcagccttcctgtaatatagaaatcacagataaaacagataaaaaccgttaacaaaaacgtcacggagcaaaaaatcaatacccccatcttaatcttttccaatctatttttactcgttcgatccgaatattccagtgcttcttcaataatagtctcagtttttttactgggaggttcgctatctttacatccgtttaacaattcactggctgaaactcctaagatccttgccaatggtatgatcaatgagatatccggacagcttaatcccctctcccatttggatattgccttatccgtaatattcaactgctctcccaactccttttgggtcagattattttcttttcttaattgttgaataaacgtgcctattttttgttccttcatttttatgtaccgccttttagtttttatttccagagacctgagacaatcaaactatatcagcaaatcacaaaaggcacaaccgcccatgggtttataaagagataaaccaacagtagaattggctggatcaagtactttgaacctctccccaactcacattttattaaaatccacataaaatatataaaaaactactggcggtaatatctgtatgagcaatgaagttccaggaaccatggtccaacagggaaatactatgagaatcaataatggtttcatagaagaagtttcctgttttaataattctaacggatttatattagtttcttactctgtgcgtgaaagaaacaatattacttctatacaaacgatcagattaaatctcaatagaaacacagttgtaataaacaccaacggacgaaatatgtgtctatgctgtctaagggcaggtatgtggattaatgctgttttctcatcgcgtatgacgaggagtatccctcctcaggctaatgcttttttaattgctgttagaagaaatccacagccatctccctctgttactaccggacggattactttgattgattttgacaacaactttctctatacagagaacccaaacaacagaaataaccaaactaaatttatcatcacaaatacaaccacatttacaaaccgttttggattgccgatcagattccgtgatctttggccgggccagctggtgaggataacccatgctaattttcaggcacccagcattcctcctcagaccacggcatttaatatccagcaattataacagagtctggggcttttgtcccagactttcttgctgtctcacattcctatttttcttcttaaaggactataacataattgcagctagtcatatcactatcaggaggaattacaacaatggaatttgatctggaaaaactaatgtatgaatattatttggaaaatgaagaccaaaataattatctgattgagtcttcagcaaaatttgaatcttctttggatgacctggacctcgacgactgctttaagtcaaaactgtctgatctgaaaaccgaatacggtttccagtgcaaaaaacagggattccattatggttattgtactgcactagaaattatgaaacagttgatcaagcagtagtctgaaaccgaggcggtgagcctcggttgtgaaataaaatttttcagctaaatgttgcgtagaaaataaagttgaaccgttatcgtttgatccttataatctgtgtttacagccatattcctaatgtaggcattcacataatttccattgatccaggcattatatactcgtaaattgctagttacactcagatttttgaatctcaatttataaatccaatgcagttgtgatataggaggaaacatttttagaagctcggcagtaatatgtacaaattccgcactgtatgcatttttcaagtgcactcttatccagtaatgagtctgataaattgtcatctaatacatgaacaacttttgagaccctaatgcctgccggacattttctatcacacctatggcaatttctgcatttattagcattgtgtatttcaggaagttttgaaaaagctgcaaagtttcctgtgtatgaaaaatcttctttttggctggcaacagaacaagagaagattccagtccccttataaactgtctgccctgcactgtgagcaaattgcttttctaaaatacttatgatgttatctgatgggtatacatatgcgactttggcagctgcatgtgataaatcagcaattgtaataaatctcccgccgtcgtaacagttatttatgatttttgaaatttgataaatgctttgaaggtttagtactaatataccaaagtctgctggatattgccctttttctaatggaatatgaagtgtttctttcatcaaaaaatgttcttctcccatcggatacctggccggaacttcagcaacagaataattataaccaggctttacatttttttgtttgacggctagaataatgttgtttaaggataatgtgtcctttaaacagtcaatagcatacacaatctctttcattctattttttagcagccattcgtcatgtaccagcccgggatcgcattctacagcattaataattaaaatccgatccttggtgtctgacgcaagaaaccgtttgattttatcgaacagcaaataactgtttccactcattccagtgacttttgattcctgaagttttaataatagttctttgcttgtaatcgacgaagtcatatctggccttcttttttcgcttccgattaatatttctgaggataactgaaccgcctttcccaaataactttttaatggcttcctttttccctttccatattccagctttgcatttttgtaggctaacttcaaactagaattatgccgcacgatgtttttattgatcaacgcatattgtttcatcttctctgttctcctatgatattttctgtaaaaaaatattctgcatgggcttttaacaattgttctaatttttctttatcacattttattgtgtggtacataaagaatggagaatacaactccatagcaagaacttctgcatctttctttaccatcacaccgtggtccattaattcttgaaatatgagtttttgagagttaataggacaatcaataaaaaattctttgaatatcctggacatgttttcattcttaaattgctcaatcaacagaattctgcgaaacattacaatcagttcatcttcaatctggaatttaaacatggaaaggcacatcgtgacaaagtcttccttgctgggcgacatggtatcttgggcataattgcattgatccataaaatgtttcttacattgatccacgatcgcatcaaaaattgcttgtttgcttgaataatgtttatataatgcgctgttgcctatgccgacggaactggcaatctttcttactgatacagcatcgtatccataaatggaaaatagtttcatagcttcctctaagattcgttcttttgtggtcatatgatccctcctgactgattgaaattctagtgaacgactgctcacctctattatagtgagcagtcgctcactttgtcaagcactagtttaccgtttctattctaatttcttactaaataagtttttgagacatccatttctttctcatgaaaaaagttaatccggcgatcgcaggcagaatgggagaaaatgcctgcccgatgtagactccaataaacccatatggaaagataaatgccaacagcccgcagacaggcagtcgcacggccacagcgtctaacagagcattgcacatcgccacattggcggaacctacaccaatcgcaaaggaatcaaccgtatacattaccgcataaatcaagctgttgacaccacaacaaatacgaagatacagaatcccttgttcaataacgtctgcactggccggatcaaaaagcataatgatgtcttcagcaaatacctggaccaatacgataaccatcagagtaacaactatattgatccataaaccgctctgtgtagttttctttaccctttctatatttcgggcccccatattctgtccggccatagcagttaccgcctgccctatggcccagcacggcatacccgcaaaggtattcactttcaacccaattccggaagccgccgccactgaaacgccaaaagtatttaacatgcctgtgatcagcatatatgaaatgtttacaactatcatttgaacagctgtcggcaggccaatttttaaaatgacaatcagtttgtctttgtgaatcatgaaacttttcaacttgaaatcgaatataaaattttttctcttcaaatacaacacagaaaggatcaaggaaatcccttgcgaaaaaatagttgcatatgctgctccctttgttcccataccaaaagggcccaccaaaagtaaatctaaaatgatattaactgctgccgccaccgccacaaagtaaagcggagttttggaatccccgaatcccttcataagtgagcaaaccgcgttatagccaaaaacgaataccgttcccatgcagatgatctgcatatagctacatgcatcatccatggcctccgaagggacattaagaagcgaaaggaccggtgaatacagcagcaaacttatcactgtaacaatgagcgaagcaataaacgctaagctgaaaagagttccaacagtatccttctgtccctgtttatcatcagcgcccacatattgggctgctaaaacagtccctcccattatcactccaatacaaatcgaattgatgataaaactgatcattgaggcattactgatcgcggcaagcccggcctttcccacaatacggcccacaaccaacatatccacaatactataaaatgactgcaatagatttgctccaagcagaggaaatgcaaactgtatcagcttttttggtacatttcctactgttaaatcctgttcgttattttccatttgaaattctcctttcaaaaataaaagcggaggtacccatctacccacaggcaggccctccgcttccgatgcttcgtccattggacgcaagcaatataattacagacaacaaaaagccgcagacaaaacattgtctacggccgaaaattcaatcatttaagctcataaaaaggtgtgttaaatagactctcagaccaacacaagctgatctagaagccacccctcaaaaactcattttttagattaggctctacacaatgtcttgttctaaatgattgtgtaaagcaaaatccaatacaaaactttccaaataacattgcactcgccccttcctatgcttgttattagtttcattatagagaaagcagaccagcttgtcaaacatcagaataatgtagtcctatccgaataaatagtatgaaagaagctttatttttgttatgagttatttaccactatttccgtcgcgcttttaaaatgcgctcctccaatagtggtaaataactatcgtaggtggcgccttttgtcttgcaacagccatctccagcagacattacgtccattttcaccagttcggaggccttgcattcgaagggtatgagatacgggatacccttttggatatactattatagaagaattaagaaagaaggaatcccaatggaaaaagactattttaaggatcgtacgaaagaatcaacatcttataatgcaattcatattggaagtaatgtatttatatgtaccaaagacaagcagagaacagcaaaaaccattgatgatctgcatttggtaaaagtgacagctcatttaacgaaacaggccattcatcccagaggccagaaggttaaaggtgtcgacacttcaacaggaaaaacattggttggaagagttgtctatcttacagagaacgggaatcgtatcatcacaaaaaatgggaacttaacagtttctgaatggtatgatgttcataagaatgatctttagcgatcactttattgcctccttttctataagaaatgatcttctataagctggattctaaaatcagcttatagaagcagattaggcctttagtcaattctctatattgtttaaaaatctattgtctcttctcatagagacacatatattttcttgaagcttcgtatacttcttttttagttttaaaatcaatgattaagtatcttgcaccttgtacatatgtaagatataaatttgtaatctcattccaacaaatctttcctataaaaccattactacgaaaataactctctataccttctgcatctaatttaataatgggtttggtcgtttgctttttgtaaccatataaatataatatcagtatcagcatggatacaataagaagaatccatccaaccaatcttaaaccgagaggatttccagtaaggaatcgacccggcccattaatatgatattccgctaactcttcattgctgttacttaatataaaaaatccgcccaacataaatgctaaagttatcaaagtaaaactcttatactttttttatcgttgtaaatgagatagattttgtgactggttttagactctaaagatgtaccacaccattcacaatacaaagcatcttctacactttctttcccgcacttcggacaaatcaatttttctccctccgaattcttttttgtcgtaattatattataacatatgatttggatatagaaaaaggctggatatggatgatagtaatttttaataacttcctttctcttttggttcagaccaatgtttttaagccattccttagatccttgccttcttaattcttagaatatcgaaaagagattttcttttgtaaccctaaaaatctattttaactatgggatgcagatagacgccattccctctgcagtatataataatttaaagaaaaatcattagaagtgagaactatgcagaaatattaatggattttatagaggcgtattggaattattatcggattcaataactttgctaaaaaaactttcttagtcttctacacaattttaacttaattgctatactttccttaaattacgacttaattataccatcattaacccatgatttgaaccatttaactcatcgctttcagcttcttccaaaagggatcttaccaaagaatccataaaaatcacagtttttatcatgctaagtatgaaggaggaaaaagccgacaacgatttttatcttttacgatgaataatactaccggatgcctaaatatgaattggttacctaagcgatagcgacctttataggaaaggttcccatccttctttttttgacccaaaatgcttttcctcttatttaagatatagtaagtgtctgcttaacccaagtgtaacatataagtaacatacgaaaatgattttgcagttttttatatagttccttccatgtatttacacaaaaaggaatggcccaaaaccacggttttaagccattccttgatactttttttatcttttatttagaacttaccttctttagcagcttcttcaatcgcaactgcaactgcaacggttgcacctaccatcgggttgttacccattccgatcagacccatcatctcaacgtgagccggtacggaagaagatccggcgaactgtgcatcagagtgcatacgtcccatagtatctgtcataccataagaagccggtcctgcagccatgttatccggatggagtgtacggcctgtaccaccgccggatgcaactgagaagtattttttaccctgctcgatacattcttttttatatgtacctgctacaggatgctggaaacgagtagggttagtagagtttcctgtgatagaaacgtcaacgccttctttgtgcatgattgcaacaccctctgttacatcatttgcaccatagcagttaaccttagctcttaatccttcagaataagacttcttaaatacttcttctactttacctgtagaatagtccatcttagtttcaacatatgtaaatccattgattctggagatgatctgtgcggcatcttttccaagtccgtttaagataacccttaaaggtttctgacgtactttgtttgctttctcggcaataccgatggcaccttccgctgccgcaaaagactcatgtcctgctaagaatgcaaaacattctgtctcttcttccaaaagcattttacctaagttaccgtgtccaagacctacttttctctgttccgcaacagatccagggatacagaatgcctgaagtccctcaccgattgcagcagcagcgtcagcagctcttgtgcagccttttttgattgcaatagcggcacctactgtataggcccattttgcgttctcaaaacagatcggctggatgccttctacctgagaataaacatctaatcctgcagcttttgtaacttcagcagcttcttcaatagaattaataccatattcttttaatacagcaagaatttgtttttctcttctctcatatgattcaaataaagccatgttcgttacctcctattgttttcttgggtcaatgattttagcagcatcatctactctgccgtactgaccttttgctttgtctaaagctgtctgagcgtcatcgcctgctttgatgaagtccatcatcttaccaaagctgacaaactggtatccgatgatctggtcttcttcgtccagagcgattcctgtaacatatccttcagccatttcaaggtaacgaggtccttttttcaatgttccgtacattgtaccaacctgagatcttaacccttttcctaaatcttcaaggcctgcaccgattggaagcccgtcctcagagaatgcactctgtgttcttccgtatacaatctgcaaaaacagttctctcatcgctgtattgatagcatcgcatactaagtcagtatttaatgcttctaaaattgttcttcccggtaaaatctcagatgccatagcagctgagtgagtcataccagagcatccgatagtctctactaatgcttcctggataattccttcttttacgttcagagttaacttacatcccccctgctgaggtgcgcaccatccaataccgtgagtcagtccagaaatatcagttacgttctttgcactgatccatttcgcttcttcagggattggagcagctccgtggtttacaccctgagctacagtacacatttgttctacttcatgtgaataaatcatgttgaaactcctttcagtgaataaataataaacattccacactcatatgtaagtaatgtttttaagctcatttgctctagtttattttatcatattgttaaaattaaaacaagaaattatctcaataactttgttatgttttgtaatttttcgcggaaattattttaggacaataatcttggaaaaccgttttcgccgagcatcccaagcatagccctgtattctgttttcatgttctgatagatgtctgacaggtaaacaccgttggcattaatttgatccatcaatgtatcataattggaaacaactgcctccgtaacttccgggcatatcttgtttctctctgccatgtcgtttaagatcttgatagtctgttctttggagaacacctgcttataacttcgctttcgtataagagcgctgacaatgtctgccacggcgcagatcctctcctccttagaaaggtcttccccatgaagccccagagggtagcctgacccgtctaatttttcatgatgtctgactgcgatcctatagatgtctgggtgaacatactcctccaggatctttccgctctccaccacatgctgcttcatgatctcaaactcttccggtgtcagagctcccggtttttcaagaatttccaccggagtggaaaccttgcccacatcgtgtaggagcgcaccgtaataaagacacttcttctgactgtctgtaagctccattacatccgctatggccatactggcgtttaccgtagtaattgtatgcagcaccataaattcgcttctgaaatcgatagagtaggcaagcatctcaagataagtgcgctgttctttctcggaaaactgcatctgttccacgcgctcttcgatctcatccaaaaaccgttcggaagtgagctggtccctgatgtgctttttctcatctgcggcgatcagcagttccactgcttctgcagaaaatacagttcccttcttctgtctgatttcatgctttatctctgatttcatctgccataattggtctgcccggtccgccaggtgaataatatccgcaaaaagcaaggaattcccggtgacaccgttatcttttaggcatttgtagtcagcgtgatggtataataccgcctccacatagtcatccagcggtgcgaacatcttaaggaacagacttccataaatagaatgttcccacacgtttcctgactcaaactttacaatacagtcaatctcttctgtcttatatgccccgatatcgtggatcaggcaggtcagaaggatattcttgaccacgtcctttggaagttccctcccactctcttctaaaatctgaagtgcaatgtaggcaacccgctctccgtgctctatgagacggggatccacccggtttaatgtcctcttgataatcccccagacatttttgcttctgatcgcatacataaaattctatccccttttatcccttcttttctctctctaattttgatttattttaaaagcttcttgatctttgaaaatgtcttatcactgactgtgtaaaagtcctggcttcctgacttgtctgtaatacataattccttgctgtctgaaagagacagtgtcgtcaccgtgccctgagtgtagaaacggtattctgtccatttggaggcatcatgctttcctttcgctttgtccgctttctccaaaagatttgctgtcttgatggcagtgtcattaaactttaaatccttatccgtgacgatcaacgctgcgtccttcatcctgtcaatggatgaggcatatcttttttcattttctgcgtcgattaatccatctccgatcacacttgcattgtcaaaacaatacacattttcagggattgagtcaaatacaatgtagctgttgccgtaaaccttaaattcgtaggtcgtattatcttcatcaattaacgcataagaataaatgctgcctgagtaattttcccttaagtcagtaaccgtaaggccgatgatccggtaagcatttttgacgatatttttcacatagctgcagacaggttcattggtgacagcgaagcttttaaattgttttcctttttgaatccggacaaagtccgtcttggaaatggtgcttccttccacttcttttttatacgaggctaacttctgatcgccggtatactcatggatctctttgatctttttgtccagtgaatcttccctggctcttgatttttttaagtcctgggtcagcttttcattctggtcctggagcttctgatagtattctgattcaatgatttcctgtttggatgctttcccgcatgcggaaagcgcaaaagaaacgcagattaaaagcgacagcgtcatcattctttttctcatgctgtgaaatcctttctttgtcttattgtttctgggcgatctcccctgcttttttataaatactgttttcctctatataacctcttaccatggaaagtgggtaaatgttcgtgttagctcccacgatagagcctggatttaaaacagtaccgcatcccacctctacatggtcacccaggatggcacctattttctttcttccggtctcaatcttctcctccccgcacttgatcactacgtttgtcttgtcggacttcacattggaggtgatggaacctgcacccatgtgggatttatatcccaaaatagaatcccctacgtaattataatgcggaacctgtacatgattaaacaagatatcatttttaatctctgtggaatttcccaccacacagttttccccgatcagcgcattgccccggataaaagctcccggccttacctctgtgcctgccccgatgatggtcggtccgttgatctccgcggtccttgcaactgtagctgactttgcgatccacacatcatctccgatctgttcgaattcttctttagaaagcgttggccctgtctttaagataaaatcaccgatcagtgccagaacctcccatggatatgtagtctgctcaaatagttcctttgcgatggtctggtccatatctttaaaaatttgctgatttgtcagttgtttcaatttcattcacctttccctttcttggtattataatactgagcggtctgatcaaacatctggcgcagtacatactgatgattggtctttttcactaaatctgtatgcttcgccacaaaatgattcagcttcttcatatattcttcttcgctgaccgtgccctccgccacataggtaagacccttctcccagctggctgtcagctccggattcagaagggattgaatggatcccctgactacgtcaaagatcatctcccccataagtgtgggcgtcaccgtctgcgtctttttgttcagtgcaatgtacttgttattaatcagtttcttgacgatctcagcccgtgtggcactggtgccgatgccgcttcccttgatctgtgccctcagatcctcatcttcgatcagctgcccggcattctccatggcaaggattagggatccggaattatagcgcttcggcggtgttgtggttccatccttgatcagatgctttttaatcggaagcttcattccctttttcagggaaagaatggcgtcaatctgttcttttgaaacagaatcttcctttttggcttcttttccgccggctaccgtaagatatccgggatccacaagcagcttaaagttagccgtgaaggtttcgcctgctgtttttgtaacaagctttatcttagaatatacagccggaggcagaaagatacatagaaaccgccggacaatcacttcatacaccttttgtccggtctgcgagatactttttaaattgttcagggcctgtcctgtaggaataatggcataatggtctgtgatctttttatcatccacatacctggttttggcaagccccgtgtaggactttttttccaggatgtccgctgccgtttccgacaagatcccataattctttaagcctgatagatttttatagatttccttgctgacggccgtggacaagaccctcgcgtcggtccttggataagtgaccagctttttttcatacagctcttgtacgatttttaaggtctcatcagggcttagcttaaacatcttagagcattgattctgaagctctgcaagattgtataaaagcggcggattctttttctcctggcgttttgtggaagcttccacgaccgtctccatgccggatgcttcctcaatctcttttataaaggcttgtgcgtcctcttttttcagaaaaccgttgtccttgtataatttctttgattcaaaatacctggatcctttgaccgccttccactcggactcgattttaacaccctgaggtgtgatatgagagagcaccttataaaacggtgtgggcacgaagcccctgatctctctttctcttttgacgatcatcccgagaacgcaggtcataacccgtcccactgccaccacgacacttctcttctgcttcataaagtttcccagcgtccatccatactttaatgtcaaaaccctggagaaattgatccccatcaaatagtcttccttggctcttaaatacgcggcagacgccaggttatcatactcatctaagtctttggcctcccgaacaccccggagtacctcctcctttgtctgggagtcaatccagaccctcttcttccgctttcccgtcacgtgggcttcctggtccaccagccggtagatatattccccttcccgtccggagtcagtacaaacatagatggtatcgatatcttccctgttcagaagggaactcacgatgtcatactgcttcttcaccgccgggatgatctcgtacttaaaatcttcaggaagaaacggcagtgtttccagttcccagcgtttcagctttggatcatacttgtccggatatgacatagtgaccaggtgacccacgcaccatgtgatcacagtattttcactctcaagatatccgtctctgctggacggttttaggtctaatgcgttggcaaattctctcgccacacttggtttttcggtaataaataatgacttcaaacgtaatcctgctttcatttttttcttttgctattataccatatttaagtctcctgtgatacaataatatccagagataaaatcagcaaaggagtgtgtttgatatgagtatggaaaaagcaaatgaagtaactgcggcaacaattatcaagaacatggaaaaaagaaacttcacaggggtttactgtgctacaaaagaagaagctttagaacaggctttatcctacatagaaaagggatcagtcgtttcatggggaggctccatgagtgttgcagagatcggccttttggatgccgtaaagaattctgccgattatgaagtggtagaccgggcggcagccaagaactatgaggaacagcgtcagatttatgccaaagccgttctggcggatacttatcttatgagtacaaatgccatcaccctggaaggagaactgatcaatattgacggttccggaaaccgggttggatgcttaagctacggtcctagacaggtaatcctgattgtcggaatgaataaggtcgtaagcaccgtagaagagggtgtgcaccgcacaagaagcaaagctgcctgtccaaataccatccgtctggggcttacgaccccttgttccatcaccggacactgcggagaatgttatggtgattcttccatctgttcccacctgctgatcacaagaagatgcggacagaaagaccgtattaagatcatcttagtaggggaagatctgggatattaaatccttaagaccgcggtgtatgaccaaattagacacaccgcgggttctttttttattcctttaaaatgtctggactgatgtccctgaaatcttgtataactcctgttactcccggaagtaagcgcagtctcttatgctcctccttgggcccaatggctatgatctttccagcccccgctctccttgcggcttcaattcccgcatccgcatcttcaaagacaacacattgggaaggcttaaggccgatcctctccatggccagcagatagatatccggctccggtttccccaaaaaggtcccgtcatcgtacacgatattttcaacagggacccagtggtccagatgcatatgctttatgtaaaaacggacatttccgatagctgaggccgtggcgatggcaaacggaatcttcctctccttcagctccgtgagaaattccggaagcccctgcgtgaaattcatcccttccgggtcattcagacacatattacggtaaatatcttccttctcttccgtcagcttataaatctcatcctcggtaagttccggatttaaagccatcttcaacagctctcctccgttgacaccatggatcatttcatgcagctgtttcaccgtatatttcccttctgcatatttctgaaagaattcaaaccatgcggcctcctgtttgtctccgtcaatatacatagttccgttaaagtcaaatataattccttttaagtccattttttcttcctatctttcattttttattttctggtaatctttctgcctgtattggatagaaaagtctttgttggatatctgcagacagattaaatcctcatgcgctgtggctccgtgctctgcgatacacccttcctcataccataccatggtgcccggcccaaagtactcatcatttgatttcagctgccctgacaaaacaaacaagccatgggcggaaggatgggtatgggtatctgtagtgaatcccgctggataattgatgtagttgatctgcattccggttgcctcatccaaatgcagttgtttttttccgaacatctttccggttgtgcttgccatgcggtaaaaccacggcattcttcccacgtcgctaataaccggctggattcctttgtccagccgtttcttttcttcctcatcctttatgtaatgaatcgaaaaggccttgttggagatcaagagcaccgtggcatcatcatgctgggtggcgccgtgttcggcaacacatccttccggataccagataagggtctccggcccgtaaacactgccgtttgttttgatctgtccctccagaatataaagtccatggccacacgggtgggtatgggtcaccgtctgaaaacctgcaggatagcggttcataacgatgctgacttccatatccttatcctctaccagtggtttttgtccaaatacttttccggtgactgaattagggcggtaattccactccatccgccggacgtccatgatttgttgttctttcattgattccctccttaaatgcaaatttatagttccatctctctcaactggttaagtcttatcttttcataatactccatggcaagataggccgctccgagcatactctcatttccggtattctttgattcacaaattatggtttccttcagcaggtcctgatttaaaatatcctgcctctttaaggcttcatcaagcagcataggcaggtccctcaccgtccttccccccaaaaggatgatctctggattgttccagaccatcatatcctggatcagaagcgctgtgtatcctccaaggcgggtcatcagttcttgtgcccaaggttccttccggtcatatgcagctgcaagatccgtaaggtcattacaccgtcctccagcttcctctgcctggtttaaaatttcctggacagagaggtaagctgagacacagccggatttttcgcagctgcacttccgtccgccgtaaaccaaaatcttatgggcaatctccccgcaggctccccctatgatcctgccttcgttcataaacgctgctcccacatcaatgctcaggcttaaaaatgccagacggtttacctgcagttccggaaaatgaaagtattcctccaggacagatgccttcacatcattttccagacagatatacaaacccgttttctttctgagaagttcttggaagtctgtctcttcccaaccggtgaacctggatcttataatacgtctgccgtcttccgagaccacccccgggaaactcactccggctgcttttactctgtccatgatttccggaatctctgatctgcatttgtcaaaacaatctttgatcagctccgctacttcttccgggcttccggccacaggcagcatccatttttttatggcgaggatctgctctttgtaatccatgaccagaaaacttataaaatccaggcgtaccaggataccaaggctgtaaaaggcatggggatttctttccagtaacaatgcttttcttccgacgcccttggaatctccctgggattctttaataaaacccagatctgacaggtccccacagatcctggtcatgctggtaggactcatttttaattccttggccagagaggcccgggaaacattgtcagatgacttgatttggttgagtaccagctgacggttgctgatcttcatctgcagctggtcttgttgtttttgatttttcatattattttctccactggtgttattaattatattataagagaagtcccatctgttgtcaatgccataaaaagaagcgccagaaatcacattggatgactggcgcttctttttatactgctctgcttagtttactcatataaaggatatttttctgtcagttcttttaccagctgttttgcctcttcaagcttctggtctaagagtgtgaaacggatagcctttgcgatggctgccatatcctcttcttttaatcctctggttgtcacagccggtgttccgagacggagtcctgatgtgacgaacggggatttcggatcgtttggtactgtatttttattacatgtgatatggacagaatctaaaaccttttctgcctcttttccggtcaaatcatattttttaagatctaccagcatcaaatgattgtctgttccgccggatacgatgtcaaatccttcttccatcaatgcttttgcaagtgctgccgcatttttgactacctgttttccgtagtccttgaagtcatcagacaatgcctctttaaagcatactgcttttccagcgatcacatgcatcagcggaccgccctggatgcctggaaaaatagctttgttgaaattatatttttcattgatctcattgctgcacaggatcatgccgccgcgaggacctctcaatgtcttatgggtagttgtggttgtcacatgagcataagggatcgggctctggtgcacgcctgctgccaccaatcctgcgatatgtgccatatccaccatgagtacagctccgacttcgtcagcgatctcacgaaacttcttaaaatcaatggatcttgcgtatgcactggcacctgcgatgatcagcttcggcttacattcctttgcgatctcaagtacattatcgtagtcaaggaatccctcatcgttgacaccgtaaggtacacagttgtagtattttcctgacatattgacagggcttccgtgggataaatgtccgccgtggtccaggctcattcccatataagtatctcccggatttaagacagcgaaaaatactgccatgttagcctgggctccggagtggggctgaacattgacatattcacagccaaacaattcttttgcgcgttctctggccagattttctaccacatccacgaactcacaaccgccgtaatatctctttccaggatacccttccgcatatttgttggtcagatgactgcccatggctgccatgactgcttttgatactaaattctcagaagcaatcagctccagattatttctctgtctggataactcgtcctgcattgccccggcaacttcaggatcataattcttcacttcgttaaaatcgaacatctctgtgtcctcctattatatttatatgttaatcttggaattgttcctttaacgcttccacagctgtttccacacggctttctctgatcaggactgtgatcttgatctcggatgtatagatcatatggatgttgacgcctttgttataaagggcttcaaacattttagatgctgcccctgagtttgacatcattcccgcaccaacgatggagacgatccctacgtttttgtcggagacgatttctttgtatgagtcttcctcaaatgtttccttcaaagtctccacagccgcatcagcatctgactttttcacaacaaaggaaatatccttgctgtcttttcttccgatggactgtaggatcaattctacattgatccctttgtctgcgatggcagtgaacagttttgccgcaatgcccggttcatgctttaatcccttgatcgccacctgtgcaacatctgtgtttgacaacacgccgctaaataacattttctccataatctgcttctccttattcctcgttcgtatcgttttcctttatttcgattccaagctcatcaagctgcactgtgaccactccgcccggtgcctgtgtcatcagacaggaagcatcttttaccttcgggaatgcaataacgtcacggatgctgtcctcgccggtcatccacatgacaagacggtccaggccgtacgccaggcctgcatgaggcggcaccccgtactggaaagcctccaggaggaatccaaaccgttcattggcatcttcttctgtaaatccaagagatttaaacattgccttctggatgtcatcacggtggattctgacggaacctccgcccagctctgtaccattcagtacaatatcgtaagctttggctctgaccttacccggatccgtgtcaatgtactcaagatcttcttccatcggcatagtaaacggatgatgcatggctgtatagcggttctgttcttcgttccattccagaagagggaattctgtcacccaaaggaaattgtatagggattcatcgatcatatcatacttcttaccgatctccagacggagattgccaaggacatcatagaccacagagtccttgtccgcagcaaataagagcagatcccccggctttccttccatggcgtcgatcagcgccgtcatttcctcttctttcataaacttggcgaaggaggattttacacttccgtcctcttttaactggatataggcaagacccttggcaccgaattccttggcgaaatccacaaaggcgtcaatctttttacggcccagatctccgagtcccctggcgtttaatcctctaacggaacctccgttttccagtgcccctttaaagaccataaagtcacagccggaaactgtttccgatacattgaccagttccattccaaaccttgtatccggcttgtcagaaccaaacctgtccatggcttcctgataggtgagacgcttcatggggatctgtacatccacgttaagcacgtccttaaacactctcttaagcagccgttcattgacatcgatcacgtcatccacgtccacaaaggacagctccatatcaatctgtgtaaattcaggctggcggtctgcccttaaatcttcatcccggaagcatttagcgatctgatagtagcggtctacgccggaacacatcaagagctgcttaaacagctgcggtgactgtggaagcccatagaaactgcccggatgtacacggctcggcaccagatagtccctggccccctctggcgtactttttccaaggattggggtttctatctccagaaatccttcttctgccaaaaagtctctcgctgtctttgtgacctggctgcggatcagaagattcttctgaaggttcggccttcttaaatccaggtagcggtatttaaggcgcagctcatccttgactgtctgttgatcatctacaggaaacggcggtgttttggactcagaaaggatccttaacttggttaccttgatctctatatcccctgtttttaaattttcattgatcgcggcgcttcgtttctgcacttctccttctgccgcgatcacgtattcgttccgcagggaattggctttttcataatcgtcgtctgccaatgtatcttcatcaaaaaccagctgcagcaatcctgagcggtctcttaaatcaacaaatataagacttcctaaatttcttctcttctgtacccatcccatgacggttactttctcaccgatattttcacggctcacttctgtacacctgtggctgcgtgatagcccggccattgactctgccatgttgcttcctccttacatatattaaacctgtttgtcattatatcataaggaatggttgaatttcaatgaaacttatgagttatttaccactgtctccgtcgcacttttaaaatgcgctcctccagcaatggtaaataacttccgaaggctgctcctttttctttcccagttactttattcaatagaaaaaagagcagtatctgccacccaacaattgtttcttaaattctgtacttttaaagaaaaatgcattataatggtaaatacataaaaaaggaggcaagtaacatgagtgaatatgcaattgttgcaccagaggattttgaccagagtgccttccgcctgattgggaaggactggatgctggtaaccgccaaaaacagcgagggcaagatcaacacgatgaccgcatcctggggtggattcggagtcatgtggggcaaggacgtagcattgtctgtgatccgtccgcagcgctatacaaaagaatttatcgataattctgatactttttccctgtcattttatgacgaggcctttaagaaggatctgacttatcttggaagtgtgtccggacggaccgaagataaaatctcaaagacaaggctgactccaaccgatgccaacggaattccgtattttgaggaagcaaagatcgtcctgatgtgtaaaaagctgttttgccagcccatggacccggaagggttcataggagacgcaaaggcactggatgcacagtggtacgcagataaagattaccatactttatatgtggcagagatcgaacagatcctcgtaaaacaagattaaaacaataaaatccgatggaaaccgtcaggtctccatcggattttatatttatgtcataagaaattcctagttcttatatctgacaaactttatgagggttcaggatattttttggatcaaaggctgctttgattcccctcatgatgttcatggtttcttcctcaagggattcattgagataaggttttttggcatatccgatcccatgttcaccggacacctggccgtttaattcagctgccttctggtaaatcttatccatagccatcttcatccgttcctcccactgctcatcggtgagatcgtcctttaaaatataggcatggaggttaccgtctcctgcatgaccgaaactcttgatcctgatatctacctcatgatgaaggttgtgcatatactcgaccatctcactaatcttatttctcggaactaccacatctacctcatccatgtaggttgtggatcccttaatcgcctccaaaaatgcccccctggctttccagatggattcgtctctctcctccgtatcggagatgagcacatccaacgccccctggcttaaacagagctttgcgaccttatcataatcggcctcgatctcttccgctgaatttccgtcaaacttcagcagcaagtaggcatccgcctgatggtcaggaaatttcttacccagatactcctccgcgtcctcgatgacttccctctgcataaactcaatagccgtagggatcgacttagacttaatgatttccggcaccgtttgtatcgctgagttgagatctttaaaaggtatcaggaggctgatggcttttttcggaagcgggagcagctttaagacagctttcgtgatgatccccagtgttccttccgaaccgaccattaaatccttcatcgcatatccagagctgttcttaacgatctttccgccgaattccacgatgcttccgttgggcagcaccacttccaggccacggacataatcccttgtcactccgtacttcaccgccctcattccaccggcgtttgtactgatatttcctccgatggtggcagatttttcacctggatccggcgggtagaagaaatcgtgttcctccacaaaagcggataattccatcaagagcactcccggctctactgtgaccgtcagattttcttcgtccagctccaggatctggttcatgagactcgtatcaatcatgatgccatgttccattgccacggaagatcccaccaatccagtgcccgctcctcttggggtgacagggatcgtatgctcataggcataagacatgatctttgagatttcctgggcatttgcggctttcactaccacatcgggataactctgagtgccggagagctcatcatggctgtactcctcattgatatgttccccggacaaaatcctctcgtcatcgttgattacttgttttatgtattccagatctttctcatctaattttttataatccatagttatgccccctgacttactttgattttttctatgaactgaggaatgatttcatataaatctcccaccaggccgtagtgtgctactttaaatatagaagctttctcatctttgttgatagcaatgatctgatccgaatggtccattccggcaacaaactgaatggctccggacacgccacaggtaatcatcagtttcggccggacggtccggccgcttaagcctacctgctttttggcgtccagccatccgttttctgccacgggccttgtacatgccacctgtccgccgagcaggtcagccagttccgtcagcatcaaaagatcctcttcttttttgacacctcggcctgccaccacaagcacatcggcagattcaatgaatttttccttttcctttaacacaatgtccagtacttccacattggtctgaagttttggtttgtcaatggaacattctatgatctctccgtgtgcctcttccatccgttctggggcattcatcaccttgtagcgcactgtcgccatttgaggacggtggtttggcgtggtgatatgggccatgatatttccaccgaaagccgggcgtatctgggagagatctgtattttcgttcatctcaaggatcgtacagtccgccgtaagacctgtcttcattcttgcggctaccctcggagccagctgtctgcccacggttgtggcacctactaaaatagctgacggatgctgtttctgtataaaatcctcaaacactgcagtgtacggctcgatcttaaaccggtttagttccgggtcgtcatacaagaatacctgatcgactccatagtgaagcagctcttcgctttcttccctgattccgcttccgatgaacagtgcatacacaggatgggagatcttcctggccagctctctggccttcccaatcagttcataagtcaccgggtggatctttccgtccacatgatccacatagactacgattccgttccaggcagatttgtcgatctcctctttcttctggtcctccacgtaggttactgctccttcgggccctttctttacgcacagcttacacatcttgcaggctgaattgatctccagttttccgtccttttcttccatggccccaaacggacagagcttgatcatctctccaagatcatttattttttcctggttaattactaactttgccatatatattccctcctaaatgagtgcttttacagctatctacgccgcactttaaaataacatctttatttgacagtttgtctgctttcgtaggattcttagaaacaagaggcacctttcttttgacagaatcccttctccagcagatattacctccattttctacatgattggagtgaggcattctaagagctgaacggaaatcatgtggaaaatgtcatataaatttcagttcttttactttgtgaaacagcttttctgaaagaatactgctctcctcgttccacagttccctatggtggtttgtttccggagggaaaatcttttggacctgtgtaggtgaaccattcaatccgtaatgagtttcatcctggtcatccatgtcatccagactgagcataacgatttccgtatctgctttttccatttttctcacataagatggaagtcttggctgaaaaatgtccttatccactgctaagagacatggatatgtaattctggtgatctcaatgtcatccggcatatccatctcgactgtgatattctgctcattagcctcggtaatcttccggacattggatacgcttgggatgccaagccattcagaaatttccggaccgacctgggctgtatctccgtccgtggtctgctttccgcaaaggatcaggtcaaaatctcccatttttttgattccctgtgccagagtgtagcttgttgccagcacatcggctcccccgaatctccggtcagaaatcagtgccccatggtctgctcccatggcataggcttcccggatcacctgtgctgcctgaggaggccccatggtaatcacactgacacttcctcccagttcttcttttaacttcattgcggtctctatggcatagagatcataagggttcatcttggatgccgcgccgtttctcttcaggacaccagtcttaggatctacttccaccttgttggactccggtacctgcttgatacaaactaaaatattcatatcttcgttcctcctgccttcacgattggtcctaccaatcgtctgaaaaataattggaaatgattgttcatctccaggttccttgttttgtgtattggccctaccaatttatattcattataaacgtatttgtattttccgtctagtattatttttaaattccattatttttggtcatattgcacaaattatctagctttcattcgctccaaggtcttgttgataatgtcaaagtggtcctcgattgctcttcttccgccttccagattcttttcgatcatacattttgcaatctctttatgagtctgctgaagcttttctttgttgtcatccttaaagatctcccgcctcatatctgtgatataggtgtccaaaacatcggacaatgcctgtaaaatatcaataatcaaaacattgcgggaagcctttgctatggcgtaatgaatttttttgtcccagatcacacattcttcctcggttttgcctctgtccaaatttgagatatactcaccgatcctctggatctcctcctcgctgatgttgtccacggccagaacaaaggcctccatctccagcgcaaaacgcagctgtgtgatggaaccgtagtccagtttgtgcagaataaacatcatagacatggattccaccagattcttttcaaagttacaggaaacataattccccgcaccctgttggcttgagataaaacccatcatctcgagcatgtggatcgcctcgcgtacagaattccggctgacgccaaggttctctgaaatttctctctccggaggcagtttctccccaatggtcagatcatgattgatgatctgtttcttaatgtgctctatcaccttttcatatgcttttccctgctgcatctctatccctctttctatgaatacacttggagaaaattatacctttcaggtatcccgaaatcaagggaatttgtattatttccggctttttcatcagatttctgtctcttcctggctaaatatcatgtttttggtgtggaaagaagaatccatgacgttttttgaatatcatgatataattgtaaataagtatattagcatacacgctggagatttatgggatggtaataaatatgaaaacatttgaatttgacggagagaaatataaaaaggcttcaaagcaccaaaaagaatggggcaataacctaattgacgaattgtctttaactggtgatgaggaaatacttgatttaggctgcggagatggcggtttaaccgaacagctggctcaatccgtacctagaggaagagttttgggaattgacgcttcagcgggaatgattgctgctgcccaaaaccggctgaagtcaaatttagtgtttatgcaaatggatattaacacaatcgattttcagaataggttcgatgttatattttcaaatgcagctctacattgggttaagaaccatgaaagacttttaagtaatgcttttagagcattaaaagagaacggcttactcttatgggattttgcaggtgatgggaattgttctaatttttttgaagtcatgcgagaaacaattcatagtaaaaaatacaaaccatattttcgaaactttgaatggccttggtatatgccgacgaaaaatatttatgaaaaaatcatagcagcttctggttttactacatacagtattacagaaataaaccgggataggttttttgcaagtgcggatgaaatgataaaatggatagaccagccgagtatcgtaccctttataagcaatatcccagaggaaatgaaaatggaatttcgagatgatgtcattcaatcaatgataaaaaagacattacagccagatgctgcttgctttgaaacgtttcggcgtatccatgtaaaagcaagcaaaaattgatgaggtgaaaagatgataacaggatactattgcaccaatattttttctgagcacgcaaaagaactaattgagttttatacactaaaattgggaatccccattatgaaaactgatgatgataatacaaatggggtttacctcggttttatcgaacatgctcccactctttgtatatgggattgcaaaaaatgtaatgtacagccgacgggacatcagtcctttgtttttcaaacccaaaatcttgatttaacaatggaagatctaacggaaaaagggcttacattgtccgaagccattcggtatgattggggaacctatgaagttcgctttaacgatcttgacggaaacgaagtcgtgatcgcagaatttgtgtaattgtcaaattttaaatatcacaaacaatcgggaaagaattatgaattatattattagagagataaaacaaaacgagattaatcttctagataattttctatatgaagcaatctttattccaaatggagtacagccgccgccgaaagacattataaagcagccagagctgcaagtatatatatctttgtttgggaaaagaatcggcgattacggttttgtcgcagaagtagatcatgaagttgttggtgctgtatgggtacggatcatggatgattatggtcatgtagatgataaaactccatcatttgctatttcaatttataaaggatatagaggttatgggatcggtacagatctaatgaaaagaatgcttgaactattaaagaaaaacggatataaacagacttccttggcagttcaaaaatcaaattatgctgtaaaaatgtataaggatttaggtttttacacgattgctgaaaatgatgaagaatatataatgatttgcaaactttaagatgataaaaatattcacagaagttatataaaaggatggagaggtataaatgaaagaaatcatcaactttattgagacgaatgtggatggcaaaacgctgtttacaaaggaattagtttacgaactggaaaacggtgcgttacagggcgtttactctgatcaaatatccttttctaatctaaaatactcccagagtggatttcagtttgatatgtttattatatccaatgaaaagatatggctcataggaaaggatgaacatcgggagaaactaagaaaagattttagtgctgtatccctattccgatttgagctggcaaagagaaaaagcacgaacgatattactggatgttttcgtttcatttcagcgtcaggaaaaagtgtggcggcagaggctatcgtaagtggtatttatgatgtgcggcttgaagatgatgtgctgaaattatcagaaagccaggcattgtaccgagatcagccgatacaggaagagcgcttcaagccagttgcatttcagtcagaacatcgtttttatgtcaaagaggaaaagctacactatgaatacgatggcaaatcttttgacgtggatgtagaaaccatgcagcgcaacgatagctatgatacctttcctccatttatttcaattgagaagtaaatattaacatgaggatacctcctgccctggaatactcctgggcaggaggtgcattaagatggtcaatatgcattaagcatagaaacacgctggtttattctgcttcctttctcttcttgatctcttcgatcataacaggaagcacatttactacattgcctacgatgccgatattggccacttcaaaaataggcgcatcttcatctttgttgatggctactatataatcggaattcataattcctgagacatgctgtgttgcgccggaaataccgcaggcgatatagagcttcggcgctacgatctttcctgactgccctacctggtggactctggagatccatccgtcttcgatggcaggtcttgtggctcccaccactccgcccagcagatccgccagttctttcaccatggaaaagttttctttgcttcccataccccgtccgccggacacaatcacctcggcgtcttccaggttgacagtctcggctatttctttgaccacatccttgatgtccagatggatcttttcgtcagaaactgaaatgtttctttcggtgatggtaccctggaccggattttctgcctttttaaaagctccggatcgcagcacggcgatctgcggcacagactcttccaaggccacatcctttaagacacatcccccgtagagaggacaagtataaacaactttcccgtcagcaaacttcatatccatcacatcagagacacagcctgctccaagtcttgccgccagtttcggggcaagatcttttccgtcctgagtgccgccgaccagtaccgcaaacggcttctctttagctgccacggcctccaaaacgtttgtataacggtccagatggaacattttatactgcggatcttcaaccaggataacttcatccgcaccggaagacgccgctttttcggctgcttcccggatcccgtctccaatcatgaccgcaaggacctttcctcccagttccccggcaatttgtctggcgggggagagcatttccaggccgaccttgaccggatttttttccgtggtttcgatataaaccacgatattcttatattctgtcatatccattgtaaactcctccttagaatactttcgcgtctgccatcatggccacagcttttaacgctgaatcctctgctgtctcttcctggattttgattccggcctcttttttcggcggttcatagagcttcagagtttttacaaaggctccggcctcccctgttttttcaggttccagcatggtcagatcttctgcttttaaggttccaatgggctttttccttgccgccattttatttttgatagttgggtatctcggatcataatccggctttgtcacagtgagcacacagggggctactgtttctatcagacggtatccctcctctgtttcctgctttgcggtcacacggccttcagaggagtccacttcaatcacattggtgacaattccgatacccatcatctccgaaaggcttacacctgtctgaccaagggctgcgtccgtggcttcctttccgcagaagatcaagtcaaacttctttcccgtatcttcctctatctttttggccgcacacattaaaatatggctgattcctctggagtccgaaccgtcaaactgatcctcccggaccagatacgcatggtcggctcccactgcgaggcagttttttaatgaattcctggcttcctcaccgccgatgcagagggccgtgatctccccttctctggcttctttcaggcgggctgccatctccagcgcataagtgtcaaacgcgttgaccacaggcgtaatattggaaagatccggttttccttcgtctgtcaaatgtacctccacagaatcatccggcacctgttttacacacactaaaatttccataatcttcactcctttgttcagtcgttttcttatctgccgatggtgttatttgcgatgacgattctctggatctcattgcttccctcaaagatctggaaaatcttcgcgtcgcgcagaagtttctccaccggatattctctgctgtatccgtatcctccgaacatctggatggcttcggatgccacttccattgcaatatcactggcatagcattttgcgatggctgcctctttagaatgtgggagtgagagatccattttggtcagtgcgtgggccaccatctggcgtgctgtctctgtcttgattgccatatctgcgatcttaaactgcagtgcctggttcctgatgatcggttttccgaactggatcctttcttttccgtaggcgatagcttcattaatgcctctctgtgcgattcctgcggcgacacatcccatccatgcccttgcctggtcaagtgtcttcatggcaattccaaaaccttttccttcctggccgatcagatttgctgccgggatcctgcagtcttccagcaccacatcacaagtgttggaagtacggattcccatcttatcttcttcatttccggtgctcagtcccggagttcctgcatccacaaggaacatggagattcctttgacacccttgcttttgtctgtcatagctgtaatacagtaaaaagaagcgataccgccgtttgtgataaagcacttccgtccgtttagtatgtactcatctccatctttgaccgcggttgtcgttcctgccccggcatcagagcctgctcccggctctgtcagacaaaatgccccaaatccgccttctataatctggctgcatacatgctgtttctgttcttcatttcccgcgattaaaaccggttttgttcccagtccgctggcagaaatggtcgtggcaaatcctgcatccgcaatagccatctcctcgatgagagccgccacatccactctggaaagtcctggtccgccgtactcttccggtacctccagggagtgaagctgcatttcgatggctttatcgtaaatctccttcggccattctcctgatttatcaaattctttgcactgttcttttacttcgttttcacagaattctctcacgtcctgcagtaaatcgtttgcttcctctgaaattaaatatgccatgattgatttctcctttatatttgatattgtttctttattttttacagtttatagcagacttttcccggatttaggatcatattcgggtcaaaggtatgttttacaccttccatgatcctcatgctgaccggtcccgcggattctgccagatagtccagttttccgtgcccgatcccgtgttcaccggagatcaggccgccgaactccgtggctttctcatagacctttttcatgaaaacagacacttgtttcctaaactctgcctcttccatgtcattgctgcatgtataaatatgcaggtttccgtctccagcatggccaaagctttttaccctgaagtctgcctctgcctccagcgactttgtatacgtcaggaattccgcgatcttatttgtaggcactaccacatcacattcatccaaaagcactgtatccgcctcgatggcttctaaaagtgcacttctcactgcccatgcgtcacgcttaagtgccggagtatccgctaccaggacatcgatagctccagcctccaacacaacctctgacgcggcttcgataatatcttccagctgctcttctgaatccccgtcaaaggtggccagcagatatgctcccacttccatgccttccattttttttggatagaccttctttccaaggaacttttctgtgtccatgacaacatccttttccatgaactccagcgcctggggatgcagattgttcatgaaaacctggggcactgtggcaatacagtcttccaaagtctcgtaaggaatgatcaggctgatgaccgctttgggctgagggatcacctttaacgtaagctctgtgatcactcccagagttccctcagaaccgatcatcagattcagcaggctgtagccggagctggtcttagataccgtggcaccgaactttacaacctcgcctgtggggagcactaccgtcattgccctgacgtaatcccttgtggtgccgtattttactgctctcatgcctcctgcattggttgccacatttcctcccacggtggcaaatttttctcccggatccggcggatagagaagtccctgcttttcggcatcctctgccagatcatttaaaagaacccccggctggatagttaccacaaagttttctttatcatatcccaggatcttattcatctttgtgatggacagcaagattccgccgtggatgctgacagctcctcctaccagtccagtcctggctccgctcggtgtcacagggatcttgtgctcattgcagagcttcatcactaaagccacttcctccgtggtcaatggctccacaaccgcttccggcattgcctttccgtagattgacatctcatcatgggtaaagtcatcgttgatctcatcccccgtatagacacgcttcggagcaatttccttcagctgatctatgatttcttgtgtcactttgccatattgatattcactcatcttatcctccttgctcaaccttggtttttatttcttacaattaccgcgacaccgtccggtatcacagtgatcttactattttctctgcccagatactcatctgccaaacggatcgcgtcctctacgctgtcggcataatccatctgcatttcctccaccatatccttcggagcctgtgtcaccatgatgaccttatattttaacaagatacggcataagatctgggattcccactggtccggcacggtagagttccggtccgttaaaagaaatctcttcataatcttttctttgtccttttccttggcaaacgtatcatacagttccttgccgccgtgcccgtctatgcagcttgcagccatgatgatcaccccgcccggcctgcaggtggcttccgccgcagtcatacctttgactgactggtaaatattttggtccagaggatagcctccgttggtagaaatgacaatgtcggacggtaccgcatccactccagagagttgatccacgaattgacatcccttttcatgtgctttttcataatgtcctgcgaaagcctcgatgacttttttatcttcatccagaaccacatttacgataaatgcaagtttggcctttcccgccgcgtagatcatatcccggtgaatgggattgccctcaaggattcctgtcctggcatgagcatcatcaatgaactctgaacaatggttagccagcactgtggttctgctggatactccgggaagaacactctttcttccgccggaaaatcctgcaaaaaagtgaggttcaataaatccctccgagatcagaagatcggcctcccaggcaatcctgttgatcaggagttcccctcccgatggaagtgtaccaaggcttaccatatcttcggactttccgctttcatgtaccacgaacctgatggccggatggtccacgatcttctccccaaattttgcgatcagttcttctcttgtggtaggacggtgaaatcctgtggcgatcaaaactgttattttggcatcaggattcccctgcctgatctcctccaatacagccggcatgatcaccttgctcggaaccggacgggtgtggtcgctggcgatcaaaacgatattgtcttttcctctggctaattccctgagccgcggggttcccaccggatgcagcagggcgtccctcacaagctcttcttcccccatcttggcccggtaatcgtgggcttttgacagaaggatgcctgccaggcgctccttcgggatctcaatggttaatttcccttttccgtagggaaggttgattcttttcataagttacctccgtcgaatgttttagatgaaccgaagtcctgtaaatgcaatcactccgtaaagtacaataaacagaatgaagtattttatggatccgttcaggatcttgctctcttttccaactgttccggtggcagctacggcaatggcaatactctggggtgaaatgatctttcctgccgtggaccccaccgtattggccgctgccagccagacatcgttcataccgagggtatgggctgtctggacctgaagtccggtaaacagcacacttgaggatgtggcgcttcccgtcacaaaggttccaatagaaccgatcagcggtgccaccagcggataaaaggaaccggtgactgccacgatcaaggccgcgatgtcgctgatcataccgctgtatcccatcacttttgccgttgccagtacggatacgatggtcagaacagtcttagacatctggatcaaagtatctttcaataccattccgatctctccccaggatgcgccctgtgcttttcctccgatcagagccgccaggaagatcaggactccgggggttgccagccatgtaaaggtatacggggcggctccggcacctgtgtagatctgcacggaactcttcacgcttgccaatgggtcatgaatggcaggaaccaggctggaagtgaccaggaggaaaaccaggatcagcagaaacggaagccacgcggtcacagccttttttaacccaagaggctctttttttgtgagctccgaatcgtttaatccctccaggatatattccgggtcttcttttctcttcaaaagctttgcggaaaggatcgtgaccaccatgctgcacacggagccgatcacaaccgggagctcagcccccacaaactttgctgtgaggtattccgggaggataaaacctaatccggaaagcagtgtgatcaggccgatccccttcagtccctttatggaacctccggtcatgatcatcatcagaaacggagtcaggatcactaagactgccagctgcaggacaacagccactgctacgctccctggatccagtccgctcacggaggctgccgtgatggtcggaattccgatggagccgaatgctgtcggtgttgcattggcaaccagacagaccgtcgccgcaaagattggattaattcccagcccgcataggatacttgccggaatcgcaaccgccgtgccaaacccggccattccctccatgaatcctccgaagccccatgcaatgatgagaatcaggatccgtttgtctctggatacgctggtcagcatccgtttgatcaaatccatatgttttgtatgtactgtcaggttgtaagtaaaaatggccgcaatgatgaccagacagatcggccatattcccatggctgcaccctcaagtgttccggtgagggcatctaaaagcggcattttccaaagaagcagtgctagaactagtgtaatcgcaagtgaaataggacaggctttgtatccaggcatctttaagccacttagggctaacatgagccaaagaataggaagcaaagccaaaataaatttaatgaacatcacgagcagaatctcctttctgttcaggactacgggttacacccaaataaattggttctaccaatccccttgttgccccttatggtaggaccaatttcaaaagttgtcaagtccttttgcatgaatagaggattacattattgaattttattgtgcaacatgctgaatttcaaatttattatttccttttatccccttctggaatgatagaaatttggaattttttcctctccgtgaatatactctctttctgaatttcatgaaatctcacaaaaataacaaagtttccaaatgcgatttgacgcagtcaaatagtttcctcacgcatttgtgtgcataatgcccgcagggcttttttgttccatagggaggttcgcagaactttcctatggaataaaaaaagcttccttgacctcatcaacaagatcaaagaagctttttgcttcagcacaacatatattttattatttataaggcttttccgatttcgtccagagagatctctgtctcttccccggattccatgtttttaagcctgcccttattctcctgtaattcgttttcacctatgatgatcgtattttgtgcgtgcagcttattggcatatttcatctgggccttgactccacggccaaggtaatcggtctccaccttaaaaccttcggcacgcaggcccgcaacaatctcgtaagctctggccttggcttcttttccaaggataccgacatacaggttcagcggccggcccatcggaagctccacaccttcctcttccaggaaatataagatacgttctactcccattccgaagccgacagacggcatagaagcttttccgtcgatctcatggaccagattgtcataccgtccgcctccgcacagggtaaacccatcctcgtttacaaactcaaacaccgtcttcgtgtaataatccagtccgcgcacaattcccgtgtccacctcataagggatattcaggctgtccaaaaggcttttaagctcttcaaaatgggcactgcattcttcatctagatagtcaatggttctgggcgcgtccttgatgatctccttgcagtcaggcaccttgcagtcgatgacacgcaggggattcttctccattctctcacggcaggtcggacaaagcttgtcctcatgctggtgaagataattaagcagagcttcgttgtaatcttttctgcagtttgagcatccaatgctgttgatatggagttttgcgtcctgaagcccgatctttttgataaaagatgtgaccagagtgatcagttctacttccgccaggggactttccgcccccacaaactcaatgccaaactgatggtgctgtctgagccttccgctctgaggtttttcatagcggaaagccggggtgatataaaacatctttactggctggggctcattctgcattccgtgctccagataagcacggatagcccctgcggtcccttccggctttaaagtaatgctcctgtttcccttatcctcaaatgtgtacatttccttctgtaccacatcagtcgtctctcctacgcttcgctggaacaataccgtatgttcaaaaaccggcgtaatgatctcatggatattgtatgtctcgcataaatccttaaagaccttctccaggtatgtccgcttctgcatctcctctccaaaccagtccttcgttcctctcggtgcttgtgttatcattcacagttcctcctttaagttgtatctgtatcgtgcagattactcttttctaatattgtaagcatttctttggaaaatgcaacccgctgaaatgcgagaaacactttcatgtcaaagttctttacttcctcaatcataacttccagggcagtttccacagaaaaaccctctctataatcccgattggcgatcagggctccaaaaatgtcgcatacatgcatgatccttcccaccagcgggatctcatccctctttaaattgctgggatatccagtgccgtcatagtgctcatgatggtacaaaaccgcatccagcacaatatcatcatacccatgctcgatcaaaatagaatggccgatggtggaatgcattcgcagatagcgtgtctcatcaaccgcaaggatctgctcttccttttcattcatgtaaaaatttaagcggaccttcccaatatcatgtaacagtcctgccacagccaggtcataacagaccgcttcgctaaggcccagttcctttcccacactgtatgcaagattgctgacaacgatcccgtgttcaatagcatcatctaaggtaacctggattggagtctccacatcccgggattcatatttcattggcataatgcaacaccacctaacacatactttttagtaatttatctttccgtaaaatcatctcgccgatccgttctgtatactgtctgacatcctttaaattttccactctctggacattctttccagggcctaaaaacttagacgaggcgccagctcccactgcaacgatatcgtgcagttcctccataatcagtatattataaaggcattctttttcttccaaagaaaagccgatattttcaaaatttccgggaatatttttctgcctgtacatgtagtacggctccatctccatggaaaagcatgcatcctgtgcatactggatcatctgctcatcggcaccgaaggagtactgctccctcatctggtttaacggcgcacttcttttgatcgccagggcatggactgtaatactgtcgggcattagctgctttagcgccccaaaggtcgtttcaagttcttttattccctcccccggtaatccacagatggtatccatattaatattgtcaaatcctaactttctggctgtctcaaagctgtccgccacatcctgcgccgtatggtttcttccaatcctctttaaggtatcattgttcatagtctggggattgatactgatcctggtgactccgttctctgctaggacaacaagcttctccggcgtaatgctgtccggccttccggcttccaccgtgatctcacggatcctgttaaaatcaaaacactgcctcagttctccgaacagagatcccagctgttttggtgaaagagtggtaggggttccgcctcccacatacaagctgaccacctgcctgtccttgtactggtctcccacatagcggatctccttaagcaaggcatccagatactggtctacatactccttgtacgcagaaatagggtatgaggtaaaggaacagtacagacaggtactgggacagaacgggatccccacatacagactgtaccctttcccgtaagcgatatccttcagcagttgtgtctcctttaaacccacagtgacacagagctccgccttttcttggctgaccagatactgtttccgaagcttagcttccatctcttctctgctctttcctaaagcacagtcctcaaacacaagcttcgtagggcggatgccgtttaaagttccccacggcagttttttgttcagatggcgggaaagaagccggtacagtgccgctttcagcttattcttgaattgctttttatccctgcagtttcccttaactttttctgaaagaaccgtctctccggcacaaagctccaggagagtttcctcctgtgcgtagaacactctgcatataaaatcatagatagaattgtcaacttcttcggaagacaattctatcttttctccaatgcagaacgccaggatcaggcttctgatatcatattcatacagggtttcattctggatcagtccgatcatggctttacaagaaacggattagtgcgtttttccagcccaatggtcgtgctgttcatgtggcctggataaacttctgtgtcatccggcaaaacaaacagcttttcccggataccggacagcagtgcttccgtatcccctgtaggaaaatctgtcctcccaatgctctggcgaaacagggtatccccagcgatcagccatccctgttctctgaaataatagcagaccccgccttttgtgtggcccggcacatggatgcatgtgatctcggtttccaggagatttaacacctgtccgtcccttataatatgatctgcttccatggaaatgggctccccaaacatggaagtcagattcaatgagggctccctgagcacatctacctcgtcctcatgcaggtaaaccggcagtcccggtttttgttcctgtaaatacggcagtgccatcacatggtcaaaatgtccgtgtgtcaaaagcaccgccgaaagcttaaacccttccttgttcagcatctccataacacggaagccttcatctcccggatcaaatacaagcgcctcttttgtctgacggttgccgacaatataacagttggtctgcatttgtccaaggctcgctcccagtaaaataatattatcattcatagctgccaaactatcctacctttctctctatatctaccacaccttcaatgtttctaatccttgcgatcacttggttgagctgggcgacgccattgatgtcaaatgacatactgagcgtagccctgccctttttagaatttgaaacgttcatggtcaaaatatcaatgtccagttccaaaaaaaccttggagacatccgccagcattcccttgcgattgttggcgtaaatagaaatctccgtcgtataagtctgcccggagccctcggagccttcctgccattcggcctcaatcagccgtgaccggtctgtctctgacatactcagcagattgacgcagtctgtcctgtgaatggagactccgcgtcccctggtgacaaatcccacgatctcgtcccccggcacaggattgcagcatttggaaaaccgcactgccacatcatccacacctttgacgacaataccgcccttctgcttttcttctggacggcgctcccgaacatgttctgacgcctctaacacctgttcatcggtgaccttctgcttctggtccttattaaactcttccaccagcttgttgacgacctggccctccttcagcccgccgtgccccacggcggcacagacagattcccagtccttaaacccgtatttcaactgtacctttttaatatattccggctttaagtaatgtggcagttcaattcgtttccccttgcagtacttctccagcatatccttgcccttgacaatgttctcttccttaaactgggttttgaaccactgattaatcttactcttagcctgcgtggacttgacgatgcccagccagtccctgctgggtcccttggaattttgggatgtgatcacttccacccggtctccgttttgcaggtgatagtcaaacggcacttgtcttccattaactctggctcccaccatggtattccccacggcactgtggatacagtaggcaaagtcaatcggcgtagaaccgttggcaaggcttttcacatctccgttgggcgtaaagcagtaaacctgctcagcaaacagatccagattggtttttaacagggataaaaactccttgttgtcgtccatatcctgctgccactctaagatctccctaagccaggaaagcttttcttcttctttgttgacacctacgttatggctgtcttctttatacttccaatgggccgctataccgtattccgcaattttgtgcatctcaaatgtccgaatctggatctcaaagggatgcccctccggcccgatcagtgttgtatgcagtgactggtacatattctgcttcggcatagcgatatagtctttgaatcttccggggattggcttgtacatttcatggatcactcccagagccgcataacagtcttttacagtgtccaccttgatgcgcaccgcaaacaagtcatagatctggtccagggtcttattctggttcaccatctttttgtaaatgctgaaaaaatgcttcacccggccatcgatctccgctttgatgccgctgcgctcaatatgcccgctgacctcatctacaatatccttgatgtaggcttctcttcggaccttctgtgaatccagagaatgctccaattctttgtaaacatccggctttaaataccttaaggacagatcatccaactccaccttgatcttggaaataccaagcctgtgggcgattggagcataaatatccatagtctccctggacttctccttctgcttttcaggcttcataaactgcatggtccgcatattgtgcagacggtctgccagcttgatcaaaatgacccggatgtcctttgccatggccagaaacatcttgcgaagattctccgcttgtacttcgatcttatccttggaatagctcagctgtcctaacttcgtgacaccatccacaagctgggcgacttccaccccgaactcccggaccacatcctcgtaggtcacatccgtgtcttccaccacatcgtgcagaaggccagcaatgatcgtctctcggtcaagttccagttccgccaggatgatggcgacacaaataggatgaatgatatagggttccccagactttctcttctgatccctgtgggcttcataggccatgtcataggcctttcccaccatctctatatcttcatcactgtataagctcttcatggtatccatcagttgcagacggagttcctcaggagctgtaaaactcttcggattgctgatatctttttttacacggtttatttttgttttgctgttttgctccattggcagccactccagtttaattattttttaattttgattcacagtaaatacacctgtaaaccttgttctctttgtccacaagcttaaaagtatgatcgatctcctgttctatggatgtgatgcaccgcggattcttacatcttgcaatgttggtgatgacctcaggaagcgccaccttatgcttggactttaatttgccgtcctcgatgatacagacactggcattggggtccacataccccaggacatccagatcgatgtcaaaattgtccgaaattttaatgatgtctttcttgccgagcttgttactcttggcgttctgtatgatggcaatgctgcagtccagcttatcaagccccagctggtagtagatatccattccttttccggctgtgatatgatctaaaacgatcccgttcttaatactatctatgttcatgccataacccccaataaatccatgatcaacgccatcctcacatgcttgccgtttaacgcctgcttaaagtagcacgccctcggatcttcgtccacttttacagagatctcattgactctcggcaatggatgcaggatggacagatcagccttcgcgttttttaacttttcaggatccaggatgtagctgtcctttaaacgcacatagtcagcctcattaaagaaacgttctctctggactctggtcatatagatgatatccagttcaggcatgacttcttccattctcctggcttcgcggaacgggatatttttcttttcaaatacatccttcttcaagtattccggtatctgcagttcttccggtgagatcatgataaacgtaatattttcatatctggaaagcgctttgattagggaatgtacggtacggccgaactttaaatccccgcagaaaccgatggtcagattattaaggcgccctttctccctacggatggtcaaaagatcggtcagtgtctgtgtcggatggttatgaccgccgtccccggcattgataattgggatatccacatgctttgatgccacatacggagccccttcctttggatgccgcatggcaatgatgtctgcgtagcaggccaccgtgcgcgcagtgtcggcgatactttctcccttggccgcggaggaagaatcagcagaagaaaaaccaagtacactgccgcctaactccatcatggccgcttcaaagcttaaccttgtcctggtacttggttcaaaaaataaagtcgccagcttcttatatctgcatacttcccgatacttttccggccttgacgagatctcatccgcaagatttaacagcctgtcgacgtcatccacagacaaatccataggatcgattaaatgtttcattgaaagtacctcctaatcttatgttataataattctacatttttagaccaatagtgtcaatgaattacttatattttagcagtcctttttccagcagttccgaaggcctgtaagaaagctttgccttccggagtccttcttctcccaggtcctcttccctgttgatatattcgtaatccatggcctcatgcagaataaactgctggttgatcatcgggtaggcgccctgaatctctccaaaagccttttcaaagtggaccacaaaggtatcgtctgttgtgccctctccaatagcaaacgcaatgatcttaccgtcacttctcaaaatcccgccttttaaatccagttccttgtaatacatcagggcatttttcgctgcacagatctcttcatgcttgtcggaatcttcctgctctgtggcctcatttgccattttccattccataagcatagtcaatgcctctaaggcattttcatcatttaatgactcataggaccattcatggttttccttaaaccgattgatgtgattcctttttccatggagcttctttccttttaatgtggcaagagactccctctcatagatataatcaaaaagatcccggtcatattccactgtgaaaatatccccgaacatctccttcatcttttcttctgtctctttcagaatgccgtgcatggcaaatggaatgccctgctctttacagtattccatgacagcttccacggcctttttagcgtctccgtccccgatcgggtagctgaaggtacagccgctctcgtcatcggaccggatgatgagcatattttctgccatagcatatgacatatgataatgatccttccatagaatcaaagttgccgctgaaaaatcagcgctccggtaattcacttttttaaaatactcatccagcatttctttatcttccaactgcggtgtcttaaaatccattgtaaactcctttaattatttatgataaggctgacggttgatgatccgaaagcccctgtaaatctgctctaaaaggacggtcgcgcacaattccggggccatatgaaaggacgagatggaaaactccgagaagtcatgctctttgctgaactccccaatataaaagcagatattagaacagccgtctatcatccaacggctgatctcatctgcaaatgcagtgctctccatactcttccctaaactggacacgaaaaaatgctttccttccttctcaaagattcttcccaattgtttctctttttttacatacttgatttctattgtacaatattttcccagacgtttcaaatattcttccattgcctggacataaaatgcgtctttgttcttctgtaatatgaaaatagaaaacttcatgatgatttgcctttgtcaaaaaactttttaagcttcttatctgatttcagcgccttttcaaacgcattgtttgtctccttgatcaactgttttaccttttcttttcctaatgctatattcagggcattcttgatctggtcagtatagtgtttttcattgttataaagctgaaaagactggccctttttcacaacataatactggctcatcccaggcgcagacgtcttgatgccgcggatctttgtgttgtagacggcatagacaatataagagttgtcatctgcaccctcctcaacatggaatgatagatcctgatatgcttccacatacttatgtaactttttgaccgtacggctggaaatcagttccttggggtcctccgtcatggccttgaggcctttttcatctcctgcttccagtttcttatagtaattcttcatgaacgcaaggactttatctgtttccgactccacttgccgggccgtggcagatacatctgtattctccttttctgaggcttttgtctcttccctgaatattttttcatttgtgatcttttctgtatgctccttgtccaatttcagaaaaatcaaaaaacaagcgcaaaaaaataaaatccagctcaaaacgataacggtgactgttgatttctttagcttcacttaccatgcctccatataaatagtttttttaattatagcacatccctttttttgatacaaagaaaacataaaaccgcatcccagcatatcgtacgcactgcgcagaaatacggctgggatgcggctgtaaacgacagctgatcctccgttacttttgttccctgaaaccaagcttcagcaggaagtcatgcacctcgtccggacttttaatgttcgtcagggatgaaactacaatatatgccggatgagtgcctgtcttgtcggttgtggtcttgcccgtttcatatattttcccgtcataatatataaggtatgctttccactgcccgtgcatgtcactgggattagatccgtcactttttgtagcgatcagcagggtaccaaaggaattggaaactcccttggaagacaaataatagggctgccagtaaagctggtcttccagctggtcaaagtacttggatgtgaggaaggaggagtctaccggcatatatccgttcccatgttcatgcatatacttcatcagggactccctgccggcccagttgtttatctttccctctttatagagctgttctaccagcttttcatactcatccacgtattggtccaaaggggtcagggcgttttcgttggagatgacgtatttgacaccggcatccttgtcatattttacacaaagcccattttctgctttataggtcagcgtctgaatcttcatctcgctgtcatcaaaaaagatacttcccttaaatgtcccgttcactccggccatggataatatctgttttttatcagctcccacggaagtcagcctgttttttgaataaagttccatataagcgctctgggaagctgccaccacaagcttgcactccgacttggcatccgattctttctgtctttgcagatacgcagtgaaggatggaatcgcgaccgcagctaagatgccgatgatcacaaggacaactaccagttccaccagtgtgaacccttttttatttttgaaagtctgtttcatccttcttcctccttacaggcgttgacagcttataagtctaatatacctgattttggatcaaattgaaatatgaaaaacgtctatttcgggaggaacgaaaaatcggacaggataatgggacgtcccgattcctgtattgacaaacagcttcatcccgtttacagaataaaaaccgttcgtatatttcttagcgagcgaggttttcatcttaaaaaagggaagcttcacctgtccaccatggctgtggcctgccaaaatcagatcagcattttgggccggaaggcggtccgccgcgtccggttcatgaagcattagaatcctgtagtcgcagtttttgatatccgctgaatccatcagtgtgtaatccggtttgccgaacagcacatcgtccagtccgccgatacagattttcctgccgttgggaagacgcacggtctcagtctcattggtgagaagctgaaatcctccctttttcataatatccgggtaggagcgcatggcaccgcctccatagtcccggttaccccatacagcgtattttccgtatttggcatggattccggccagggccctctgcacttttttttctggatggtaaactgcatagttatcgtacaagtctccggtaaataccacaatatccggggactggctgttaatcttctcgaccagtttgtccagcctgttttctgtgtaggattcactgacctgaatatctgatatatggacgactttaaattttgtatttgacgtttcttttcccagctgatagtcatggaccacaagacggtacggttctattttcactgcatatgccgctgacagacctgctaagaccaggagcagcagaataagcagaacaattcttttaataatcttcaatgaggttctccttttgtttctgtgattatagaacaaagtaggcaagcccacttcaacaccccaacctctcactctttgaggggcttggcaactttgcgcgccaaatgcgatttgacgcagtcaaatgatttccttacgcatttgtgtgcataatgcccgcagggcttttttcttccataggatgcactttcctatgaaataaagaaaaagccgcatattgctatgcgcttcttttattgttagacgatcaatgcaaatttatttatgttgtttttaagtatacatgatagaatgctgaatagcaagacaggattagccagtgcttacttatagaaaaaagggaaagaaccgtaaaaatcacacggttctttcccttttttctattaattccggacatcttatgatcacaatccgagactatctgcccatgttttgatgtcgttttgccctgcattagcattaaatcgttttcctgcctttaatatagctccaggacaagacttttttagttctgcattggtatttcccataccgctgcttcccgatgtagcaaacggaaccaccgtctttccggtcagatcgtactgctcaaggaaagaattaataatcgtaggagcgacataccaccagatcggaaatccgagatagaccgtatcaaactgttccatattctctaccctatttgcaataggcggacggaaagaagccttctctttcatctcaatacaactgcggctttccggattcatccaatcaagatccgccttgctgtatggccgctccggctgtatttcatgcagctcgccgccgacagctttcgcaaggttttttgccagtcccgcggttacaccacttgcagaaaaatacgctactaaggttttgctcactttttattcctccttaatcaaaaataagatgtacctttttctggcacatctttattctaacgctctgtatgaatgatgtaaaatgcctatgttgaataggcggcgattcatttttatatcaaggtctgcccttgaatataaaatgcaccaggcaggagtcgaacctgcgaccaacaacttcggaggctgtcactctatccactgagttactgatgcacaatgccgtgatttaacgtccgtgttatatattacaacattttgatttgatttgcaatcctaaattttaaatctttacatatattgttccagatcctggagatcgtttgtatactttttggcggactctttggatataattccttccgccacgagtcttgagagatcccggtttaatgtatgcatgccgtgggccatgccggactgcatgatcgtattgagctggtggcatttgttctcacggatcaggtttaaagcagcatccgtacccatcaacacctcagtcgcggcaatccgttccatgccgcttaacgtagggatcagacattgggtcacaactccggcaagcacaccggcaagctgtgtacgaatctggttctggctctcaccgggacacgcatcaatgatacggtctatggtctgggccgctcctgtggtatgaagcgttgacatgaccagatgcccggtttccgcagctgtgagggcagcggaaatcgtctcataatctctcatttcccctaccaaaatcacatctggatcctctctcagggaggacctcagcgcggaggcaaagtctttcacatcaaccccggtctctctctggtgaatgatggacttacgcctgtcgtacacgtactcaatgggatcctccaccgtgatgatatgttccgcacggctgttgttgatataatcaatcattgccgcaagtgtggtggatttaccgcttcctgtgggtcctgtgacaagaatcagccccctgggctggtctgccagatcctttaggcacttgggaagcttcagctcactgagtgtggggatatggttgctcaacaggcggatggttgccgctaatttcccctgctggcggaaaacattgatcctctgacggttttggtccggggtctgcagtgcgaaatcggcatcctgcccttgctcaaacagttccttctgtgctttcggcagcaaatccaggatcatctgccggatctctccgtcagacagttctatcccgctgtccacaagacgtccgcagctcctgaaagccaccggcataccttctgaaagatggatatctgatacatctctttgtctggcggtcccgatcatctcttctattgtcataaaaccctcctatacatagtaagcaatcttccagaattcttccatggtcgtaacaccctgttttaccagctgggcggcactctccttcagtgttctcatgccctgctttctggtcacatagtcctggatatcgtcgattgacctgctctctgaaatcatcttacggatgtcctggtcaatgaccgcgatctcatggacagcgatccttccctggtatccggtctgattgcattttgaacatccaacggcctctttgaccgtaccgatatccgctccaagaatctgccggtccgcctctgttgcttttacttcctttgcacagtccggacagactttgcggaccagtctctgagccaccaggccgatcagggaattggctaccagatacggctcgatccccatatcgaccaaacgcacaacggaagataccgcattgtttgtatgcagggaggaaagaacaaaatgcccggtgatggcggccctcacagagattgccgcagtctcggagtcccttgtctctcccaccatgatgatatccggatcctggcggagcagtgccctaagaccggtctcaaaggtcagaccggaagtattattcacctgcatctgattgaccctggtgatattcttttccaccggatcttctatggttgaaatgtttgcattcctttttgacaaatgttccagaaccatataaagagtcgttgatttaccgcttccagtaggccccgtgatatacaaaataccattgggtgactttagcagggactgaaacttctcaaagttttcttcattcatgccaaagtgatccttatggtcgatcggcgtgcggttacttaaaagacgcagcacggatttctctccgtaaacggttgggatcactgacacacgcatattgatgttgtcttcctccagccgcatcctgaaatgcccgtcctggggaatccttttttccgcgatatccattccggccataatcttgatcctggccgtcagagaagcgtgcagtgaacgtttcagggtcacatagtctacgatagttccgtcaatcctcattctgaccacggtctctttttcaaacggttcgatatggatatcactggcattggtattatatgccctcaggaccagagtatttagcagtttgatgatcggtgcatcgctgtccccctcattctccaggtcatccagaaaagaaatatcttctacctcctgggacgtctcattggcctgtctggccgcctgcctggcagaaacttcggcataatagtactccagcgctttttttagcggatgaagctccgcaagaaacactttcagctgcattcccgtgagctggcggatgtcctccatggcataaaagttcaaaggatcattgactgcgatatataactgattgtctttgatgtccagcgccaggatattatattttactgccagctgttttgggatcttttctactgcttcactgttgaccggataactccccagattgatgtgggaaagcgaaaggcgctggcccaaagcctccagcatctgctgctccgtgataaactccagttccatgaggatcgtccccagacgcttccctggatgctctttctgataatccagcgcttgatgaatctgctcctctgtgatatatccgtactgttgcaaaacttccccgattggaatattcttcattgtcttccccgctttctaagaattacttccggcacatataaacttccagcaccagagacagagttgatgcatccacgactttattcgacgtagtcaatgccgtctcggaactcatgccgtaactgacaatacgaatggaaggataatctgcatatattttatcaatcagcttctttgcatttgcttttgtcccaaggatgttgacagaaaccggataagaatacagcacactctgcgtaatgctgtttttgctgctgtcctctgagctgctgtcgtcgctgcctttggttcccagactttttgccagggaagattccagataaggggtcagcacgctgactgacggtttggccgcgatctcaaaatccctggaggaaagaccgcattttaatatcagctttgtaatcatgcgctccaccttatgggattccatcattggataaatgtccttggtctctttttcaaaatcagttctggaggccttcagccgggcttccttctggggaatagaggcaatggcattttccattgtctcttttgtctgctgtttttctttgaactccgcagccagatcgtttctctgtgccagcagtggacggatcacaaaattagcaaaaagtacaatgatcagtataacagaaagcagacttaacagttttttatcccgatttgttatttccatggatgttttcacctactttcctgcattttcacttagataagtgctgatatgaatatcatattgtttcgtttcttctgtataattgtaaccggaatacttcaggtctgcgaacagctccgacttcttcaggcggttgataaaatcatagatactcgtaactttcggtgccatagcgacaaactcatacattccggtcgatgcgtcatatcggtccaccgttatggagacctttgtccccgcgctgtttttaaccattttttctacccggctgttagcctgcggataggagtcaaggacctgttttacaacggccagctgttcttttccagactgcttgttggcaagttccagatccaggtttttggcattggtgtagtctgcctggttccctgaatcctcaatataagaatccatctcattgatcttagagttgttaatcatgttcatgccgaagagcactgcagatacagccaggcaaagcaccaggacgcctgcagcggcgaaaactccaggatataccttggaagattttttatgatcttccttcagcttgatcctctgcgcgaagtcaatatcctgttttttatccgagatcaatgctcccacggcaaaaatataatgatagaattctttctcgtccggcagctgataacctgtcagctgaaacgtgtttcctacttccagccccaattcccggagaggggccgcaagtatccctaaatcctctttcggaaatcctcccagataaatattctttattttttcccctttttgctctgtggcgagaaactggatcatagaactgatcgtattccccacttccccggcaataccgtccgtaccgtgctctgcaaatattctcgtgcggttcagatatttgtatgtaccctgcacaaataatgtgctgatcaaaatctccccgtcaagcttagaaaagataaaggtttctttccttaaatcctgtatgcgttcaaacgcttttaactgggcgttcagggcaatatccacggattctacttccacttccatggacgcaaatacatccagatagcttttcagcatagtctcctggatggccgctcccagaactgttgccattccactttttttatccatgtcacagacacggtagtcgtagacataattctccggattttccagactggtaagctcttttttaaccacttccagagtctttttcttattcattttcggaatcgtcatcatcttagccgcgatctgggtactgtcaatgaccaggctgatcttttttgacaatccttccctttcccacagcttcaaaagctggttttttaatccttcttctgatgtgatgactccattgatcaggcttccttcccggatatcaaactgaataaaattttgaacctggatcttattcttttttgcctcccccacagcgatctgcactctgtggtttgataaatatactgatgtcctcataaaaaagatccccctttaatatccctggtcaatggtagagtaagattcataaatcggcagaatcactgccacaactacaaacccgatgatcagtgccatcaaaatgattaaaatcggctccatcaatgtcaccaaacgttccaatgccctttcggcctcaaactccaaactgtcggcaatggagtccagcatctcatccaggcttccagtttcctctcctactaaaattgaggaggacagttttttctgaaatccgtcgatttgcatcaaagagccggatagggattctccccgccggatcagatcgatcaccccgtcaaactggtcttctatgtaccggttcccgacagtggaacttccaatctgcagtgcctgtatgatcgggataccgctggaatacagggaacacagggtcctcgcgaatctcgccgtatatattttccgaagcagatttccgatgaccggaagcttaagctttaactggtctttcttccactgcacttttggaatgcggaacagaagattcagcccaaacaccaaaactactacagccaaaataataaacggccaatacttctgaattccgtcactcatgccaagcaggatcactgtaggcagcggcagggattccattgtatcaaaaatatcctgaaattgaggtaccagataggacagaataaaaatgatcacgcagaccagcagcacagacaagatcataggatagatcatcgcatttcttactttgccgttgagcctgtgttccttgtcgtaatgttctgccatacgcagtgaggtctggtccagattaccattggcctccgcagaacgcatcatactgactaagagcaccggaaatgttttcccctgctcctccatggcttccgacagggggacaccctggcggatagcattgagcagattctggtaggtctccttgtcagcgcttttcacaccaatctcattggagatgatattcagtgagcgaacaagagaaactcccgcctttaaaagcgttcctaactgtctggagaagtccgccagaacagcggttttcattcttctcttggatttgagtttgctttcttccatgtccttgctggagattaaatatctcccgtcagctctcagagcttgatataaagccatttcatcggcggcttcaaaaacgcctttcgatattttcccgttactgtctttcgctttatatttatatttcggcatagataacttccctccctgagcataacttttacagcaaaaaaccaagataccagctgatcacctcattaccacagcatatggcagcccagatccctgcacataagaatggtccaaacgcaaaatggtctttgcctccttttttctttccggccaacagataaatcccatagactcctcccgtaaggacagaaaagaagaatgcggcggccacaagcttcacacccagaagcagtccggcagcggccatcagctttatatctcctcctccgaacgcgcctggaatcagcacggccagaagcagcatgggaacgctgacagcaaaacagccagctgctctcatggcgatggaaacatccggaaacaaaaaaacagacaagatacccagacacaaaagtgccagcacaaacccattgggtatttccattgtatcaatatctacaaataaaaccgcagtcagcaaagctgccacagatagtaacaaaaaaactctgcataaatagatgccgatccccgcatcatttagtggaaaaagcattgccgactgaacggccagtcctcctcccagaagttccaccagcaaataccgaaatgggattttagctccacagtttctgcattttcctctgaggatcagataactcagaaccggtaccatatcataaggctttaatctggcactgcaggacggacaaaagcttctgccgcccacaaatgagatgttcctcggcacccggtaaattaaaacattcacaaacgaaaaaatagatgctccgatccagaagaagataaaatatacaagtcccatggttccccctttttacaaacaaagtgggcaagtccacttcatctccccaacccctcaccctttgaggggcttgacaactttgagcgccaaatgcaatttgacgtagtcaaatagtttcctcacgcatttgtgtgcatagtgcccgtagggcatttttgttccatagggaggttcggagaactttcctatggaagaacaaagaaagagcaccccagaagtaaactacttttgggatactcttttcctaaatatcttatgaatccccgatcatctggtccaggcggtataccttccagactggctttcccttcacttctttgtatctgacgatatagccgtcctcaacgtatacaaaatcagtcacttttacatcccgcctgtcataggcaatcgtgtcaatccttccgtggcttttagcagtatccagaatctccgtctctactgatttggagagtatctggcgtttccccgcaacagggacttccccgccctttgcatatgtatcgtagaaacaaatctgtgcggaaacccggacatccttggcgtttcttaaaatgttccttgctttctgccgctggatcgatgtcttaacataaggaagcactccgagaaacaaaacggacaaaagcactagaagcagaatccattctatgatctctatgaacttctggtttttaaagtttctatttgtgcccaaggtttaccgtccgccttccgaaaatatattccttaactattttttgttgtggtccatgcagaaccgtcaaatgttgctgtaaatttctttcctttgtaaaccaaatttgatacagttccatcggcatcaaaagtgatggaaacactctcatacttgctggcttttacctctgcaagcttctcaatgctcggatcatccgcagctgcgcccgctgctttaacatctaacgttgtaatagttttaccacacagatttttagtggccgcatcactattgtaatcatctgcagcaacagtcttagccgccattaaaatttgtctgccttctgtagctacttttttcttattggcactatcaatataccctgtcaaagtaggtaccaacagtgcaatcaggatcgccaggataactaatacaacgatcagttctaccagagtgaaccccttcttgtcctttctcagttttttctttaaatcaaataacttcttactcataatttccccttcctgtcattaaatttttcctaaatcttatagataaattatatgccgaatccctatacttgtcaaacaatatcgagtttataatatgtgcagcttttccgcttcttcaagtttcatccggaaagcctgaacctgtgataaaacctgattcatccagcttgtaacactccactacttttgtccgtttatacgactgaccggtctttacattgcggacatttaggataatctttacaagatttgtatccttctccctctcgaacttcagattcttgatctcctggttcatatacgtttttcgggaaaaagtccaatccactcccttctttgccgctgcgcctccctcagagatggaagctgcctgataatggagtacaagacgcttctccccctcctcttcttttgcatacatgattactgtacgcccttttttatccgtataggtgatcttttctcctccagtatcaatctgcacctgcccggctgaacttccgatctccccgcagatcttttccagaaggatatccgcgacactctgggccctgctcatattggatattctggccataacattcatggcaggtgacagtgtggtgatagcggctgtcatcaggatgcccagaagaagaaaggtgaccatcagttccacgagtgtcaaaccaccttctgagtttaaaacctttttaaatactgcccacttttttggccgatgttccatcattcacttccttcctgcccgaagaaatagataaaatatccatcactgctcttggcttctccaacctgaacttccatgccccattctgccacagcatcctccgagtcctgtcttttcacggtcagcaaaacagtctgcttctccgttgattcagaagactttttctcatagaattcggacacagcctgatccgactgctcctgcacctgtctcgccttcctgatctggtttaacgacataacagtacttttgtaaagaaatgcaatgcccatcaacaggatggaaaaagccacaagaacttccactaacgtcataccgccgcgctcttttatgaaattttcccaaaatctcttcatatgatcactcctgccattgctcagcccaagtccatttctccggttcaactgtactgatcttcaacgagtatctggttgtaacatgatattcttgtttccgagaacttgaactgacccttgtgacaagcaccgtctggtcaaggggcgcatccttttcagactcccagtagatcgtgacctgaatctctccaagggtatcctttgccgactggatcatccctatatccagcgtacgaaatgcctctttctccccatggccgtcttccttatcgttgtaatacgcccacttgtcatttttgatctggtcatacaggaaatatcgtatattatcctcggccgttccctgccccttggcatccgtgatctccttttgaagaatcttattaaatgagacagccgaaatcctgcactggtctttcacggcggactgctgtgcattggtaaggacctgataggagaccatgatcatgatcagtgccactgccataaatacacagaggatgcacataacaaagatcagcgcactgccttcattccttttctgatatcttttcataatctacaccctctcagttcacaccgttataatatccctggatcgtcttttctagtttcagatagtactcttttaagttatttattgtgagtttcgccgggtcaaccgtaaagtttttgatggtaaccatcgctcccccgtctgtccctgatgcttgataattctgttcccctattttttcgaccgtcagcgggattccgacagtgttattctgtgaggaagcatctgcactgacaaagtagtaacatttagaaatatccgcttgattaaattccatgcctgcaagcggatgatccaaaggtgcaaccccaaaacactgaaggagtttcaaatttttggcaggtcctttctttttgccgatcattcctgacatctttgttttattagccggaaagccataatttctgctccggcttaatttcgtgtttccatcggtcagatccgcttcgccaacgatacctcctgcggtttctgcttccagcaaagccgcgttgacacattcgatcacagataactccaaggtgtcatcctgggtacccttcatctcatcagataaaccgatgatgcctccggccatttcttttttgctttgtatcatcacatctgccgccgcagagcatctgcttatctttcctccttttaccacggatcctgctacacctccggctgccccctcttcagaagaaattgtacagtcctctacataggctccttcaatggaaggatcttctgcactgccggcaattcccccggcatttccatattcagagctgacatctcctttatttccgctgtccatgacgatcgtaccggacgccatcaatccacaaatacctcctgcgtctctaagaacagccgtgatcaccgcgtgattttcaaatcctttcagttcctcttctcctttttgaaatcccgcaaccccgccaacgcagtcattgccaaacaaatatcctttgaccttggaataattccttatcttaccattcttctcattgtatcctgtgactccccctacataggtatctcctgatacaaatgcggttacttctgagatctcgtcactttcaatgattccgttattataaccggtgatgcctcccacctggattccttgtcctccgtattcaagcagtgttttccggatctcatccttggaatcctctttcattttcatttgggaagtacagttttgaatctttccggtattgagtccggtaatgcctcctccaaactggccaaatccattagaagaatccactacagtaatgataccgcagttggtccaattttttaaaaccgccttggaagtatactcctctttatccacaacaaagtttctgagactgatgtctgtgtttaaaatattggccgcacttccctgaacactgccattgactcctgtaatgccgcccacatactggcttccgatcacattagaataatttttagatccatttccgtccatgactagttctgagtcaatcacacctgtgtccgatgttttcatatggaagccggtaataccgcctacgtactgatttccggtgacaaaactctcctcatcttgttttccagtactgcacttggtgatggttccatgatcgttaagtcccacgatcccgcctacaaagtctcccttcagctggccgttctttgcactttctttcaactccacaatctctttttctgtgagtgctggtgcgctcaggcattccttaatggaggattctttattatatccaaggattcctccgatacactgcctggtgcccgtgacatatccaaagttttcacactctttgaccgataaactgcggacttcatccggttttgcaggatcttctatatagattccattcaaatatccgacaatgcctcccacaaacttctctcccgacacccgggcgctgtttttcagagactcataggtcctcatagtccccactaaaatcagcttttctgttccggtatccaaaggttttcctgtaatatcgctgcccgcaatgcctcccacaaactccttgccggtcacagtgctctttttgtccacggaaatatttttcagggttccgtaattgactccgcatacggttccaacataatcggttccctccgatgtgatctgttcaaggatcaattcccttacggttccttcattcacctcaaacagtcctgtcggggtcttctggtcctttttcccaaacctgatgttctggatcacataagatttcccgtccacatccatcccctgaagggtatgcttctgattcagtttgctgacggaagggaggggagtatcatcctctaaagctgacagctgtcttgtcttattgaacagaaaacctcctgctgccatgcctttatcaccgttccagcttatatctccagccagacggtacagcacggtcccatcctttgcttcctcttcctcaaatctcagattatataaatgtcttccatttttaagatcaaagacttttgtactgtctttttttatctcttctttggcgaaataagagtgttccgtattggtctgttcccactggctgggccggtagccgctgcctgacgcctgcatccggacatacagagtagtgctggaaaatccaagcctgcggatactgtaggttccatcataatccgaatccttttcggagagctgggatgcagactccagatccacggcatccagcatcaacatcatctgcccgtctttgtccgtataacccatgaacttcatattctttttggtatccgtgactttcccatccccatcataaaaagaaacatcacaggtcaaagtaagatctttgtctttgccctcttcccgtaagatcgtctccgttttatccaggtcattgatcttaaaggagcagaccagctgatccgtagaagcgtcataaagcttcagctcgtatgcaaggctcagcgccgaagccttatatgcatcctcaagctgccactggatcgacagtgtctccttgttggcaagctttaactctttaaaaatagatccctccataggctgcggagttgtggatatggaatccaccccatagtatcccacaagctctttatatcggtcaccactgcttctgccgctgatatcgacactgccgtccccgccttttggctgggtatttccataataaaaacttttagctttgtttgagtaacagacgcctagggcaatcccttcgtttggatcaaactctacacaaaatgaggcatttaagacatccgcatcatagatatacggcgcgatcatgtcatagacagtcttttttgctccttcataatccgcccggttttctcctttttggaagaaaaaatagtacattcccttggcatcatccgcgaccggcgccccgtcatcaatcattgttccattcagctggttttctttatatttagacgctgagagctccttcgtaagatcatccaggctccctccggctttggcatgggccatagacgactggagcgcagtaaagatcgtctgagcatattcattattctttttaaacgcagagtgcttctgataggctgcgatccctcctccggcaattgccagaaggatcccgaaaatgaccaaaacgaccatcagctctaccaatgtatatcctgcgctgtctttcagcttatttttcatcgaagctccccctgctatcccgattttttcctgttcttaagctttgtacttgatttatcgtgtactttttcctaaacagacttatatcctttatatgtcggattataccattgattgaagatgaaaacaatcgaattcatctgcataagcggaggatcttatggcaggtgcgccaaaaaacggtttgtacaaaaggataccctcttttcagcaagaaagaattggacatatcaggatattttattatatactgataaaatcgacagagaaagaagggatgatttcatgtacacatcaaaaatcactgtaagatatgcagaaaccgatcagatgggaattgctcaccacagcaattatccagtctggtttgaggtggcaaggaccgattttataaaggcttctggtatcagctactcggaagtggaaaaggccggcatcatcactccgctcaccgggctgacggtcaaatacaggcaggcagccttttatgaagacgaactcttcgtccacataaagcttacgaggctgacgccggtaaggctggaattttcttatgaagtgattcgggaaactccttacgcggtcatcgccacaggtaccacttctcatggaatggtcagcaaaaacttagtaccggtcaatgtaaagaaggaacatcccgagatctaccggatgtttgaagagagcatggacaaggaaagatcttaaaaaatgccaggggctgcttccacaagcattcccctggcatttatatatttactgaccttcatataaaaagaatttcatttcaaccgtctgattccggatctcaaagctatccatatgctgctgtcttcttttcatcccctgatgttcatagaattcatagctgcagcttgtgtccgtgaatagaaaaaaactacggatcttttcacgctccatataagccctcatcttctggaacagcatttttccaatgccgctgccccggaatctgggatctacagcaaaaaatgcgatctcaccttcgtacttctttgctgagttcttaagcagcttttgatctatgccattgatccttccaaagatgtttgagatgcgccttccctcctttgtcaggtagagggacagaaccgataacaactgcctgatccgatacctgagcggacaccggtatgtttttatatttttccccatgatcactcccaccggcactccgtccaacactgcgacctgtacataagtctggttggcaagacagctgtttaaatacacctctgcaagtttttttgccgtctttgggccggtcagttcatcatacttccatgtctttctgatcacatcctccaatggttttctgtccatttcctgaaattctctcaagattacctgttctttcatttattactcctattctaatgcacgttgctggtatataattaccttaaagtattcagtaagtgtaaagtcaaggaggaaatcacatgaaccgcgacacgataaaaatgacaacggcacagtttgcaaaaatgcaccaggtcaacaaaagaactctgcattactacgatgccattggtttattctctcctatctccaagggcgggaacaactacaggtattatgattattctcagggaattgaattagaatatatccgcatgctgaaagagctgaatatgagtctgaaagaaattaaagaatatttgaatcatccgaatgaggcatcttttttatgcatcgctgattcaaagttaaaagagatcgaccttgaaataaaaagactaaaaggagcaaaaaaagcccttgaacagaaaaagcaacagctggaactatgcagccagatcagacataaggagatccggatcattcactgcccggaagaaaactactatgtgattccgctcccatatggaagtgaggacatcgagcaatggtatgctcttgtgaaagatacctggcataccgagcagtacagcacaggaatcggaagctatatttctgctgacaagatcagagcaggaaactttcaggattatgacggcctgttcactgccgcaccgaagagagcaaaaaacaatacctcaaaaaaacccaaaggaacttatctgtgcggttattttaaaggggattggagcggccttcctgatttttatgatgaaatactggagtttgcgcaggacagaaatctaagccttaccggatatgcctatgaaacggggcttaatgattttgcggtctccggtttggatgactatgttacccagatcatggtcagggttgaggcacagggtgatctgtgagtctgtcagtataaaggcagttcaatatcaatccaaagccatccattgctccaccgtgcgccggctgtccctcccatctgctcagacaaaagttttgcaatggaaagccccagtcctcctgcccggcttctggcacggtcttctctgtaaaagcgctcaaacatccgttcagtgtccaccttttttgcaacgcggtttccaaatgagaatcctgctttctcctccccctctaccgttactgtcacatctgattccgcatagaagatacagttacggatgagattctgtatgatccttatgagcatctcctggtctgccagcgcatagacgggatttgtctgctctatttggattctgatgtttttttcctccaggaccggaatcatttctgcgacgcactcagtgatgaatgccccaaggtttattttttcaaggtaaggttctgtttctttattggcccacagggaatattcaaaaaactgctcaattagttttcccagctcatccgcatgcttctgggcgataagaagcctctccttttgaccctcgtctgtcagagacttaaggagcagctgctgatatcctttgatcgctgtcagcggcgtccgcagatcatgggacagatttgcaatcatctctttctgttccttttcttttttaaggctttgctccttcagtttctcttcatttttcaggcactggtttatatttcccgcaaggcggataagcccggaatccatcaattccaggcttatgggctgtcttgtattctcttctctgcgtttttcaagctgccggtttattttatggatctgctgtctttgcagcaccacatagacagccagtatgacaacacctgctgccagtatgattatcatgttttttccccctcttatttgatttcagctctcttaaagactagaaaagtgatcaacaccatcaataccgcaaatccaccccccgccgcaatacttttgaaaaagatttccgactttgcattcatagacagctggattaaatatttgccgtaaaatggagtcagggagatcattttctcaaatgcctggtttccgccgctggcctggagcattccgcagactaaagagatcagatatcctattcctatcacaggcaccggtttccggaagataaatgacagcggaagacagatgctcagctgtccggcatagacaatgcatactgtaactgtgatgccgatgatcttcaggacagtggaaaatgtcattggatttccagcctccatgcatatcatcgtcaaaaatacggatggaatatacagcttaaactggctgtccacaaagaatgcggcaacagtcaccagaaagtacgggagtaccatcaggagcaggacaagaaaataggaaactgcctttcccaaaatgatctcacctcttccggtaccgcttgacactgcgtcatgtatggttttattttcaaaatctccgcataaaaacagtcccgcggatatcgttcccaatagggccaccatctgggcgtctgccaaaaaggaagcgttgcctacagctccctggcccagggtcccgctttcaaaccagtgcgccgccagcaccatgagcaccgctcccgctgcagagactaaaaacaaaaccttgagtgcggcagactttttcaatttcagtatatcggctcttacaacattaatcattctgaccgcctcctatcacagatataaagtaattttccagactatctccttccagagaaaagccggtcaccgccaatccatttttgtataagatagctgcgacctgatcctgctgatccagatggtcatacagcttcaccactccgtccggcattaccttatagtctgtggtaccgagaccttcctccaaaacagctgccagcttcgctgtttcctgacactgaattcttatatgccgcttgcagttttcatccagctgttcctggctgagagtttttaaaatctttcctttgtgtatgataatatagtctgtggcaatctgataaagctccggcagattatggctggagatcaagatcgtgatatgacggtccctgcaaagttctgtcaaaagccttcggatctccacaacccccagcgggtccaatccattgaccggctcatctaagattagaaattctggattcccaatcagtgcatccgcgatcccaagccgctgtttcattcccagagaaaaattctttgcctttttctttccggtatttgaaagccctaccagctcaagcatctcatcctccaattccttattgggaatcccctttaagaccctgcggactctcaggttctcctttgcactcatgtttccgataatcccgggatattctatcatacagccgatccgttttctttcctccttaagctccttttctccctgatgaccaaacaacgaaagactgccctgggccggaaaactgagtccggccgccaggcgcatcagggtcgtctttccggctccgttttgaccgatcagaccgtagattttacccgcctcaagctttacggatacttgatcaagggcacggaatccgccgaagtcttttgaaaggttctctgtctctaatacataatccatgcttctcacctatcctttcctttttctgctacaagtagattatagatgccaatcgtcaagaaaaggttaagctttcccgtcctctggtaaagaattggtcaatttaaaccttgaacagccggtaaccgatgccccatactgtctctatgtattgtccctcaggatttgccctctttaacttgcttcttaagttgctcatgtgagtctttaccgcgttgtcatcccccaaataatcatcttcccagaccgtctcgtacagatttgctttcgtatagaccttattgggatgttccatcaaaagctccagaatggcatactccttggctgtaaattccagatccctttctcccaggaaaacactttttgcatcctttgagagcatcaggtctttatatctgagagtctgctccttcttcctcagagaactccgccttctgagattcgacaggactctggcttccacttcgcccaagtcaaatggcttcgttatgtaatcatctgcccctagttttaacaggtcgatctttgtgccaaccatatcctttgcagagatgacgatcaccgggatatcagaaaatgtccgcagctctcttaacacctggtcaccgcttttgtaaggaagcatcagatctaacaacaccagatcaaaactgtgttccctgagctttttgatcccgtctgtgccggttgctgatatttcagccctataacctgcctctacaagacattcaagcagcatagcgctcacatccttatggtcttctatgatcaagattgtctccatcatttctcctttgttcctgataccgttacaagctgttccaaaagaatcaggcgcatcagctgatggggaaaggtcatacggctgaagctcagcttcatgtttcctcttttctggacagccctgctaaggcccagggatcctccgatgataaaaacaacttccgcatccttttcccggttccaattctcccatctacgccttagttcctctgttcccatctgttttccatcgatgcataaaggcaccacgaagcttccctccggaatcctgctaagaatccgctctccctcaatttgacgaatgcgctcctcctctttttggcttgccccatccggtgttttttcatccttcagttcaatgatttccagccgacaccggctgtttaaagttgtttcacagcgttcaatgagctttctgaggtatggttccttgatcttccccacacagatgagcctgaccttcatgacttctccctcgctggttttgtcacatcaatccactcccttgcctgtgaacaggtaaacaattcttctttcgtgagttcaatagctgaacttgcgctcccgcaggccggaaaaacagtctgaaaccgctgtaaggaccgatccagataaacttttgccccctccggattcgcaaacgggcagacaccgcctctttcatggcccgtcagtgcttctacatcttctcccctgagcatctttgccttcattccgaagaaagatttaaactttttattatcaattttaacgtctccggccgtcacgatgagaatgcatctttcctcctgcccataaaacgacaaggtcttggcgatcctggcctccgcaactcccagggcttttgacgcaagctctactgtagcgctggaaacctcaaactctttagccctctcgtccataccatataattttaaataattcctgactgctgttactgacatgtcctatcatcctttctgtccttttcgttttcttttgattattttaagctttctatgaccaaatgacaagccacttcatctccccaactttcctatcgaacaaagaaaaacccggagcctgaaacacgaaatgtttcagactccgggcaaatggaatcaataagcttaatcgtccctgctgcctccgaataaaagcaccagacggagaagacttaaaacagctgccgccgcagacgccacataggtcaaagctgccgctgacaacacctttcttgtatcctccagttcatcctcgtacatcatagcagaaccccgcaaagccttcagcgcacgacttgacgcattaaactctactggcagcgtcaccagctgaaaaagtacagccagagaaaacagcagaatccctatgttcagcaatgtctggttagctcctaacacaataccaagaataataaatacccatgagaggttggaaccaatacttgctgccggtaccaggcttccacggatctttaaaggggcataggattctttatcctgcatcgcatgaccacactcatgtgccgcgactccgatcgccgcaacggatgtggcgttgtaggttgcgtcggaaagcctcaaaaccttactccttggatcataatggtcagtcagattgccggacacacgctccaccactacatcaaagattcctgcctgatttaaaatctttgtagccgcctgcgctccagtcagcccggtgtggctgtgtaccttggaataccggctgaatgttgagttcatcttaccggatgcaatcaatgtgataatgatgccgataatgatcaatatatacgttgggtcccaaaaaactccatacataggaaacataattaataccttccttctccataggcctgtgtactccggccttcttagttatctgtcttcttcaccggataaaacccggtctgttgtaagatgcattatatctgtctaaggaattaaaatcaatagaatttatagtaatttaagattttttatactaacattctatccttccaggtaaaatttcatgcaggaattgctgtactcccgttatcttctaatttttaccgcttttgttttgctgtaactgctatatatctttttaccgtctgccgttttatatgctctcatacggatccaatacttattccccttcttgagtttagatacgattttcttagataaggttctctttaccgtatactttttcagctttttaaattttgagttggatgccacatagatcacatacccgcttgcccttttgtttctcttccagcttatctgcagtttctttttcttgatatttttagcttgcactgccggacgcttcggtgttattgtaaccgtaatgttttttgaggcacttccataaatccctgactttggaacagacgctttcaccacagcttttcctgtccctctaaccgtcacataacctctgctgtttacagaagccactttaccattacttgatttataagcaagtactccagaccctggcgtcttggcatttaacttaaatgatttggagccgtatacttttttgtaggaaactatccctgtaattttacgcgggatagagctttgcttatatattgctttttatcaaataccgctccatatcactattataacataaaaagacctttcattgaggtgttgttcctcaatgaaaggtcttctggtttatcagaattattcgtcccaattgtgccagacatcctgaacatcatcgtcttcttccagtaaatctaatgtcttctgaagattcttgatatcgtcttccgaggtgagatctaccatggtattcgggatcatggtcacttccgcgctggccatctcaatggactctgcctccagtgcttccctgactttagaaaaatcatccggatctgtaacgatctcatagctgtcttcctccgcagcaaaatcttctgcccctgcgtccaatgcggtcatcatcagatcgtcctcatccatctcacagtcttcttttgcgatcaggatctggcctttcttttcaaacatataggaaacgcatcccggtgttccgatgctgccgctcccctttgtaaaggcgctccttacattggaagccgtcctgtttttgttgtctgtcagagcttccacgatgatggcaactccgcttgggccgtatccttcatatgtaattgattcatagttgacagcgtttgcgtcccccgccgcctttttgatgcttcggtcaatggtgtcattgggcatattattggcctttgccttagccacaatgtcacggagccggctgttgttttccggatccgctccgccttccttaactgccactgcgatctctctgccaagctttgtaaagatctttcccttttttgcatcgttcttttcttttttgtgtttgatattcgcaaacttactatgtcctgacataactgtaattactccttatctttttcattttcttcttttttggtgcgcttcttctccactttcacctgtttgatcacattgtcgtggatatcgacggacttaaaagaccatccctgatagatgatctccacctcttctccctggtccggaagatggcccagctggtcaactaaaaatccgctcagtgtttccacttcttctgtgtcaaactcaatcccgagaacctcctcgatcttttccagcctggtgcttcccctcatcagaaaaatatcagcccatccaagcttggtgatctcccggtcttccacatcatactcatccaaaatatttcccacgatcacttccagcatatcttccatggatactatgccttcggtctggctgtattcgtccacgacgatcgccatatggattttctttgtctgcatttcctggaacaatgccgacagattcatggtttgatgcacataaaaaggctctctggcaatctcataaagttccagatccttatggtttatataggcatcgatcacgtcctttaaatacaaaaccccgatgatgtggtcgatatcttcctcgtacagcggaaatctggaatacggttcatccagcataaaatgcagtacttcctccagagacatggtacatccaatccctgcgatcttctttctggaagtcatgacatcggtaacatctttgtccccgaactcaaaaatattggtgatcatcttggcttcatcttccaagattgctccctgctcatgcccttcattgacgatgttcatgatctcttcttcatactcattgtcaccgtcgtcatccgcttctcgttctgtctgttcgttcagcttccccttgggcttatttttgcgttttgttccaattatgtagccgatgacggcacctaacaccagcgtcagcaacggtatcagaatcatcatggcacttaaatcttccatatacatctcctttattcatcagtcgtaataaaatataccattttacgaagaaaaggtcaatctgtccatctatgtatcaagacttaaactgatccttaatgccttgtcaactttctctaatatagaactgttcagatgacagaccttttctctgagccggcttttatcaatcgtcctaatctgttctaacagtatgacggaatctttttccagctggcatttccggcagtccaccggcacatgggtcggaagctttgccttgttcatcttgctggtgatcgctgcgcagatcaccgtcggactgtagcggttgccggcatcgttctgtaaaataatgaccggacggacgcctccctgctctgagccaaccacaggcctcaaatccgcataaaaaatatctcctcgcttaattaccataagcctaatcactctccatctctttcataatagtttatgaagagtattaacatttctttcagttctattcaatatatattccattttcacctgttttccggcttgctgtgtaaaggacatggatttctaatcttccagatagtcaactgcttcttttgctttgccgtcctgaaaatacacccgtgggacccgcttcccgatcccacacacgaattcataattaaaggatcccgccagattggctgcctcttctactgatatgttcttgtctccgtcggtacctaccaaggtgacctgatccatgacacaaacaccttcgatatccgttacatccaccataaactggtccatacagattctcccgatgatcggtgcatactgtcctcggatgatcactctccctttggaagatagtgccctgggataaccatccgcatagcctaccgggatcgttgcgatcttagtctttctttctgtgacaaaggtcgatccgtagctgaccccttcccccggctccacttcctttacatggatcacgtggctgatcagggaaagggccggcctcaaatcaatggccgacttgtctacctcttcggagggatacagtccgtaggtaatgatcccggaacgcaccatatccatacggcagtcgcaaagatccatgatagcggcactgttggaaacatgcttgaccgggatctcgattcctttgtcctcaagactccgcacaaattgatcaaatagctccttctgatgtctggccgatgtcttatcttcctcatccgcgcatgcaaagtgggtgaagatgccctgaatctttatattcggaagcttttgtatccgctccacctgcgaaacggattcctccgtcggtttaaatccaatccggttcattccagtgtccaccttgatatgtatgtttgcatcttttttcatcgtcaccgcaaacttggagattgcctccgccatatcataggaaaacaccgtctgctctatctcatgctgaatcaaagaggcatactggtattctgaagtataacccaggatcagtatgggctttgttattccctgtttcctcagggcgatcccttcctctatgatcgccactgcaaacccgtcaacgccgatcttgtttaatgcctttgccaccggaactgccccgtggccgtatccgtccgccttgatcaccggcataatcttcgtgtccgttccaacaatgttctttatctcactgatattgtggcagatcgcatccaagtctatggctgcatacactctatagtattgattcatcattgattcctcctaaaatactgctgagagcttctatgatgtcggaagccagcatactgtcatatccaagtctctttgcggcctcgtctcccgcaaggccgtggacgtacacacccagagccgcagcttccaacggttccatggcccgtcctaaaaggcttgtgatgatgccgcccagcacatcgccgcttcctcccgtggccattccgtgatttccgctgcagttgtagtaaacaggctcatctgctgacactaccagtgttgtggcatctttgagcaccaccacactttgaaacaggtccgctgcacgatgtgctgtttcaggcaggttttctttcacctcttctgctgatgtctccagcagtcttgctgcctccttaagatgcggtgtcaaaatgcacccggccggataatcgatccgcagcttgtaatggctgaccgtatttaaaccgtctgcgtccagaacaagtggttttgttccgtcggacagtacggtttctaaaagcctttttgtccgctcagatacgcccattccaggaccgaataaaatacaatcacaccatctaagagaagcttttagatcttcctctgccccgaacagcacttccggaagcatggacagaaggatcgggcggttggaggcgtgggaaatcacctttaccagcccgctgcccatgcgcagggcactttttgccgcgaaataggccgctcctgacatggattcattgcctgcaacgatcaggaccttcccataggttcctttgtgggaatctgcggtccttttgggcagtcttttaagatcttttctgtcataagtaaatccccgggcatatttttttaaagtctggtcaaagaaaccaatcctctccacaaaaagccggcctgtatgatccttgcccggatagagaagatgccccgcttttgggcctccaaacgtcactgtggcatccgctttgacagcacacccaaggacctttcccgtatccccgctgatgcctgagggaatatccacggacattaccttggctttgcttgcattgattgcctctatggcagtacggtacgaaccagagatctttctggaaagccccacaccgaacagcccctccaggatccagtcataatcattatagttgacactggtttccgcctcataacccagtcggtttaagatgcccagctgggtctttaagtctttggatgccttttcaagatttcctaccaccgcgaaatctactgagtagccttcctccaaaagaatcctggccgccgccagcgcatcccctccgttgtttccgcatcctgccacggacagaatcctgtcctgtttttggacagaagccttaatcctgccagcaatcttttcgctggcccgctccatcagtacaaggcccggcactccgatgtcttctattgtttctttatccacgttctgcatttcctggttttttaatacatatttcatagacattctcctatgacaaaagcctgtgccagttctcctgtattagtgattgacacatgaaactttgtgatcttttgagccgaagccatctgtttggctctccctgaaagttttaaataaggcgctcctttttcattccgtaacacttcgatctcataaggctccaatccgaagaagccggttccaaataccttggaaacggcttctttaactgcaaaattcccagcaagagtcgtactgtctgagcccgcgtacgccagttctgattctgaaaatatccggctgaggccttttttcctctcagtcatcttctgaatccgcccaatctcaacaagatcagtcccaattcccacgatcatgacgctcctcccgtctactccccggtgtcttcgttgtcttcccggctgtggatattgtaagtcagtgtcatgagagattctgccagatgcacgttttctacggtaacgctgtccggcagtgtaagatccaccggcgcaaaattccaaaagcctttgatgccccaggatgccagctctttggcgatcttgggcgcctggtcctgcggaagtgtcagagcagcgatcttgatctcatgatttttaataaattcttccatatcatcgatatcgtgaacttccacgccgtgcacagtgatgccgatcagtttcggattcacgtcaaaaagcgcgatcacctggaatccgatgctgttgttgttgaaatcctgatagttggccagtgcctggccgagattacccgcgcccacgatgatcatctggttactcttatcaagccccaggatcttaccgatctccacataaagattttccacgttatatccgtatccctgctgcccgaaacctccaaaattattgagatcctggcggatctgggatgcagtcaccttcatccgctcactcagttctttggaggaaatccttgtaatgttctttgctttcaaggctcccaaataacggtaatatctaggtaatctctttataactgccggtgatatattcttatccattgatgacattattaccctcccacttattttatcaacttcctaaattaaataaattatataagattgtctaatatctgtcaaacttttagtgcgttttttcagaaattatgttatgctaataaagaatttttattgctaagaagttttgaaggagtacactatggttttatcttgtcagaatatacataaaactttcgttgaccaggaagtcctgaaaggaatatcctttcatattaatgaaaaagaccgtcttgccgtgatcggattaaatggggctgggaaatccacccttttaaagatcatcatggatcagatgacccccgacgagggagagatccacaagaaaaaggatgccgagattggttatctcgcacagcaccaggaccatacttcctccctcaccatttacgaagagcttttgaccatcaagcaagatgtgatcgaactggataaaaagcttcggtccctggaacagatgatgaagcatttaagcggcaaagagcttgaggataagatggaggaatacaccagagccacccatttatttgaacagaaaaacgggtttgcctatgaaagtgaaatcactggtatcttaaaaggccttggttttaaagaggaagacttccagaagcagatcgcaactctctccggtggtcagaagacacgggttgccctgggaaagcttctgctcatgaagcctgagatccttcttctggatgagcccaccaaccacctggacgtggaatctattcagtggctggaaacttacctaagccactatgaaggagctgtgatcttagtctcccatgaccggtatttcctggacaagatcgtcaacaaggtcatggagatcgaggctggacatgccatgctctttgatggaaactattctgcatttatccagaaaagagaccaggtaaaagccattcggttaaaggaatacgaaaaccagcagcaggagatcaaacatcagaaagcggtcatcgaaaaactcaaacagtttaaccgggaaaaatcgatccgccgtgctgagagccgtgaaaaaatgctcgataagatcgacgtgatcgagaagccaatggagattgacgggaaaatgcgcttttccatcgaaccgtccattgtcagcgggaatgatgtcctcactgtggaacatctggaaaaaagctttgggtcacatacgttgttttccgatatcgattttgaaatcttccggggagaacgtgtggcgctgatcggcgccaacggtactggaaaaaccaccatgttaaagatcatttgcaagcagatggcaaaaaacaaaggacagatcaaactgggctcccaggtgtccatcggatactatgaccaggcccaggacaacctgcacccggaaaagaccatctttgacgaaatatcagattccttcccagaactgaccaatacaaagatccgcaataccctggctgcttttctttttaaaggagaggatgtcttcaaactgatctcctccttaagcggcggggaaaagggacgggtatcacttgcaaagcttatgctctcccgtgctaatttcctgattctggatgaaccgaccaaccatctggacatccattccaaagaaattctggaatccgccttatcccaatacacaggaactgttttgtatgtctctcatgaccgttatttcattaacaagaccgccacaagaatcctggagctttctccttccaaagggcttcactcctattccggggattaccagcattatctttttgaaaaggaaaaggaaggaacagaggaactacagacagccgaaggtgaaaacgtctcagacaccaagcttaactggcagaagcaaaaagaggaagaggcaaggcgccgcaaaactaaaaaccggctgaaaagggtggagtcggagattgaacggctggaagaggaaaacacaaaactggaagaagaaatgtgtctcccggaaaacgctgtaaacacacaaaagctgctggaactctccacagccaaagcccagaatgaccaacagcttgaaacattttatgaagagtgggaaaccctctctgaagaaacagagtagcagataacgttgtttagcactgctgccaacgcgcatttcatacccttcgggtgagcgtgctccgcactggcagctcgttaaaaatagtgtaatatctcacgaaaggcgccaatctacgctagtttttctccgctgttggaaggaggcctttccagagccgactgagaacaatggagaaaaacttatagcattttttcgtttgtttgtttataatagacagagtaccatttttaggaggttacaaaatgaaattattatcattcgccgtaccgtgttataactctcaggaatatatgagacactgcatcgatactttactgatcggtggtgacaaagtcgagatcctgatcattgacgatggttctacagacaataccggcatgatcgccgatgaatatgaaaacaaataccctggcatctgccgtgcaatccatcagaagaacaaagggcatggaggtgccgtgaataccggtattgcccatgccaaaggaatctactttaaggtcgtggacagcgatgactgggtaaacgagcacgcttatgaagagatcatgaagaaattggagacattttaccgtcagggaacgattgttgatatgtttatgtccaactatgtctatgaaaaacagggcgtgaagaaaaagacggtcattcactaccgccattccatccctattgaggagctgtttacatgggatgatgtgaagcgtttcccactgagccagtacattttaatgcactccgtcatctacaggacttctctgctccatgagtgccgcttatgtctgccggagcatacattttatgtagacaatctatatgtgtttaaaccgcttccttatgtgaagacgatctattacctggacgtgaatttctaccgatattttatcggcagggacgatcagtctgtcaacgagaacaatatgatcaaaagaattgatcagcagttctttgtcacacaggcaatgatcgactacatgagcagctttgagcttgtgaacaaaccattataccgctatatgaaacattacctgagtatcatcatgactgtctcttctgtgatcgccatcaaatccggcaccccggagcacattcagaagaaaaaagagctgtggagatacctaaaaaccaaaaacaaaaaactttaccgtcagatccgcggatctctggtaggaaatgccgtaaaccttccgggatatggagggcggaaagtcgttatcgcagcctacaaagcagcccggaaatttatcggctttaactaagaattataaagatgacattggatccttatcggtttcaatgtcattttctattatctgctctgttcttccctccactataacaccaggctttttgtttgtgctaccatgaagatagaaacggaggtggaatcattatgaacacttataaaacatctgaaatcgcgtccatgatcggaatacacccaaacaccgtaaggctgtatgaagaatctgggctgataccaaaaccggagcgtcaggccaacggataccgtatctttaccgatctacatattgcccagcttcggctggcccgtctggctttccaaatcgaggtactgcagaacggccttcggaaaaaaatcgtacagatggtaaaggtatctgccttgggggattatgacacggcacttcttctgaccaacgaatatctggaccagatccgtaaggaacgctttaacgcggaagaggccatagagatcgtaaatcagatcatatccggcgagagttcagaaaacactctttcccttaaaaggaaggaagtatccgaacagctaaacatcacgatggatgccttaagaaattgggagatgaacggcttgcttacagtcaaacggagacaaaacggataccgggtgtatactggagaggatatcagacggcttaagatcatccgttccctgcgctgcgcaaattattctttagaagcgatcctaagaatgctctcccacctttctaaaaatccaagggcagatatcaaatcgatattggacacgccgaaatccgatgacgatatcatcgctgtgtgcgataacctgatctcttctctggcagatgcggaagaaaacgccatagacatgatccgcatgctaaaagaaatgaaaaaatttttttcctaaaccctccactttaccaccagcgtttctgttggtggtattcttttgttacaaaaaacaaggaggtatcaatcaatgcaagaaatcatcaaagtcagtcaactgacaaaaacatactccgggactcctgcggcagatcagatcagtctgtcggtaaaccgaggaaccgtattcggtctgatcggcgccaacggtgccggaaagagtactgtgatcgagtgtatgttaggcacgaaaaaagctgacagcggcaaaatctccattcttggaatgaatccgcttaaagaaagaaaaaaactctttgagaaagtgggagttcaatttcaggaaacaaattatcaggacagtattaccgtacaggagctctgtcaggtcactgcttctctttaccatgaagctgaggatcccctggagcttctttccaggtttggaatcgcggataaactgaaaacccaagtaaaggatttatccggcggtcaaagacagcgtcttttcattatccttgcactcatcccaaaacctgaagtggtttttttggatgaattgacaacagggcttgacgccagagcccgtcgggaagtttggaacattctttccctgctcaaagaaagcggactgacaatttttctcacatcccatttcatggacgagatcgaaaagctatgtgactgcatctgcattttgaagaaaggaaaaatcatattttacggcaccgtgtccgaagcaatcgactcaagtccccacagtcgatttgaggacgcttatctttggtatactgacgaggaggaactgacatatgaaaacttataagacaatgctgaaaaatgagttaaaaatatccctgagaggtatggatatggtcatctttgcgatctgcgtcccagttgtggccctggctctcatcggaatcctttacggaaataaacctgctttttcaggtgcggaatttacttttctggaacagtccttcggggctgctgccacaatatcaatctgcgcgggaggagtcatggggcttccgctggtagtgtcggactacagaaacaaaggaatattaaaacgctataaagtcacgccggtacacccttccatgatcctgctggtacaggtgacagtctataccttatatgccataacctctcttttgctcttatatgctgaggcagtcctgttttttggatatcaattccgtggaaatatcatcagttttctgggctgctatctcttggtcatcgtctctacgttcagcatcggcatgatggtcggcggaatcgcccccaacgccaaaatagcaagtgtgatcgccagtctgctctacttccctatgctgatcttttccggtgcaacactgccgtatgaagttatgccgggagcactgcaaaaggcagccaatctattgccgctgactcagggaatcaagctgctgaaagccgcttccttgggagaattcttgggcagcactgcagttccggttatttcaactatttgtgtagccgtagtctgtagtcttatcgctcttagattttttaagtgggaataaaaaagcggccggttatttgctggggttagatagcgatactttttacatctaccatgttgcggcggtcatggttgacaacttgcgtcggctcctgctcggtatcaacctgtccgacaaagctataatggatttcgattttccgggtgttggtttcccggtctaattcatgtatcaaaatacggtcgataaactcatggacgttttcataggtcaattcctgtatgtcgctgtatttcccgacaatctgaataaaccttgatatatccctttttcgctcggtaacggttgcgatctgctgttgtaactcgtctatccttgcggcaagggatttcttttcgtcctcatagccggaagttagaaacacaaaccgttcatctgtcagtctgcctaatgcgttgtcctcatacagcttgcggaaaagcgtgtcaagttcggtcatacgcgcctgtgctttgaaaagttccttttgctgctgcgctaatgcctttctcgcttccatgtcgccgtactcggtagctttacagataaagtcctgttcgtgttccttaacataccgcaaaacccgccgcatatcttccagcactaaatcaagaagtacgtttttgcggatataatgagaggtacactcgctgcctgtccttgccctgttgcgccatgcgccgcaagaataggaaaacttgcgcggctcgatatttacgccctgttggtaatacatcttatgtctgcaaccagcgcaaaacagcaagccggaaaaaatatcaatctccgctgcttttgtcgggcggtggcgggtagcaatccgcttttgcgcaagttcaaaggtttcctcgtcaacaagcggctcatgggtgtttgggaagaaatagcgttgttcttcttcgttcttccgggtctttttcgacttgtaggataccttgtgagttttcgcggttatggtatgccctaaatattcctgccttgctaatatgtcatagagcgttttgtccggccaagtatagggggcgatcattgcccgctgataccgcgcctgtcctgtacgctgatagcgcaacgctccaatcgtcaagactttgttttccgcaagccatttttggatttcgcacatacgcacgccgctaacaaacatagcgaaaacctgtttgacaatcggcgcggtttccgggtcgggtataaggtggtggcggttgttcgggtctgggatatagccgtatggatattccccgttgacgcgctcgcctttttgcgcctgtgcctgtttaactgcgcggattttcttgcttgtgtcgcgggcgtaaaactcgttaaaccagttccgcaagggggtaaactcgttatcctcccgcgctgtgtcaactccgtcgttgatcgcgatatagcgtactccgttttcgggaaatacaatctctatgagttcgcccgttttcagatagtttctgccaagacgggaaaggtctttggtaatgaccgtcgccactcgtccggcttccacttcctgcaacatcgcttgcagcccctcgcgctcaaaactcacgccggaaaatccgtcgtccacaaaaaactttgtgttcaaaaaatggtgttcgtccgcatagcgttgaagtatcattttttggtgctgtatgcttccgctttctccggcttgcatatcctcttgacttaaacggcagtaaagggcggtgattttattcgactgtaacattagtcctcctttccgacagccgaataaacaggtataatgtgttgctatcattataccatatcccgccgcctaatgcactactcggacgctaaaaatcccggatttccgggctttttctgcaaatcctttacaatgagtttctcaatctttttatggattgtatcggttgccttttcactcggcaacgcttgaacaagataggtgattttccctattttgcgttcggttgtaattgtctgttttttatccattagaaaaacctccttttcctgtatggataaactatattcgtcaaaaggcaaaaacgggcggttgttagctgcaacctcacgggagtttcaccccggcccatgcttatgggtgcgccgcgcaatactttgagggtgttcaacgcgggagtatcattgtgccgccttgtatgtcgtcgcccacaagctgctaaacctgttttacggcgcggtagttctcgctcggcttttcccctatggggaaaagctgtcatggcgtacccgccgactggctcggtacagacggaatgtacccgtttgcctgttatgctgcgcaccaaaggccgctttctttgtcaaagaacaataggctttgtcggcctgcaaaagcacatcaacagcggatatgcttttgcggaacgacaaatagcccataacgggaagcgtggaaaggggacacgctccccgcatgggctaaaagattatcctacatgaaaagcaagggtgcgggtaataaggcgcacttgcagcctgttacgcatttcctcgtccacataggaataggtattgcccgcgtcgtctttcagcgtgcgggtacaaagtttcgctatgtaaccctcgtagtgcttcaagatcgcgcacatggcggttgtgtcgccgtttgccgctgcggaaatgacagggaacggcaacagattttcagacttcctaacggtattcatcatctgcttttccctccaaatactgtttgattttcgcaagcgcggatttcctgtgccggaaaaccgtcgtgcgtacaacattcagcagttcgccaatttccgcgtcgctcatatccaagaagtaggacaaaaggataatgtcgcgtttcctttcgggcaaagcgttaagggcttcggcaagcagttcatttttgacgagtacatcaaagccggacacttgaaaacggaaataatcgctttcgtattcgtccgttgtgaaaagctgcgcgagttcgctttcgctcaaatccgaaaaagtaacttcgcgtgctgcgcgtttcgcaagagtgcggcggtggcttttcgcttcgccgaccaaagttttctttgctaatgcgtcgtactgatgttgtattctttccttgtcggaagaagatagctccatagagttcacctccttcccgcgtggagtagaggacgggagttaagggcttgtcctctctgcccctttcgctccgtacccgttcgggagatggctcttgagtgcgcttttcagaaaaaagttgaaaaaagcaaaatgcgcccgtccgcaagacgcggacgggcgcaaaggaaatgtaagcagtagctaaatgtattgacagttcacattcatagccggaatatcccgcttgcggagcatagctttttttgaccgcaaagcattaggcgggttacagtaaataaaaatggacacggcgatacctccccgataccgccgtatccttaaaaaagggcgactttaatacactacccgcaatccattctataatagggaacagcggcttttgcgcaatattaaataaaaaagccgataacacataggttttttgacctaatgcgttatcggctctgcgtctatgcgtctggcacttttaatcatttttttttgaatttattatatgtgttagctaactgtccacaagccgcgttaatctctctgccatgagaaactctcatagtaacttcaagtcctgcttgctctaattgatgtttgaatgcaactatttcccgtttctgtggtgctttaattcttgaattgcttgttgggttgtattgtaacacgttaatcataacttttttgccccgaaaccattttgcaagttgtcttacatctgagggccggtcatttatacccggtaaaagcaaatacgcaaagacaattttgcgattatgcctttcagaataggataaggcttgcttaacaacatcttcaatagcatatatgcgcatgtgaggaataatacgatttcttgcagattgtgttgctgcgtgtaaagatattgtcaactgaattttaagatgttcctcgcgcaatttttttaattgatcgaccggaccaactgttgatatggtaatgccgtcggttggaaagttgagcccatatctatctcggagaatatggattgcttttatcaagttgtcataattgaataaaggctctcccatacccataaaaacgatacggtttacttttcgacgcaacaatataatctgttgtacgatttctgacgatgttagattacgaacaaagccatttcgcccggactcacaaaaaatacaaccaacaggacaaccgacttgtgtgctcacgcaaacagttccaccatctcgccgcttgataaaaaccgtttcaatgtatttgttgtctttcagttcgtaaacatacttttcagtatcactgcttttgcaaatattttttaccaacattgatagattttttttgcgtggtaattgcttatataattcttcatataaggcttttgcttcattctcgccaataacttccgacatttctttgtaagtaaatccgtatggatcattccgtacttccgcaggcgtatatttaggtaaacgtttcatttttatatcctttcttctaaataataaaagtttgtttttctgtatttttgattacaatctctaatttttctacatcaatgatatgcgtcaatttgcatttagggcagaaaagaggaaaatcttttaatacagtattatgaaatacttgaactctcgtctttccgttacaaatcggacattttatccaatattttttaagcattatatttcactcgtcctttttacacaaaaaaatgcaggtcaatcctcaacatgagcattgacctgcatttataatgcacagagcagtacaacaaaactaaggcatagcttgcactatgtctatactatatctatacgtcgttagttttttgtatagcatccgcaaaataagcatgacaaaaaagcccatgttgaaaatgggaaaatcctttttttcaatgcttatctaatacgcatgctatgcaacataaacgccgcctccttttacataaattttattttatcagaaaatcagtctactgtcaatacacaacaggaagtatttaacctaatgatatgaattgtgtggacatatccaaaaagaaaggtgaactgtaaaatgtaacagggtgaatgaaaatggcaaaaagacccgtaccattgtacgactttaaggctttcggggcagctataaaagccgcgagaaatgaatacggcgagagccgcaaaaaggtaagcgacgagttatatatttccccgcgctaccttgcgaatatcgagaacaagggacaacagccgagtttacaggtattctatgaccttgtaacccggtatcatatttcggtagatcaatttttcttcccgaacagcaatgcggagaaatccaccgggcggcggcagcttgacgcgctgctggacggtatgagcgataaaggcatacggattgtaaccgcaacagcaagggagataacggaagtcgaaaaagcagaggattaacctcacaatatgagaaatcgggagattgcagcgcatggcggctgcaatctttttttgcgtccaaaatcaaaggaacgcgcaacaaataccgcctttcggtgggggtatggagtagatagcaagcacagcaaacgagtacccgtttgcggaaaatgcttgttgggataatcccaaacccttataccgaaaggcggtgcggaaatggaaaaccgaaagagaaatatacagatgaagttttacgttacggaagaagaaaagcggctgatcgacgagaagatgaagcagcttcccataaagcagtatggggcatacttccgtaaaatggcgatagacgggtatattcttgtcgttgaccgaagcgacacaaaagcatatatccgggaactgcaagcggtgagccggaacatcaaccaaattgcaaaacgcgccaatgcgacggggacggtttacaggcaggatatagaggacattaaaaaggcggtggacgagatatggcggttacaaagacgcaccctattaaatcaaccttaaaggctgcgatagactatatcttaaatcccgaaaagacagacgggaagctgcttgcgtcctctttcggctgcgggctggaaaccgccgatattgagtttgcatggacgcgggaagctgccggagatcgcggcacacatttagggcggcacttgatacaatcctttgcggtgggagaaaccacaccggaagaagcgcacaaaatcggcatggaacttgccggggcggtattaggcggcaagtatgagtttgttttgacaactcacgtcgataaagaccatctgcataatcacttgattttcaacgcggttagcttcgttgactacaaaaagtaccattccaacaagcaaagctatcactttatccggcgcaccagcgacaggatatgtaaagagcatgggctatccgtcgtcgtaccgggacaggacaagggaaaaagctatgcagaatacaccgccgaaaagcaagggacaagctacaaagcaaagctgaaaacggcgatagatactctcattccccaagtgaaagattttgacgaactgctgcgccgcttgcaggaaatggggtatgaaatcaaacagggcaaatacatttcctttcgcgctgccggacaggaacggtttacccgcacaaagacgctcggcgcggcctatacggaagaagcgataaaggagcgtatcaagggcgtgtatgttgccaaaacaaaaacgctgcgggaagataagaaaatccggcttgtcgtcgatcttgaaaacagtatcaaagcccaacagtcggcgggctatgaacggtgggcaaaaatccataatctgaaacaggctgctaaaagcatgaacttcctaaccgaaaacaagattgagtattatagcgaacttgaaagcaagatagccgatattatgaccgctcatgacgcggcggcaaaggcggttaaggaagtggaacagcgtatgtctgatttgtcgctgcttatcaagcacaccaccacataccgacagttaaaaccgatttacgatgaataccgaaaatcgccggacaaggaaaagtatctgcgggggcatgaaagcgaaattatcctgtttgaagctgcggcaagggcattaaaggaaatgcagataaagaagctgcccgatctcgccgcgctgcgcaaggagtatagaagcttaaacgacaggaaaaccaaattgtatgaagattatcggcaagccaagaagcaaatgcaggaatacggcgttgtcaaaaagaacgtcgatagtattctttacccgtcccaaagcagggcgcgggagcaggagcgataaggcgcaaaacatggggtggcaagtggaatgttaagggctgaaaacgcctgtgtttctgcggcttccagcgcatgaaaacgacatagacgataaagtatattcaaacccgcaaaaacggctttctaattgtccacgcaaggacaaaaaaagaacaggggcgcggtgccggaaatcggcaaccgcgcccctgttctctatgggctattcctcgtcggtcaagataaactccctttcggaaaactcgctgtccgtcatggcttgcagcttgttcaccgctgcggcggcaagctggcgcatatcctcgtccatgtagggcatggcggcaaggatattttcaagcgttgtttcccggctgtcctcggcgtagatcgcaacaatgttttcttcctcaatggtaaagcgggtattcatgctatcaaacctccaaatcctttttatgctctttctgtttatctttcggctgctgcgccgcctgtttcttgtattcgtccagcttcttcaaaatggacggttttttctgcggctgttcccgtttctcggcttttaccgcttttgcaaggtcggtaacggaaatcgcttcccccgcctttgcccgctgctcaaaatctgcaacggtgggcgtttgcggcgtattgttgataagcccgtcaaaattgttgtcgttctgctctatggtgtcctcgacgtgctttaagggattatcccgctgcggctgctcggcggctatggcataagcctgtgtgccattccccataatgagatacttcccgtcctccgacgcatggtgaaaaccaaatcccgccgcttcgatctgttcacggctcatatcggtaatatgaaaattgcccctcggcgttctaacggtttcacccgtcaaaaggctgtcgggggtcgcttccggctgctgcttttcaagctgcccgtccttgtaggaatatccttgcgccgcgattgcttcaagggtcttgcccgtaacgtcgccataaatccgcttgtctgcgtcaaccagcatttgcaaagtgtcttgtacggtgtcggacaaggcttgctgctgttcgggcggcagcttgtcaaatacgggggtctgctgctcctgcaaaaactccggcacttgctgaaaaccgatactgtctacatagtgggcggtgtcctcgtcgttctgatgaagcacaacaatgtcggaaacggaaaggctatgccccttaaagtcggcggggtggtcgatattaaacctttcccaaatgtcgcccagcgtcatatcctttgtaagcggtgcagtatagacgagttcataatttacccggtcaatggtaagtccagccgcttgcagacggtcataaggctcaaagcgcaagtcccttgtttcgtccccgcgctttaactgataaatggaaaaggtatcgccctgctcctgctcggcttgccgctgctgctgcaactcggtaaaatgcccctcaatctcggtaatgagttcctttgcggtggtctgtattgtttcaagggacgcttttaactcggtcatttccttgccgctgctccaaccagccacatagccgaaagagtaatcggaagtatcaaggccgaaatgctggcaaaccgtataagcgacgctttccgcttctacctcgcaggtatggcggtcaacgcggttttgctgctccggcggggcgtttaagtctacgtcgtgcagcttcgcatgggcgatttcgtgaatggcggtctttaccgcctgtaattcactcacgccctctttgattgcaatacgcttgtcggtcaaactgaaatacccatttgcgccgtttgtgatctgctcaaatgcaatcgggacgggggacgctttttcaagggcggcgaaaaaatcctcgtactgctccacatcggcaagcagcggtttaacggaaaggtcgggaaactccttgccctcggtctgcgaaatatcaaagacggttataaccttaaaggcggggacggtgatttccttttcttcctttaccacttttccctcgcggtcaagcatgggctttctcgtttcggggtcgattttatcaaccagctttttcaccttgtagggcgcgggggcaaagattttaatgcctttctcgcctttctttacatggcggtcaaactccttttcccattgacggaagcccattaccaaattgccgccctgcatagcaattaggatagtgttattcaaactataatcatggaactttgacatagcggttagaaactctttgtagcggtcgctgtcaaaaatcgcctgtacgccctgttccaaacgcgcggtgatctcctttaccttttcggcgggcttttcggaagtaaggataatggggacgacggggcggggctgctgcggctctgcggcctgtgcgtctgcttgctgcgtttcggctgcgtccatataggctttgtcctgttcgccgcgctccggctgcgggtaactcataatgcggtattcttccggcacttcgcgcccctcaaactgccgttcccactcgtcgccgctttccacgatatagccgtactcggtaaacgcgcctttttcctgcgcggcagcgttcctgccaaaagtagaaaggtcaatgccgcctttccattcttcgggcatttgtaccatgccggattgatttaagtaatagtcgcccaaatcgtggtagttatgtacttcggggatatggacgtaaaaatccacgttgtaggtgaagtcaattacctgtccaatatttgcaagcccgtttttctgctgcaaagctgcgttcagcttgccaacctcggcggggtcaagctgttcgagccgcgccgcaagaaaattgagttcgtccacgtcggcggcgcataccatttcataaggcaaggcaatatgtttctccgggtcgtcggaatagccgcgaatggaaaaatcctgcgggttgtcggcggtaatgccgacgttccgcatagcttcgtgcaactgctcctttgtggcgggcatatccaaccaatagccgccggggtcgcccgcgtcaaagcggctgcggttgcctatcataatagaaaactgttcgctcatgtgttcacgctccttttcctgcccggtattttcggggatagctgccgcctgttgctgctgcgggggttcttcgccctctatggtgtagtccggcatgagcataccgtttactttgaaatagtcggcgtactcctgcgggataggcggggagatttccgtaaacaagcggtcatacgctttgatacgcccattcagatacttttccatagctgccttgtcggtgaaaacctttctatcttgtccggcaatcttcgcttgggttctgcttgggctgttggtgcgcacgctccatgtaagcgtccatgaatacgggatagatttctgcgcttctttgtcgtagcgggtattctcgtaaatgtagtaattcatctgatatacccggttgctgcgaatatggcggttatgctcggtggtctgccactcgttagcggtgtgctggacgtgcggcgttctcacatattcaagtgttttatccagcaaaagcgttcttcccgcctgttcttcccatgcggcggcgcgttctttaaggtcgtcaaaaatcgcctgttctgccgccgcgctttcgctgcgcatggaaagtagctgcgcaatcggcaaggaagcataaggggcaatctccctgtcctttgcttcaaaatatatccggcgttctatccgcatggtttcggcggcttctaatttgtcatggtcgtatgaggaatacggcatattctttcatcacgtcctttctcggtcatataagggtttgggactatcccaacaagcaaaatgcccgcgctctctatgggaagcgcgggcatttctcgcaaacgggtactcgtttgctgtgcttgctatgtagttgtttttatccgtaaacgcctgtttctctcgctttgggctttctgtctgcggcgtatctttgccgcgcaatcggggcagtatttcgcccggttgctgcccgccgcaaacgtgctgccgcataccgcgcaacgcttcaaatcggtttccccgctgcgggtgatctgttcgcaaagctgcctgtcggcgggtaataccgcttcgcggaaatagcggcatagcagcgaatagctgatactctgcacacaaacgcaagtttccccgtcgtccagcagcagacaattcccgcaatcgttgtttgcacaagcggcgcgggtcattttctttacggcgcggtattgcttttcatcaagccttatcattttcggttctgctcgacgcggaagtttacatacttgccgcctgtgtcggcaagcagcacaactccgtcaaaggtctttcccgtcttggtcgagtacatacctttgatttttacctttccgtctttcaaaagggcggcggcaatcgcctttgtgaaagcctttttgcgctgctcaaaaaagcggtcattcttccacatcacaaagctgcaagccctgtcggagcagtaaaagtttttcttgccctcgtaaaccgccgcgccgcaacgggggcaagtgccgattgcttcccgctgcggggtaaacagcttcgctttatcctcggaaatcgcggaataggtcttgacaagccccgctgtcatttcctcaatcccgcgcatgaagtcggcggggctgtcgctgccctttgcaatcccggtaaggcgcgtttcccattctgccgtaagctgcggggacgtaaggctgtcgggcagaatagcgacaaggttatacccgtcctttgtggggattagctttttgcccttgcgctcggcaaagcccgcgctaatgagtttttcaatgatacccgcccgcgtcgcggtggtgcctaaccctttgcgctccgcgtcctccggcgtgtcctcctttcccgcactctccatagccgaaagtaacgtatcttcggtaaatgcctttgggggctgcgtgtaacgttcggagatctccgctgccggattgtcaaaggtctgcccctcggcaagcgggggtaaaaccgcttccggctctgcgtcctcgtcctgttccccggacgcggcgcgggatagtctttcaatctcgcgccaaccctcgcaaagcgtcgtcctgccctttgcggtaaaggtatagccgccgcaagtgaaaaccgccgtaaccgcttcatactcatagggcgcggcaacggcgcaaagcagttttgcgcacacaagggtcattagctttttctcactttcggcaagggaagaaaagcccgttttcacaaactccgctgtcggcaaaatggcgtgatggtcggttactttgctgttgtcgcaaatcctcgcaaggtcggcttgcagcttcacgccctgcataaaggggagagcagcgcaaaggccggtgataagttcctttgtgctgccctccatatcggaagtgatatatttgctgtcggtgcggggataggtcaaaagccgtttttcataaagggcttgcgcatagtcaagggtctgtttcgccgtaaacccatacaaacggtttgcttcccgctgcaaggcggtgaggtcaaacagtttcggcggggctgcggtctttttctcttttttaagggaagtacaaacggcctgcgatttctcgcaagccgctttcatctgccgcgccgccgcttcgtcgtcctgcctttcggaaagggcggcaacgccgccaacgtccagccggacgacatgatatttctctttcttaaagctgctgattgcatagtcgcggtttaccagcatagcaagggtgggcgtttgcactctgccgacattcaatgttttatggtagaggatagagaaaaggcgggtcgcgttaatgccaatgagccaatcggcctttgctctgcaaagcgcggattgatagaggttgtcatagccgcgcccgtctttgagatttgaaaagccctcgcggattgcacttgcttccatgctgctaatccaaaggcgggaaaagggctttttgcaattcgcctgttcatagacaaagcggaaaatgagttccccctcgcgcccgctgtcgcaagcattgataatctcggtaacgtcgctgcggtgcataaggtctttgagaatggaaaactgctgctccttgccgctggcaacaataaactgccactcctgcgggacaatgggaagatcgtcgtacttccatttacggaattgttcattgtaggtcgccgcgtctgcaaggctaatcaaatgcccgatacaccacgacacaaggtagccgccgccctcaaaatatccgctgcgcttttcattcgcgcccataacggcggcaatcgccgccccgacgctcggtttttctgcaattacaagtttcatagattatcgtcctcctgctcggtctgttcggtttcgactacttccgtttcctcgtcgtcctcgtcaaaatcaaggtcgtcaaggctgctgctgcctttcgccgcgtcctttttgggcttcaaaatcttaaagtagtagaacgcgccgccgcccgctgcggcaacaagcagcacgacaagcagaatacccatgccgccgcctttttcttcttccggcggctgctcggtttcttccggctccggctcggcttccacacccgcgcactcgctcatgttgacgctgcaaaccgggcaagcggtgttgacgcttccggcaacgcatttatcggtgcagctacaaacgggggcttcggtctgcccgtcctccataagggcggttaaatccgcttcgtccacttggttaaggaaatggacggtattttccccgtcctcggcgcggtcaatgatgatgtaaaaatagttgccacttttggtaacgacggtgataaactgcttgtcgccggacgcttcacccgttatatcgtccacaagggacatattcccgtccggggtaaggggctgcggctcatagccgcccgtcgtttcttccggctcggtttccggcgcgggggtttcctcggttacgggggtaggcgtgtcgtcgctttcatcgccaccgcccgcataagcggtaacagaaaagccgcacatgataaccagtgcggcaagcaatacggtaaactttcggattatctttttattcttcattgtcgttgtcctcctgttcggcggggtaagtggcttccggctgcggcaaggtgatttcgccgctggcgtaagcggagaggaacgcggcaagctgcgtcccgtcaaggtgtaccgcctttaccatttgcacgatctgcgcgttttcttcctcgactttctgcgcttcaaggtctttcagcttcttttgctgttcaaggatttttgccctcgttttctcaatatccctttcgatacggtcaagtttcgtgttcgccatagtcatttactcctttccaaactgttctttccatgaatagctgcgccccaatcccttaacggttttaagatagggcatagcgttttcttccaaagtcgccgcccggttaaatagatcgggatagtgttctttgagatataaaatctcttgtttcttcatgctcggacaaaagaaacaggacgatttacccggctgcggcaatcctgccgctttgatttcccggatacaatcgtccctgttccagccccattcttcaatgagggggtagcggttatgatattttttgtcggcttcgttgtacttgcgggaatgttcataccgtttcacttctcccgcgtcatagccgatatagcggttgactttctcgccgcgctgccatacttcgcggcaaggcgcatagtggttgcaaaacttttcctgcggtgcgattttgtgtttctgcgaacaacgcttatgcccgtaggcaatcgacgggagcgtatgagagcgcaagcactcggtttcaagagataggcggttgccgtagcggtcaacatactgcacaacggtaatctgcggcataccgtgttccgcaagccattgattgattatctcgataaattgataggtatgcgggtgttccgcgcccgtatcggcaaaggtgataaggtcaatcgggattttgtgcttgtataggccaataagtaaggcggcactattcgtgccgccgccaaaagatacaatattcatttttcaactccttttaattgtaatttaaccgcccgtaggcgtaaaagtgggattgccaatagctggtgtccagctttgaatactggatagggtcgccacaatgcagcatgacggggcttccgtccccgtcctcgcccacataaatccccacatgggaaacgccgggggtgtcgtatgtacccgtaaagaacaccaaatcccccggctgcgggttagaaacaggggttgagatgttgtaaagcccttgcgccccaagtctgcccgtattgtataggccgctgttcgtcaacacataactcacaaagccgctgcaatcaaaagaggtttccggggtgctgccgccccacacatagggaaaaccgacgtatttatctgcttcctccatgagccgcgcaaacttttcatcggaacccagcagcgcggcgggtacttcataatcggcgggcgggttttcatagtatttagacacatagccggattgcgggaaaaggtcgggtctgtttcccagcgacgacatatacatagcgtacatggatagctgttcttcgcccatgatgtaaacggggacatgggagaggttgaagttttccaaatccacatgaagaatgtaatagttataggggacttcaaccgtataggggttgccctcgctgtccgtccttgtttcggtgcggtagcgtacctgtacttcttcctcgaccgtcaagatatactgtttctcaaagagcatttcaagggtgctttgcacttcatcgagtgtaaacacgccctcatgccacgcggaaaggatagaaattagcacataggggtcatgctcgatctcgtccgcgtttacccggtattcgtcatagccggggtattcgctttcgatattgtccagcatatcttgtaactcggcttccatagcggcatacgcgctttccgcgcccgttatatccgcgtcctcggagagataggacgacgcaatcaagccgctgccgctgttgccgccaaagagggagcaagaggacagcccgccgaaaagcagcagcacgataaaggcaatcccgcccacaatcaagcagcctttccaatgccggacaacaaagaacgtcgcccgtttggtttcctgcgcggttttcttcgccgcctttgcggtggcttcagcggtttttttcgctttgccgcccgctttcagcgtttttgcatactgctttttaatgcgctgcttctgccaaaaacgggaaatggggttggagtgcgcaagcgcggggttatcgtgcaacgccttttgatagagaaaatctgcgtttgcctttaccgcttgtttttccgctgccgccgctgcccggtagggtttcagcttatggcggcgtatgccgcccttaactgcccgcgccgccatgccgcccgctttctctccggcaagttctacccggtgcccgctttccacaccgacgttttctttctctacctcgtagattttcccatgtacggtactgtttaactcctgtgccggacgggataaggggttatgccgcaacttgccgtttgggggcttatccgtcttttcaaaggaaaggcgcgtctttgccttgcctttcgcttcgtcaaaaacgcgctctttcttgattttggtctgcttggggatagccgcccgcgctgcgtctaaacagtctgccgccttatccgatttcttgatcgctttttgaagttccggcgttgcccgttccgcttcggaaaactgcaagcgggaagaatgggttttaggctgcgtcgcgtcaagggcttttttctccgcgccttttgctgcgtgtcgctcaatctctgcgccgatatgctgcacaaccttttccgctgccacccctgcgggggctgaatagttttcttcctgcggcctttcgctgatactggacgtttcgcccgtcgtgaggttttccgcaaccgcaccgtcgcgggtcattttttgcgttaccttgtcgggggctttcagttccttgctcaatcttcatcacctccaatccgctgttttgcaagttcgcaatagtcggggtttaactcaatgccgatatagcggcggttaagccgttttgctaccatgcccgtcgtgccgctgccgaaaaaggggtcaaggacaatcccgccgatgggacagcccgccaaaatgcacgtttccgcaagtttcggcgggaacgctgcgaaatgcccgccatgatagccgacattgttaatctgccaaacgttgcggcggctgcggacgggagaaatcaactcgtcggcgtatgcgcccttttcgcgggggcggttgattttctgcggttggttttgccccggaacagtaacgttatacttatttcctttgctaactccgcttttcagccgccccgccgttgtgggggctatcggctcggctactgcttgccaatcgtaataatacttctttgacttggtaagcagaaacacatattcatagcagcgggtcggcctgtcccgcgtgctttccggcatggggtttgttttgtgccaaatgatagaactgcgcaaataccaaccgtcgccccgcaaggcgagggctacaagccacggaataccaattaaatctttgggcttgcagccgggggcgcggtggttaaacgccacttgctgcccgttcctgcctttggggtatttggggtcttggtggtcggctttgctgcctgtgccgcaataagtgtccgcgatattcagccaacaagtaccctccggcgtaagcacccgctttacctcatggaataccgccgtaatacgggaaacatattcctccggcgttgcttcccgtccgatctgcccgtctgcgccgtagtcccgcaaggcatagtagggtggggacgttacgcaacaatcaactgcattttccggcaaggtttgaagcacctgcaagctgtcgccgcaatagattttgtccatttctatcctcatgccgacacctcgccgggtttggtcgtcattacacgatagagttccgtatcttgcgggaaacggtcaataaagggcaaaatcacgttgccatagaagataagcccctcgcccgcgtcggaatgggttacataggtcatttgctgctgcgaaatgttaagctgctttgcaaggatttccctgtcgccctgggcttggttgagcatatacacaaaatcgctgttttcaaaaatgttctccacctcgcgggacgataacaaatctttcacgttttgggtgatacctgtcggaataccgccccattttctaaaacgcttccaaatctcaacgctgtacgctgcggtctgttcctctttgagcagcaaatgaaactcgtcgatatagtaccgcgtcgccttgccttcgctgcggtttatggtaactctgttccaaacttgatcttggacaatgagcataccgagttttcgtagctgggtgccgagttctttaatatcaaagcagacaaggcggttgtgaatgtcaacgtttgtttggtggttaaacacgttcaaactgccatttacatagagttccaatgccgacgcgatacgctgcgcttccttttccggctgcttcttgatttcattgtagaggtcgcccaaaatcggcatattctccggcttcgggtctgcaaggtagctgcggtacacgctgataacggcgcggtcaatcaaagtcttttcaaccgcttccagcccgtttttgccgcccataatcaactcgcaaaaggaaaggataaaatcgctctttaaggctatgggcgtgtcgccctcgctgtaattgaggtttatatccatcgggttaatgtactgcgtgctgttctgcgaaaccttgataacctgccctttcagccgttccacaagggggtaatattccgcttccgggtcgcaaatgataatatcgtctgcggtaatgagaaaagcgttggtgatctcgcgctttgccgaaaaactcttgccgctgccgggtgtgccgagtatcaagccgttagggttcttcagccttttcctgtcgcacaaaatcatgttattcgataatgcgtttaagccgtaatacaacgcttcgccgctttggaacagctcttgtaccgtaaaggggacgaaaatggcggtgctggaagtcgtcaagccccgctggatttggattaggttttcgcccaatgggatagaggacataagcccctgttcctgccggtagtcaaggcgggtgagcatacagttgtatttctgtgcgatacttgcggcctgaaatacgtcgttgtccaatttctgctttgtgtctgccacattcaaaactaacagcgtaagcaaaaacattcgctcgttccggctctgcaaatcccgcaaaaggtttttcgcttcgccgccgtaggtggcaaggtcggacggaattatatccatatcgtagccgctgcggattgcctttttctgttcctcgattttcatacggtcaaggtcggtgattttccgcttgatcgtcttgatcgcttcgttgtggtcgatactctgaatgtgcagattgacgacaatcccgttttccgcttccatgaagtcggcaagcatacggtctgaaagttccggcgcggcaatctgcaaaaaggaaaccgcgccaaacttcccgcccatttgaaacattcgcccgtcgccaaaacggaaagaggacggggcaataaagtctttgacggaaaggccgcttacgggtagccattcccacgcaaagttgaagcgttccccgtccgggtggaaaagcccatgcagcacttcaagccgctgcttcccgtccaatacccgcgccgccgcgccgatcaccttaaaatggttgagggtgtccgtttcgatacgggcaagccgcgcccgcgccgatttaatatcttttgcttcaatggtaaaggtgagaaactttgtcttgataagcccgttgttgccgcgttcaagctgtgtttgcagcatttcggtgtattcggctctgatactgtcaaagtcgtcattctgtggggcaatcgtgatactgctcttgaaatcctccttgttcgcatggcggctgattaaggaaagctgcacactgatagaagcgtcaaaagagttatacatatcgcaaagggcttcaaaaatggcggtcttgtcgtccggctgcgcaagctgatagttaatatcttcaaactcaatgcacttggaataccgcccgtttgcaaggcggcaaatcccgtccttatacattcgttcaaacggtatgctgtcctgcgccgtatggggcttcccgtcgccctttgactgccggataagcgcgtcgatctgtttcttttcctgccgcgtaagtttacgctttttgttttgggtctttcccttttcctttgacaatcgcccgtacctccttatctaatcgctcctgccgcgcaagggcggtataaaaattgttggtctgataaggtcgctctttggggcgaagaaacttcacttccacaaattgccgtataatcacttccagcggttgcccgttcttctcgtacatagcgagtaggaacatgggcagcatggcaagcaccatgcacaaagccgccgttgtcgttcccgcgctgtcctttgtcaaaaagaatagcggtagcccgatagccaccgccgcgccgaaacagagtaattgtcttttggtaaggttgaacattaccttgctcttgattttggttaaatcctttgggacggttacatacgccatttcaaacctcctttccggcaaaccgtatgtcgcttttgatttcatttccccatacgtcccaaccaggggtatgctgccttgcaaacagttcaatacgcggtaggtcgcccataagggcaagtatcttttcccgcgttatatccggctttttgctgtgctgctcaacaggggaaataataaattgatgtaccttgtttgattgtcgcttcgggtgtcctttggtagcaagcaagcagatttccgcatttcctcgcgtccaaaagcccaagccataaaaccaagtgggcgatttccgattttgctttaaccatacaaaggcaacggatttataggtaaatccccaagccttgattaactgcaacgcttctttaagctgcgggaacgtcgcccataggaataaaatacagtccttatccgcaatttctttgacgggtaaagcgcaaagttcctcaatactcatagtgggatagtgcttttccgctgcgccctgtaccttgcttctcgcgtatctccaagggggatcggcgtaaatgattttgtatttcttcatctgcacccccttaatgcgcgctgaatacggattttgcaaggcttcccgttttgaaaagcgtaaaacacaagaggacggtatagcccatgcaagaccagatcgcgccggatatgtcatcggttgctgcgattgtctgtatcaaaaccgcataaataccgacgcacacaagaattagaaaagcctgaaaaccgagggcaagcaaggattttaagtagttctgtcccatgccgccccattcacgatttaccattgtcgcaacggggataggggcgatactcgttacaaggtatatttcaatcatgcgcccgtacaccaccagcatgatacagatagacaacgctttcatggtaagccccacaaagagtgattgaaaccatagccccaaaagcccgccgacgctcatagcgtccagctttgcttctatatcggtgataacggttgcaatatctatgcttgtgtcggatatgataacgcccgcgctgtcgttgacgacgctctgtgtaatgtcaaatacgcccatgacgatgttccaagtatttgttaccagcagcaccgcaacaaaggttttgaaaatccacttgaagaaaatccaagtgtcgagatcgtgcagattgtttttctcaattacaagctggattagttcgtagcacatgacaaaggtaatgataacgcccgcaatcggcacaatgacgttttccgataggctgcgtatcatattgaatatgcccgcgttccacccggcgggggttgtgccgacttgcgttgcgatttctccaacctctgtatttacgctgtcgaacagcccggagagattagagagtattccgtctgtcaaaatgccgcgaaaccaatcttcaatcatctgccatatcaaaagctaatccctcctttcccgcgccctcccgcgtgaagcgggagagcgcggcgggtagtgttagtttgtggcattatccaaacaggccggagagcagcgggacaagggtaaggccgataagggcaacgccgccgcccgccatcaactgtttcatgccctgcgacttcgcgccggggttatcgttgccgtacccctccatgaggttaatgccgccccaaatgccaagtcctgcgccaagcgcgattaccaaagtctgcaatacgtcaactgcgctgttgaaaaaatccatataaacctcgctttctgccgctaaaacggctcaaaaaatgttgttggaaataaaaatgccgccgtttttattcggcggctgcgtcctcgtcggacaaatctatttcgtatatgtcaaagggttcgtcgggctttacgattgccggacgggtggacatataccgttcaacgtcaaaagcgtttttcttgtcgaagtcggaaaggtatttgtagttcgggtgctgcgttatatcgtacttatcgctgaaaaaggggcgcacgccgcgcaactgcaaaatacattttcctccgtccataactgcgatttcgtcctgtgtcatcaactcctttcccaatttctgataattgaggccatgagaaacctgcgtgccgcgattttcggaagtgttgaaactgtcgattgtttcacgtcccaagttctccgaaatatcctttgcatttttcccgcgccctcccaaaaacaaggtgctgtcggcattgtcaagtatgatttctgccgcgtccttgtaaatggcttttagctggctctgcgattgcagaatgatagaagccgagatttcccggctgcggattgtggcaatcaatttttcaaactgcgggatttgtccaatgtttgcaaactcgtctaacaggcagcgaacatgaaccggcagcttgccgccgtattcgtcgtcggccttgtcgcacaagagattaaataactgcgattgcagcatagcgataacaaaattaaacgtgctgtccgtatcgctcataatcaaaaacaaagctgtttttctgtcgcctaacgtgtcaagttctaattcgtcgtaggacataagatcgcgcaattcctttatatcaaaaggagcgagcctcgcaccgcaagaaatgaggattgattttgcggttttgcccgccgccaatttatattttcggtactgcttcaccgcgaaatggtcggggtcgcgttcttccaagtcggcaaacagcaaatcgacggggctttgatattcctcgtcgtcctcgcgggcttcgctggcgttgataagttccaacagggtaataaagttcatttcctcggcgggggcttcgtaccagatgtagcccaccaacgcgcaatacaaaagccgttctgcctttacccaaaaatcctccgcgcttttttctccctcacctttggtattcgctatcaacgtatttaccagcttcaaaatatctttctcgctgcggatatacacaaaggggttgtagtgcatagattttttgaagttaatcgtattcagtaccttaatgcggtagcccgcccgttgcagcagcttcccgcactcaatcaaaaccgtacctttcgggtcggttaagacgtaagaggaatgaagctgcattagattaggtttgacaaaaaatcttgtttttccgctgccgctgccgccgatcacgacgacgttcttatttctcgcgtacttcggctgcttcgggcggctgttcatggtaagccgttccgtctgcgtcaaaatgatgttgttttggaaatccgggtctatgtagggctttatatcttcggcgtttccccatcgggcagagccgtactccgcgcccttgcggtatttcttcgcgtttttccctttgacatagactatcaagcggataatcaccgcaccgacaatgccgacaagcaaatccaacgggtaaacgctcggcaaggcgttttcaaaggctgcggaaaatccttgtgtgatattcagtatctttgcagaaatatccgcgccgggggcaagccgcaccgcctgtccgactttatcaaagagatagacaaagaacacataggggatattcggaagtatcagctttttgtagttgatctgcttcatatctcgcgccccctgtccattttctttaccttgtcgcgggcggcgttaagctgcttcgccttgtcctttgcagcggcaagggctttgcggatagagggctttttctcccggttcagcttctttgcggaaaactcttgaaacgctgcggtcataacgtccgcgtcccggcctttgaaaaacacaaggtaacgggtctgctcgcccttaaccttttttagcgaaaaatctatgttgtatttcttcgccgtactctcaaaggctttaatattgctgtcggtgatctcgatgttggaaacacccgcgttctgcttcataagctgccgcatggtctgtttcccatgcgcgggtttgcttttctgctccaaaaacttttggattgctttctgtaacgcctgttcggtaagccgcgccgcgccttttcccactttgacgtatagggcaatcgttttttgggttacttcctcctgcaaggtatcaactcctttcccggtaaagtgcggctatgctcattcgccgccgtataagtcgtgattgacaagggcggtatagtagctgtcaatggtactcggcgcgttgaacagcaccgcttttagatactgcttgatgttgcgcactttggttgtgttctccctcatgcaatccaaaacaaactcaatatggctgctgttcagcttcaaaaacttggatttcaccaattcggcggggtagtcgtccccggcaatacggattgtctttcgggctgtgcagacggtttccagcataaggtcaacaatctcgtccaaacggtctttgtcaattttgcagttttgaatgagatggtcgtattcgatattgtccttgataatctccctgtaaatctctactgcgctattgcttttcgcttccgttcttttcctttccggcggcgtagccgcttcgccatgcgcaaagggcaaggggtttagggaatggaaaggaatggaatcggtacttgataaatcagtaattgattgttctttacttaatatatctttatttaattgcgttggattttccaacgtaggtttttcctgcgtaggtttttccaacgttggattatccaatgttggattttccaatgtaggtaaatccaatataggcggctgtccgccgctggtagctgcttccggctctcgcggctgcggctgctcgtatatgacgtaatctgcgccccgcaagcgtcccttttcgtcgcgctcccggctgcgcacgatatatccggctttttcgagttcctttaccgcttcgcggattgcgtcgatcttctcccggttgatatgggataagcccgcaagggtataatcccaatcttcgggcagcgaaagcatttgcgacaacaagccctttgcctttaaggacaattccttgtttcgcaagtggtggttgctcataacggtatatcccgtatttcgctccactctgaaaactgccatatttcctcacttcctctcttggtatgcgtggacaattagaaagccgttttcggctgttttggtattgcaatatgccctttgccgttttcgcgtctgcaaagccgcatggcacaagggcttttgcccgtctatttgtccatgctggcgtgcgttttccgcgtccttttgccggggcaatagggacactctttgaaaacgcaaaactcatatttccacccggggcggtagaaacggcaagtgccgcaatcttcatcatctccggcacaaccggattgatagcggtcaaatcccggcttctgctgcatgagcaattcaaacgcccgctgcttgccctttgtgaaatacattccggctgcacctcctttcctgcgggcataaaaaaacggcgttactttctcccccaaaggggttaaggtaacgccgtttgtgtgcgtattcagtttttaacacattccctgtctatccgctgtccgcaaaaccattgattttattagctttttgccgctatcgctatcacacctcattattcaaccggccctcatatctttataattctgactggacggctgacggccgtctacggctgcagtccaaagctatttgagaaaaactcatgtcttttctgtttctccggcgtatcttataatataacacttaattaggagacagtatttatgaagcttatatcacagatgatccatgcggatatcgcccacaaacatggcttcttcggggataagatcggaatcgcctttttggataccggtatttctccccataaagaattttatccggctgatcagcggatcgccggatttatagattatgtccatcacagaacatcaccctatgacgacaacggacacgggacccacatcacagggatcgccgcgtccgcaaactttggcgtcgcgccaaaatcacatatcatatctattaaagttctagacgcactgggaaatggaaaccagagaacctttttaaacggcctttcctggatccatcactttcacaaacagtacggcatccgtatcgtgaacatttccatcggcactcctgcctccggcagtgatgaggcagccaatgccattgtgcagcaggtaaaccagctctgggatgacgggcttgtggtctgtattgccagtggaaataacggtcctagggatggttccatcaccgctcccggcaacagccgcaaaatcattaccatcggctccagcgatgatgccgcccgccctatgggttcccagcgcttcgcaaaaaattattccagccgggggcctacgtcctcctgtgtcatgaaaccggacgttgtggctccaggaacaaatatttattcctgcggcttaaacggcgggcacagtataaaaagtggaacttctatggccactccggcagtttcaggagccatcgccctgcttttggaacgatatccatactacacaaacaaagacgtaaaaatgaaactgcggttcaattgtgacaagctgtccacgccaagaaaccatcagggctggggacagatcaatgtccagaaactcctggatttataaaaggaactctaccatcacttgattgctcagaaacagggcctgttttggaatccaaatcctgtcagtatcctgtttcagcagtccttttctagtaagctcgcggattggtgttccgtagacatcaagaatgctgatgccaaaccgttttaggaatgctgtttttgtgatccccgtgatcatccgaaggcctaaaaacatatactcttccatctcttccttccgggaaagcatttctgcttcggcgaaatatctgccatgatcctggatgaaaagatattcatccatacaggaaggatttgaaaaacgtttcccctcaaaataggaggatgcagcaagtccaagtcccaggtacggagttccagcccagtaaccgcagttgtgcctgcactcaaaatctggccttgcataattggacagttcataccgtctgtaaccaaaagtgtcaagcagttccccggttctctcatacatggctgcatcctcatcctctgagggcagaagatccccgatccctttctcttcataaaagggggttccctcttctatgatcaggctgtagacagatatatgttctgggttcagctttgcggtctttgtaagggtctgttccatggtttccatcgtctgaagaggaagcgcactcatgagatccacattgatattctcaaatccgcattctcttgccatatgaaatcctgagacaaagtcctcgaagctgtgtatccttcccaagatctttaactcttcttttcttgcactctggagtccgaaactgatccggttgatgccagaactttggtatgtcttaagcttttcttttgtgaccgtgccagggttggcctctatgctgcattccatgtccctggtacaggaaaaagaacctctgacggtatccatcaaagattctatctgttttgccgggaccagggagggggttccccctccaataaataccgtgctcaccgtccggtccggataacgatctccccagtaacggatttcctcttttagtttgtccatatatcgtttgatctgtccatctccagcaggaaacgaacaaaagtcacaataattgcattttcttttgcagaacggaatatggagatacagttctatttctctagtcttcatctaacttcagcacgctcataaacgcttcctgagggatttcaacatttcccacctgtcgcatccgcttctttccctgtttttgtttttcgagaagctttcgttttctggaaatatcaccgccgtagcacttggccaggacatccttcctcatggctttaactgtctctctagaaatgatcttacttcccactgccgcctggatcgggatctcaaataaatgcctcggtatttcctcttttaattttgaacacatctttcttccgcgctcataggctgtctcagcgtggacgataaaggacagcgcgtccacctcttctttgttgatcaggatatccagttttacaagctctgactgctggtatcccttcatctcataatccaatgatgcgtatcccctggaacgtgatttcagagcgtcaaaaaagtcatagatgatctcattgagcggcagctcataccttaagacagctcgtccttcctcgatatactccattccgatatacacgcctctgcgctcctggcagagtcccataatagctcccacatagtcagatgtcaccatgatctccgcagatacgatgggttcttccatataatcgatctgggacgggtccggaaggttggacgggtttgtcagctcaatcatcgttccgtccgtcttgtacaccctgtagacaacacccggcgcagtggtcaccagatccagattgtattctctctccaggcgctcctggatgatctccagatgcagaaggcctaaaaatccgcacctaaacccaaatccgagagccaccgatgtctcaggctcaaactgcagggatgcgtcgtttagctgcagtttttccagggcatccctgagatccgggtacttggctccgtctgtgggatagagtccacagaacaccatagggtttacctttttatatcccggaagcggctcagcacaagggttgtccgcatctgtgatcgtatctcccactgttgtatcatggacattctttaaactggctgtcacatatcctaccatgccggcgctcagctcttctgccggaatgtactgacccgcaccgaaaatccctacttctaccacctctgccactgcgcccgatgccatcatcttcatctttgttcccggccggatggttccctctttgatccttgcaaatataatgacacccttgtaggcatcatagatgctgtcgaagatcaggccctgtagaggtccctcagggtccccggacggcgctgggatcttagctgcgatctgctccagcacatcttctatgttgatgccgtttttagctgagatcagaggtgcatcctcagcctcgattccaatcacatcttcgatctcagtcttcactctctccggctctgcacttggaaggtcgatcttattgatgaccggcatgatctccagatcatgatccagagccagataaacattggccagagtctgtgcctcaatgccctgtgcggcatccaccacaaggacagccccctcgcaggccgccaggcttctggaaacctcatagttaaagtccacatgtcccggtgtatctatcaggttaaaaatatactcttctccgtctttcgccttatagacgatgcggacagcctgtgatttgatggtgatcccccgctcccgctccaggtccatattgtcaagcacctgttcctgcatctcccggtccgtgagggttcctgttttttgaatgatccggtccgccagcgtggactttccgtgatctatatgcgcaataatacaaaaattgcggattttactctgatcgactgccatagattcctcctgttacaaataaagatattcgattcagtatagcaaaaaaaaggctgaaagtccatttcaacctttttctttcctaaaacgtttccagatagatggtttttgaatgctttgtagcaaaatcgttgtatctccagttgatcctgacaaagttttctctgacgccggagcattgattctgcttcaggcactggtagctgtaatctgagaacttattgtatatagtcttatatccgcttcccggccctttgttcttccaggccataaactggatggcacggtcaaaattcaccagtttattgtccttgatgaccggatagtaaacgcctgatcccaggatcgcacggtaatttcctttttttgttccagagatgacattgccggtgatctttgccgacttccagttcatcatgcggatggcatccttcttcatgcccttcatagtacagttgctgatggtgatattggtgtggtatttgccgccgctgtacttatgggtgccgatggaccttcccatattgctgaaataacaccggtcgatggtcacgttcatgttcggtgtcttatcgtacttgctccacggctgtgaccatcccttagtggctttatccggcgtatccagattgatcgcttccttgaccatgtctcctttggcgttggaaaaactgcagttggtcaccgaagaattctggttggcatccatctcaataaagtgtccgtttttcatattacggaacttaatgttattgatcttgatgttcttattatgtccggctatgattgcaatgcctttattaaaatacttcaggtcaatggtcacattgccctgcccttcaaacgtaacattcttggttccgttatatttgccgtataccttctttttcttgctcttgctgggctttaccagctggaagatggaggtagacggtttcaggcttcttgccccggtcttggaacctttcttgatcactacgccgtcctggaagatgatctttacattggacggcacaaacactgcgttagtgtatgtataggtacccttcttgaaaatgattgttccgcccttgctcttctcaagcgattccagccggtctctcaacgtgtaatagttctttgtatacttcgtatacttgttggacttgagataatttttcttttttggctttgactttggcgtgatggtgtaagtttttccttttgcttctacctgctttacctgctgtactgattccggcagcccgggagctgccaggaggccggtgacaagtgctgcccctgtaataaattgtatccatttcttattcatatgtatctcccttaatcttactgttttgtctgttttattatagcacattctctatggaaacaatacatcatttagaatttctgccagcggtttcattgcattctttgcctgcttcaccgtgttattctgggctcccagctcgatcagaagactcctgcctctgtagtgcagattgtaccggtatcctttgatgtaaatctttcttgtaagtccgggatatttcttcatcgcctccgcctggagctgcagactgaatgccaggtttgtttttttatttggatttttcaggtatttgatatctccgtttttggcagtacggctgataccattaaagaacataaactgggccatctccaccccgttttgttttgtcacaagctttgtgctttctttcacaccgtcccggtgcagatcgatcaccacctggatgctcggatacttcttcagatatttttctacggctgcggccgcataataatatgctttggaccggtcttcttttccgttctttacatcataaattcccctgtcgtggatcaccttgatcccatactgctcttccaggagttttgtaagaacatctccggctccgatgacagtgtctgacttttctcctttcctgctgtccttgtacgcttcgctgccgtgagtatgaaaaatcaagatctgcggttccttggattttttcagggaaaggtccttatttaaaagaacctttccgttgatctcactgttggtaaccatggtagtgctgtctacctggtaaatatattttcttaaataattgggattgttccatttcttgctgttaaacaccgtcttcttgaccggcacctcttccacatggactccgctctgctcgtttccctccaggtcgtagaactgattggtcaccagatcggaacttttgacctgggaataattttcactgaaacagatggacgggacaatgtcattcctgtaggtcgttatgatcttattgagcaccgacccgtaaatcggctgtccgccgctgtggtaggacgggaccagttcattcaccgcttttagataatagttctggaccgcagtggacaccatgtccggatgcccagaaaaatagcggattcccatgatgatgaagacagcaaacaaaacacatcctgctgctcttttctttttccccatatcatcattttattcagcttttatatgattatgcagtaaatgattaattccctcggaaatcgtatagctgatgcgcttgatagattcatcaatgttttttggtgtcacatgcatggatgcaaagtcttcatccagcatctccaggatatccccattgtctgtttcatttcccacaatatcactgatgatagcaggcactgaaatgaccgtcggaactccaatggcaaggactgggatccccactgttttctctgtgatctcatttcggtgattgcccactccagacccaggcgcgataccggtatcactgatctggatggttttattaagcctggatgaactcctggccgccagggcgtccacaacgatcaaaagatccggtttgatcttttctgccagcgcttccagtacttccgacgtctcaatgcctgtctgtgccatcactccaggggcaatggcgctcaattctatggcatcctttaaatacccctctcttttcagatggcgggtgatccagagattacccaccacctttgggcccagagaatccgctgtcacatcagaattgccaagtcccgccacaaacacctttgcatttcttgggatcatctcttttaaattcaggtacagtgcctcgctcatctctttgtggtagcttccgtcgttggctgacagatccttcgtctctatggtaatatactggcccataggctttccgagcacttgttcgccttctttatcttttatggtaatccttgtctccctgatatgattggaagcatcaatcctagtcttcatggagacaccttttaatttggactcttcctctgcttcttccttcaattctaacgctaaatctgttctgttctgcatcctattctcctttcttcctgtccttagtatgaaaagaaaccaaaaaaatatgtaaaaacaggtaactttgcattgacagaacggatagatttctataaaatagagaagtatgtttatagaagctataccgtgtctcgcttcgatataaacaccgaacgaaaagataagtacaattattatatggaggtgcccacattggcaaatattaaatctgcaaagaagagaattcttgtaatcaacacaaaaacagaaagaaacaaagcgatcaaaacgaaagtgaaaacatatattaaaaaagtagaagcagctgtcgcagcaggagataaaactgcagcaaatgaatctttaacagcatgcatctcagagatcaataaagcagcatccaaaggaatctaccacaagaacactgctgcaagaaaaatctcccgtttaacaaaagctgtcaacaacgtagcttaatttaaaaataccgcaaaaaaagagccaaccgtcagctctttttttattgcttaatatgatcctaaaacatcacagcaaagactaagataactccccacagaaccagaaggatgccaatcactctgcagatcaaagaacaagttttgataggcgtggtaaaaaacgtctcaaaggaaagcatgggataaggaaagatcaaaaatgcagtacctgcaaggatttgtcccagatatgcgccgagcattcccagtccaccctttccaaacaaggcgctggccaaaaaccccagtcctccggcaaagatcatcagaaacatcggaagtttatattttttatcctgccggacgtaacgttccatcctgattttacaatcctgtccacatacatcaaactctcttgtatgtgcttttgctttcatcggatcccccggtaatcttttcccgcagtaaatgcacttttccatgcctggcacccccttcttattttgtacggtaagtcttaaatgcatgcagtacagcaccaatttgttcatctgtcagcaatactggacttcccagcgcttttgccccacaatatagtccggcaacgaattcgatctgctgtgcagtatcaaacgcataagaaatggtttccccgacagacagcagtccgtggttgccaaggagacatgcgttaccttctcccatagtctttagagccgattctgccaagtcccatgtcccgaactgcacatattcagaacacggcacctcttttccggcataggcagtctcatagtgcagaggtggaatgctccagttcagacaggaaagcactgcggcgtaatgtgaatgagtatgtaccactgccctcacatccgttctgttcaggtaaaaaatccggtgcatatccagttcactggaaggttttctttttccatcagccaccgtgccgtccaaagacaatacgaccacatcttccggcatagttctttcatagtccaggccgcttgggctgatagccatgagatgctcttcttcattatatatgctgatgtttccaaaggtaccttcaactaatcccgccccttccagtttctttccgtactcaacaatagacttcctttccttttctaatatcataacatctctcctaatatcccagttctcttctgttgacaactcttccgtatgttccgctttccaccatatgatcgatctctttcatcagcagatacggtgatctaggaatcgcatccaccgttgtgcctgccagatggggtgttaccagaacatttttacattgtagcagaggatcctctttctcgatcggctctgtctcaaaaacatccagcgctgccccgaggatttctccattttttaatgcttcagctaatgccttctgatctgccaggccccctctggctgtgttgataaaatatgccgtctttttcatcttacggaaataatctctgccgaaaaaggcctggttttccctggtcaaacgcatatgcagacttacaatatctgatacttctaatacttcgtcgatggattccgcaattttaatatctggaaattgttttgaaaattcctttaagtccatgtacggatcatacataaccacctgtacatcaagtgccctcagtttccctgccaatgcactgccaacgttcccggcaccgagcagtccgaccacatgctggtctaatgtcttaaagtgatctgaattataaaatgtctttttccaccgccctgcttttaatgcacaaaaggaatctgatattccccttgtgaccgaaagcatcagaccaagggcaaagtccgccaccggttctgcattccggatgacattcaccaccggaatcttactttttgacgcttcctccacacagatgtgttccagccctcccctgcatgtaaaaattgcttttaatctggatgctttttgaataagttcttttggtaccgggcaaaaatgcgtcaccaggacctcaatggatccgatgtcctgtttcaattccggcacataagggactgcatccgggccttcccgctcaatatgttgctgtcgtcttgtaaattcctgccggtcatggcttccccaaaagtatttttttatttcagaggtccggaggctgctgttttccaacgcatccgccatatcttcagggtcaacaaaaacatctcctatcactgcagctttcaccggatgcaaaaatagttctttcataaataatcactccttggaatagttttctgcgcaactctccatccagtcggtaaatcttcctctgttctttttaaatatataatacagaac

SEQ ID NO: 3 - DNA, 298188 bp, Anaerostipes rhamnosivorans
atttatgatataatataataaatatgacgattagtcagaaactaactacacaaaggagattcgggggatgatgactcgaaattttacattgctgacggacttgtacgaactgaccatgatgcagggatattataagtccggcaatgatgagactgtgatctttgatgtcttttaccgggacaacccatccggcagcggctatgccattgcctgcggacttgacctggtcattgactatatcaaaaatctgtctttttcatatgaagatattgactacttgcgaagccttgacatatttgacgaagattttctggaataccttgcaggataccattttaccggcgatattttcgccataccggagggtactgttgtatttcccatggagcctctgctgaaggtgatcgcaccgatgatggaggcccagctcattgagactgccatcttaaatatcatcaatcatcagagtttgatcgccacaaaagcctcccgcgtggtctatgcggccggcggcagcggtgtgatggaattcggcctgagacgtgcccagggtgcagacgcaggcacttacggggcaagagccgcagtgatcggaggatgtgacggcacttccaacgtcctcgccgggaagatgtttgatcttccggtgctgggtacccatgcccacagctggatcatgagtttcccggatgagtacaccgcatttaaaacctatgccaccttatatccggatgcatgcatgctgctggtagacacttacgacaccctgaaatccggtgtccccaatgcgatccgtgtattcaaagaactgagggaacagggcatccagcctaaaaagatcggcatccgcctagacagcggggatctggcctatctgtccaagaaagcccgggcaatgctggatgaggccggcttccctgaggccattatctctgcctccagcgacctggatgagaacctgattcagagcctgaagctccagggtgcaccgatcacttcctggggagtaggcacgaaactgatcacctcttccgactgccctgcctttggcggcgtctataagctggcagctgcaaagcataaggatgagaaaaagtttaaagcaaaaataaagatttcagagaatcctgtaaaagtaaccaaccccggcaataagacggtttacaggatttacgataagaccacgggaaagatccgcgcggatttgatctgtctcacgcaagagtcttattcctccaaagaagatctggtgatcttcgatccgaccgccacatggaagaagtcaacgatcataggtggaacctatacactgagagaacttctcgttccagtgttcctgaaaggacagtgtgtatacgaaaacccttccgccatggagatcagggattactgcaccggcgagctgaatactctctgggacgagacaaggcgtctggtgaacccacagaacgtatatgtggatttgtcaaagcctttgtatgatctgaagaatcagctgttatcccaaaaagtataagttttaaatatgtcaaagtattgaaaggagaatctctatgattcgtttttttgctgatattatatatctgtttttctttttgactctgacctttcccctatacccgttgtttgaccactggaacaggactggacaggagcaccgcagagccgaaaaggctcagtcaatgatcatgaatgcctttaagacctgcctgcgttttgctggaacaaaggtcattgtggacggccgtgaaaatatcccagaggacaccgcagtcctctttgtgggcaaccacagcagctactatgacatcctgtgcagctacgtggccactccacacggagccggtttttttgccaagaacgagatgggcaaaattccgtgcctgagccactggatgacgttcatcaactgcctgttcctggacaggaagaatataaaagagggtatgaagaccatcaacaaagggacagagtatctgaagaacggtttttccatggtcatcttcccggaagggaccagaagccaggatgaggaaccccacgcctttaaggagggaagcttaagaccggccctgaaagcaaatgttcccgttgtccctatggccatctccggaacagcagatatcctggagaataataaaaaatatacagtaaaaccaactgaagtgcatattacatttggtccgccgatctaccctgaccagctggaccgccagacacagaaacacctgggcgccgcagttcgtgaagaaattatcgaaatgagaaaaaaacataagacaatggcctgaaaagatgatataatgtcatttaggcatgccgtgtgaaggcgtgaagttaaagatgtaaagagccaggaggaagaaagaaatgcaagtatggatggttttattgattatcgcggtcgtagttcttgctgttcttgccattctgtattttgtaggaaacaaacttcagaaaaagcaggaagtccagcgcgaacagctggaaagtgcagcacagatgtattcaatgctggtcattgataaaaagaagatgaagatgacagaagcaggttttccgaaaatggtcattgaccagattccgaaacgtgccaagatcgccaaagtacctgtggtcaaagtaaagatcggaccaaaaatcactccattgttatgtgatgaactgatttatgaccaagtgccagtaaaggctgagatcaaagccaaagtcagcggcatatatattaccgaaattcataacctgcggaatgtagcaccgccgcaggaaacaaaagggttctttaagaagtttaagaagaaaacgattgaagcatcccgcaatttatcaggcaagaaataaaaatacagacagaagacttgcacttctgtctgtatttttttgcccattattctgctgtcatatattcataaaccgccttggtgccggcaagagccagcacttcctctatttttccttctgcccttccaagctgaatgatccttttgatcaactccaggtattcttcttctccgacacaggcaaaacaaaacaacagatataccggatcttctgattccgtaaaaatgactccctcttttattaccagaaggctcaaaccatctttatataccccgtgctctctgcccgcatgggccagggccactccccggctcaccacaatataatccccgtattcttccacgttctgaatagactttttaatatattcagcggatatatatccctgatcttccagaggcgcggctgcccggtgcatggcctccctccagggcatggaggcttcttctatctcgatcatatcttctcttaagagttccatgagaggattcactctttcttttcctttttccctctgatactctttgatcaccccgccgatggtcttacagagcgtgtctgccagctcctcgtcttctatgatcgtgcggatctggcctaataggacctctgttttatgctgcattgtagctggttttaaagtgtgcttctgaaatgtgagcctctggatctgatttagatcgtccatctgcagaaacgggtgtacctttatgacctgatattcctttgtgtggatcggtacggtggaaatgataaagtccacaggctccgcgttgtatttcagtcgtccgatcacttcgtgggccgccagcacgccgataatgttaaaatcaaaatagttttttatctgcgcctctaaatattttccggtggccatgcttcccgggcagacgataaccacggaaatcttgggcagatagcggcggtttctgatgatcgccacacagatatggatcactattgattttttcatgttgccgctgaggtgatatgagagaaacccctccagtatataggcatattgactgaccaattcctccagcctttcataattgatagaggaatcatattccttaggcagctccacctcatagtttccccagtcttttatgctccttatatgcatcaggagagagtccatcagttttgtatcactcaccaaatcaaggttcatctcctggtcaatctttcccacaaaattcatgatgactttgtagagttcgatctcatccaccgtctttacaaaagaatacagcttatggtccgcgatatactccctgaatcccttcatcatatcttcggtaacagtcacttccagcatatggcctgcatagaggatcatatggtcaatccccgacagaggagtcctgcctgtgactgctctgccttccctcctgcagaaattaaataccacaaacagatacagcacgatatcgtaaaatacatcctcgatgaacacaagattgctgaccttcatgtactcctgcatatactcaaagaggatggaaaaactatgcttgatctccatgcggtttaagatcatgcgctgaaagaaaccttcattttccacattgatagcgatggagcggtataattcaaccaggatgctgatcctttccttttcctggaatttaagcagcattccttttcccgagtccaggatcagttttccctgaaagcttttcatactctcttttatcacttccatatcgtttacaatggtaatgcggctcacatacagttcctccgcaatatgctgcatggtgatatatgtctgggatgacgccagttccatcaagatatagatctgccgttccttcggtgatagcttgtacatatatgcatccatctcatagagataattttccaccacatcttcatcaaaatcacttcctaagatcagctttccttcctctgtggttctgatctcacccacagggatcgtccgcaggaattggttgatctctttgatatcattcttgagtgttttctgggatatgccataatgggaagccagctctctcacagtcagcgtgcggtcactgtctctgattattttttgtataatctctgtacttcgccttcgcatctttcttctactccttttatagatcacaaagtggatatatccacttcaactcctgagcctctcagtccattagaattaagaacaggcattgcagtctcccgcaatgccatattctattattccagttcctccagaaataattccctgactgcctccagaggcagtttgttacacttggatatgacttgttcattcatcacaaactgcattaatttctgtaaaaattctaaatgctcttcggcctgctttatggctaggttaaacaccagccgggtctccacaaattcttcgctgtcatccatacggtagaatcttacaggcttgttaagcctcagaaagcaaatacagttttcatggatgccctttactttgctgtgcgggattgccactggtatggcggaagggagtcccgttggatattccttttcccgttcaatacaagagtctataaattcacgttctacacttccgtttttcatcatgtattccccgcataaaacgatggcttctttccagttttctgcagagccttccacaacaagataagtattttttgatttcattcctgtcacctctttaagtcctatccgatcagcctgtgcagcaggcagatgaatacatttccaagatcaaatccaaagaatccgtcggttgcaagtcctccttttaagtccaggcctgtgacgctgaacattgccgtggcttctggcacaaactggtttgcgcagaacgcgatgataaacatacaggcaatggagcagaccaggcttctcacaagatttcccttgctggccatgacacaaaacaccgtggtatagcagacgatggtcagcagtccgatcgggaagtaagtcatattggggataataaatgcaagggcaatggtgatagggatacagatggcagtacatgtgacacaggccggatctcccagtcccaatgcaacatccataccaatccataactctgcatcttctcccagatggcgtttcataaatttgctggccgcgtttccgatcggtgtgatcccttccatcatgatcgaaaccattctcgggatcaggatcagaacactggcaatgcccataccgatcccaaggatattctcaatcggctgatgggtcaggattcctaaaaatattcccacgataaatcctacaaagcatgattccccgaatactcctaatttgctctccagccagtccatgctgatgtccagatccttcaatcccggaatcttatcaaagatcttattgatcagccatgataaaggatacataaatgtgataaacgaaaatgtactgcaggtcgtgccttcaagtccgaagaactcctgccatttcggcgcgatgagctctgccaccagcactgaaataattgacattcccacggtaaccgccaaaccgatagccgcactgtggaacagggcatatgccagcgctccaggaattaaaaagtgtatgtaattccagatgtcaacgtttaacaccttccgcttaaatataaaaatcagaataaagttggccagcacgatcagcggcaccgctaaaggcgcaaacggcacggtccaggctgcccctcctgtggcggcaaaaccaagatccaccgtagtaaatccggaccccagcttctggtaatactctgatacaggctggatggctgttgtgagcaggcttacgaccaggctcaggccctggaacccaatccctacaaagagtcctgcctttaacgcggctccgaacttcatacggaacaccagtcctaggataaggatcataatgggcagcagcgatacggctcccatattgatcattgtctgagcaatctttaataaaatatccataatcttctccttccctctttgtttttcagtctaagagcgccctgcatgcagtgacgatctcctctttgatcttatcctcgccgatccctgagatgagcccaaagaccttgatcaacggtttgttcaccggcttccggtagtttgtcgtcaccatgatgagatccacatcgtcctgctttgactgaatttctgacatagtgctctttacgatctttacagggatccccgcctcactgcagatctgttttactgcctcctgggcaacggtggaagtagcaaccccgcttccgcatgcaaccaagattgataatgtttttgccatagtccggtcctccttttattggttcggaagcaatacaactttgaccgcttcccctgatctggttaattcgattcccttattgatctcctccaagggcagaatgtgcgtgataaacttttctgttggaaagtcttccgagattgccagctcaaaagatttctgcacttggatgctgctggcgccgaagtgtccgtagatccaaagattgttgtaatggatatagttggtatccagctctgtcatggctccttttgctgttcccccgaagaatacgatgatgcctccctttcttgccataaatatggactgggcctgcgcctgtgtggaagggttggctgagatgaccttgtccgctccttttcccccagtcatgcgcctgactgcctcaatgggatcttccatggtgctgttaactgtctcatcgaccccaaactgttttgccatctcaagccttgaatcattgatctcaatcatgatcacctttttcgctcctctaagctttgccagctgtgcatggaagcagccgatgggtccggcccctatgatgacgatcgtatccccaaatcccacgttgatgttatcctggcatgcataaacagaagacaggggttctcccaatgaggcactctcaaagcttacttcatccggtataaggaaaacagaatctctctctacctgctcctttgtcaccggcacataatccgcaaatccgccctgcctggaggtatagtcccctgcattgctgcagttttcactgtgtccgctcctgcattcctcacatttaagacagtgatccaccggatacacatagacccggtcccctttcttatgctctgtcatccccggagagacttcttcaataacgcccacgatctcatgcccataaatatgcgggtagtccccttttcttgaatctgtggtcagattgcggatatcggagccgcacaggccgatggccatgactttcagtaagaatcccccttctggacacgctggtttttcaatctcttctacccggatatccccggggccgtacattaatgctgctttcatgatgctccctcctatttataatggtttcgtctgctccccggatgattttcatacagtgattccagtttgtcatccggtatatcttctacttgcccaatctgttttgtcaactggtaaatttttaacacctcttctgctgcctccactattttcactgcatcttctagtgtttttcccactgccacacagccatggttgccaagcaggatcaagtcatggtcttttatagcctcctcaatcccgtccgcaatatgtacggttccggcctcaccgtagggcaggcatgggatttcctcaaatacaagtgaaaatgtagtggaacacttgatcctgacggtcttattacagtaagcataagccgtcagatacggcgcatggagatgtgccacagcactgcaatccggtctggccttcagcgctgcctcatgcagcaggtactcactggattttttcacacttccccctacctgctcctggccttttaccacagccaccatatcctcatctaaaaaacgttttctcgttccggacggggtaatatataacaggcctgactctctgtccatgatggacaggttgccttccaggctgtttaccagccctttttcatctaatatcttggagtaaagtacgatctccttctttatttcatttgccctatttctcatctcttctctccttcagtgcttggtttgtctgacagcattcatgaatgactatgtgttaagtatatccacacaggttctgcctctcaatacaaatacctttctgcactgcggaagcatttttaacaagatgatacaaaatctttccatggcctggaagaaacttattcctgcagacgcaaaaaggccctgccatttttcccaaaatgacagggtccttcccggctccttgtattgcctcaattattatgagttatttaccactatttccgtcacgcttttgaaatgcgctcctccaatagtggtaaataactttcgtaaagtggtgccttttgtcttgcagcaacattctccagcagatattacgtccattttctacatgattggagtgaggcattctaagagccgaacggaaatcatgtggaaaatgtcataccttatcgtgcagagcacgcccacccggagggtataaaatacggtgtgccctactgggtatatttttcccatccccggtcgatcttttcttccatctcctccatagtaagcaggccgctcagtgagtcaaactctgtgacacagcaggctcctgcggcggccgccagtgaaagacagcgcctgggctcttttccttccaacagtccggtgaggaatgctgcgatgctgacatctcccgcgccggtggcagagcggaccctgtctgcacggtagctgggctcaaacagctccagctccttccagtcctccggcagttcccggttttggccggtcttaagatacagtcccttgattccgcatttgatcagaactgctcctgctccccatgtaagcagccgctctgcaagaggcctgatatccttctctatatcaagaatttctgtcagatcacctcctgctgctctttccgtccattggttatacatgtcccggtcgatgagaaaacagatttcctccgcactgggtacaaagtaatctaccatgggaagtagtttctgaaacagtgacggccaatccgcttttgccgcatcactgtcctcctcaatagctgttaaatccagcgatgtctttactccaagctcctttacccggccataaatctccagcagctcctccgggtgctcaaacatccgcctcataatggtcggatagccaagatggaataaatctgcctgtgcgatctccccaaagtccaggtcttctaatccaaaaacatcattggctccggcattgtggaaaaaaatccggtcgatccctggaggggccagaaccaccgtgtatgctgtagagcagtcccctgaaacggcaactccgcggcttcctccgtactgatcaagcagattcaacaccagttttccaaaagcgtcatcccccactttccccatgagagacacgtcagcgccaaagcgccggaaggcaagtccggtgtttgcaacagctcccccggtgtgaatggaggcctcccctacctgcatcagctttcccgggagaaaccactgggccgcgctttttttctccccatccttgctgttataaaactccggcgtgatatccagacacagacatccggcaacgacaacttttttcatagacacctcctgtcattttgaaaagccacaaaaagctgcacctccctattcgggcggcacagctttttagttcctttattttttcgctctgcgttcttcgatctttacaataacatatccctgatcttctgtgtcaatataaccaatccttaaatactggccatccttcttgatatatcctccctgggtggacggaagatggtatccgaactttttgataaaacggtccccataggaaaaatggacgcctctgatatcgaagctctcctgctccgtatcttcgttggtctctcctcccttggaagccgggataaagttctccacatatccttccacagtcttataatctccctgtttatacgtgtgaatgatcctcacataaccgtaacagaatcttaaggctgttacggcgcagatcacaaggcatacgcctcccagcagtttaaaaaatgactttttagaagcaaggaccaggatcaacccgatcacccccaaaatcgcaaacgggatgacccagtggggctgaatcgtaaaattgctagcttcataccatagtttcatattttttattcctccaatattaatcacagtgactgaggactctctcaaattccatcggcccgccgaacagatccagggcgctgccgattgtcacatctactttcccttttccttctcttttgatcaattcaaggtcttcaaaatccttaatacctcccgcatatgtcacaggattccctgaatatgcaccaaggatgcgcaccagatcttcatctatgccctgtccttttccttccacgtcaaccccgtggatcaggaattctgtgcagtatttctcaagctctttcagccggtcctctgtgagaaccacatccgtgaacttctgccagcggtcggtaacgatataatactctccattcttcctgcggcagctcagatccagaaccagatgctcccgtcccactgcctgcgcaaggtttctaagcctgtcaaaccgaacagctccgtcagagaatacaaacgaagtcacaatcacatgagaggctccctgttctataaaaaaggctgcgttctcatccgtgatgccgcctccgacctgaagcccacccggaaatgcacggagtgcggacagtgcctcctttacatcagcttcataatactccgagcttttggggttcagaataatgatatgtcctccggacagctgatgctttttatatagtttaccataaaaacttccgtcatgtgtcgaaacaaaattttcttctgcgcagtctccccggtctaagaggctgccgcccacaatctgtttaatctttccattatgtatgtcaatgcatggtctgaatttcatgtgttttatcctcttttcttacctctaccaggaatccagctcctccagcatacggaaagccctgccataaggctccgccttataggtgcaggcttctccggtctcagggtggagaaaactaatcctggtggcatagagaccgatctcttcatactgcttttttgtcttttggaactttgggttgtatttcgtatctccgaaaagcccgaatcccctgcttgcgaactggacccggatctggtggtgccttcctgtcaatagatgaatcagacagtaggaaaactttccttctcctgtctccaccatatccagcacttcgtaagaaagctccgccttcttggctcccggtgttccttcttccacgacagcggacacgttcttcttttcattcttcttcagataatccgtaaatactccgtcttcctccggaagccatccgtttaccactgcctggtaatccttctcaaagatatgctccctgacctggcggcttaactccgccgcagcctccttgcttctggcaaacaccatgacgcctcccacagggcggtccaggcggtggatcatatacagctccggctctctgtccaggttctcttcataaaaaagctggttcttcagactgtggaacacatccatatcccctgtcttgtcgtcggctgtgggcataccggcgggcttttcacatacggcgatgtggttatctcgataaagtatctttacatctttttttcttctcatggctgctcctacatcttaaagcggtatcccacgccccatatagtctcaatatactgcggctttgcggtgttaagttcaatcttctcccgaatcttctttatgtgcacggtgaccgtggcaatatctccaagggattccatatcccaaattttattaaataattcttcttttgtaaacaccctattcggatgactggcgagaaatgtgagcagatcgaactcttttgtggtaaatgccttctcttccccgttcagatagactcttctcgctgtcttgtcgatcttaagcccccgaatctcgacgatatcattctcctggcagttgctggataccaggcggcggtagcgctcaagatgggccttgactctggccaccagttcacttgggctgaagggctttgtaatatagtcgtccgctcccaggcccaggcctcggatcttatcaatatcctcttttttggcggataccatcaggatcggaatgtccttcttctcccgcagctgcttacagatctcaaagccgtccatgccgggaagcatgatatccaggatgatcatgtcaaaatcctccgaaaggcccagcttcaaccccttctccccatctgtctctatctcaacctcaaaggagctgagttccagataatccttctcaagctctgcgatagccagttcatcttctacaattaaaactctactcatttttctcttcctcctgggtgtctacaatcttgtttaatgtaaaaaatattgtggtgccggagcgcagcttgctctccgcccatatctctcccccatgctcttcaatgatcttcttgcagatggaaagtcccagtccgctgccgccggcagaattcctggacatatctgcccggtaagtccttctaaagatattcggcagatcctccctggagatgccgatgccgttgtctttgatggcaacctgaatcttacggtctaactcctttaaggtgatactgacttttccttttgccttgttggtatacttgcatgcattgttgatgatattgttcatcacgcgctttaactgttctgggtcagccatcactgccacattggctgagcagtaattgctgtatgagaacatcatgcccttttgctccagatccgatccgatctcatccacacaatctttaaaataggcattgatgtcaatctttctgaagttataaggaatgatgttagaatcgatcttagagtataaggaaagctcattgatcagtacatccatgtcattggccttattgtaaatcgtcttgatatagcggtccatcttctccggagtgtccgccacaccgtccatgatcccctccacatatcctttgatggccgtgatcggagtctttaagtcgtgggaaatgttgctgatcagatcccggttctgcttttcatagatgatccttgcctcgatggactcttttaattccgccctcatagcattaaaggaagcgcagagctcgccgatctcatccttgctgttaatctccacatcgtcgtccaggtttccctccttgatccggtcggctccctctttcagtttcttcagcggacgtataaactccgagtacataaaccaggagagcagaaaactggtgaggatcaggatcgccacaatggagaaaaatacctgactgatgatattcttatagtggggcaggaccgtctccagatcggtcaggataaaagcggagcctttgctgccgtccgcataacggaaatcctgctgcttcacgagaaaattctccggtcttccaaggaaaacaccgctgtcctggctgctgatgtcactgccgaatctgggaagcttcttctcggtctccgtgtggtcctctttagatccccgatagacaatggtcttcccttttctgacgatcagataagactctttgttctttaacgcttcattgattcggtttaagtattcttcactctcaaagttctccgggttctcaatggcactcctcttcagatcgttaaagctggcctttgtctcgttgttcatagtctttaacggattggcaaacccctcgataccgttggaataaatgttttcattggttgtccggatataccctacacttaaagcagcgattgatactaccattaaaaaaatcggcagtataatcgctggcaaaaatataattctgactttgttcactactttcatgacccccgtaccttcctgatgcatttggtagttctattatatcataggaaggtgggaaaaagagagtttgtctaaagttttatgaagttttaataaaatctaaaattgcatccgccactgcctctttggacatgataggaagctgtttctcctgctctctggtgatcaaagtcaccacattggtgtctgtgccgaagccggcgccggactcttttaaattgttggcaacgatcatatcgatctgcttcttctccagtttctttctggaattctccagcatattctgggtctccattgaaaatccgcagataaactggccttcttctttggtatgcccaagctcctgcaggatatcctttgtccgcacgagcgggatcgacatatccgtatcgcttttctttattttttcatcacttacctgggcaggtgtgtagtctgccacagcagcggactttatgatgatatcctggtccttttttcttgccatgacagcgtcatacatatccgatgcgctcacaaccgggactgtttttacaaacatcggaggttccatctctacaggacctgtgaccagagtcacatccgctccccggagcatggctgtctttgccaatgcgtaccccatctttcccgtggaatggttggtaatatagcgtaccgggcagattgcttcccttgtgggtcctgccgtgaccaggaccttctttcccgcaaggtccttcggtcgtcccaccgcccgttctatataggccataagaatttcttccgacggcatcttgccggcgccggtatcaccgcaggccagatgtccgctggctggttcaatgaccgtgtagccgtaggtcctgagtttctcaagattatcctgcaggatcgggttttcatacatatttgtattcatggccggagcaatcagtaccgggctcttgcacgccatcactgtcgtggtcagcatatcatcggcgatgcctcctgcgatcttcccgatgacattggcagaagccggggcgatcagcatcaggtccgccttctttgccagagacacatgggccacatgaaattgaaaattccggtcaaaagtctccaccaggcatttggtgttggtcagtgattcaaatgcgatgggattgataaaattcgtcgcattttctgtcatgatgacatggacttcgcatcctctttttatgagcatactcgccatattcgccattttgtaggccgccacactgcctgtgacgcccaggacaattgtttttccactcagcataatctttctcctacatatcctccagccggccatgcttttcatagctggtcagacgggtgatcttattgttgtcgtccacaaataccacttttggtttgtgttctttcgcttcttccggtgtcaactcagcatagcacataatgatgatcttgtctccctgggaaacgcaacgggccgccgccccgttcaggcagatcatcccgcttcccggctctccggcgatggtataggtttcaaacctgctcccgttgttgatatcaacgatggctaccttttcatattccagaatacctgccgcatctagaagttctgggtccacagtaatgctgcccacatagtcaagctccgcctgcctgaccgttgccctgtggatctttccttttaacatagtaagcttcataatcttctccttacactaacacgttgtcgatcaatctggtttttcctatatagactgccatagcgagcatacatccaccagtgagcctctccaccggctgcatggacaaagcgtccacagcctccacataatcaatccttgccaaaggctctgactgtatcttttccttcatagcaaggaccactttcgcagcgtccttctccgtctctgccatctctgcccccaggcggactgcctgatttaagatcaatgcggcctttctctcctccggtgagagatatgtatttctggaactctttgcaagaccgtcctcttccctgacgatagggcatcccacgatctggatatccatattcaggtcccgcaccatccgtcttatgacagccagctgctgtccgtccttttgtccgaaatatgctctgtccggagttacgatattaaacaactttgtgaccacggtacaaacaccccggaaatgaaccggtctggtccttccgcagagcccttcagtcagagtgtccatgtcaacaaaggagcagaaatcatctgcatacatctcttccggttccggatgaaagatcagatcaaccccggcgctctcgcagatctctgcgtcgtgttcaaggtctctcggatattcagccagatcctctgtggggccaaactgcatcgggttcacaaaaatactcacaaccactttgtcgttttctttcctggcacagtccatcaggctcttatgcccttcatggagataccccatggtcggcaccatccctacgctctgtcccaggcttttccactcttttacttgcttcctcacttcatttatagtcttgacaatcttcatggctctctccttaatacaacttttctatcacatcatcgctgatggcaaatgtatgccgttcctccgggaatgtcccgtccccaacggccttgatatattccactactgcttccttcatagccggccctacattaccgaactgcttcacaaacttcggaacaaaatccccgtacatgttcagcatatcctgatagacaaggacctgcccgtcacatccggccccggctccgataccgatggtcggaatatgaagtttctctgagataagtgcggcaagctttgcaggaacacattccagcaccaccgcaaatgctccggctgtctcaactgcgagggcgtcttccagaagctttttggctgcctcttcactctttccctgtaccttaaagcctccgaaagcattgacagattgaggggtcagccctatgtgcgccacgaccgggatcgatgccttcacaatggcttcaatgtgcgggcatacatcctttcctccctccagctttactgctgtggcctctgtctctttcataatccttcccgcatttaccacggcatcatagactgaggtctgataggacataaacggcatatctactaccacaagggcgttcttcgcacctcttgccactgcagccccgtgatggatcatgtcatccacagtgaccgggatcgtcgtatcgtagccaagcatgaccattccgagagagtctcccacaagaatagagtggatgcctgcctcgtcaaacaactttgccgtagaatagtcataggctgtgagcatggagatcttctccccattgtctttcatcttctgaaatgtactgactgtgttcttcaatgttcttcctccaatattctctccatatgttcataactcctggacggatgcctgtcttttgcaatcctgaccaattccctgcaaagaggaacatagatctccttttcctccccggacagggcacccaaatgtctcgtcaccgtggatacatcattgcgctccaccgggcctgtcagagcctctttggggcctgaatcaagaatattctcaagattctgccgtactaaaggtgcaagggcggcaagcccttcctgcggggtaaaaccacagtcttgtaaaaggttcaaagcctggttcatcagggctgccatctgattggatgccataactgccgctgcatgataacggaccttcttctccgcctggatctctacaatccggttgggaagcggactcaaaaaagaaagcatctgatccttgtgcgcctgctcaccttccagagtaaataaagccttgctgagttcttcatatgaagttgttttactgttaaatggaaacattggatggatagaatagccgtaagcccctgcttcggttatttcagagaaaatagcggaacttagagatccgctgcagtgacagataaacttttcccggaccggaaaagttctgagctgttcccacacgcctgcgatctggctgtcgggaaccgtaatgaaaagaacatcacacattgataataatttgtcaaacgtatcaaaatgtattgtgcctgtttctttggccgcctgtcgggctgactccccgctgcggcttaagtaccccactaccgggataccaaaatgtacgaaatacctgcctaaggaacagcctgctttgcctgctccgataaatcctgctttcatacggaaatatcacctgcctttatgaggtgatgtcctttaaaaatttgttcactggtatgatttctctacggaataccatccaagggtactatatcacctcatatttgaataagcaaggaaaaatacaatgtttgaattgttcttttttatttgctataatctctcccggaggaaacctatgaacgattttattttcagcttaaattctactgtccccgtcttttttatgatcttcctcggatggctcctgaaagagaagggatggtttaacgaaaactttgtaaacacagccaacaagtttgtattcaatgcagcgcttcccgcacttttgttccgcgatatttccagcgctcctttaaaacaggcattcaacttaaaatactttctgttctgcatgatcgtaaccactctgatgtttttaggtatctggatccttgcagaattgttgataaaggacaagactatgatcggggcctttgtacaggcctctttccgaggcagcgcagcgatccttggtatcgcatttattgaaaatatttatggacactccacgatgggaccgctgatgatcgtagccagcgtccctctgtataatattttctctgtcattgtgctgaccgtgcgtggacccggctccggctccggcagttttaggtccgcttttaaaaatatcattcgaaatccgatcatcttggggatcctggccggtcttccgttttcttacctggctgtggatttccctcccgtgatcgacaaatgcctcaatgaactggccgtgacggctacgcctgtggcattgctctgcgtgggggccggttttgagggagccaaggccttaaggaagcttggtcctaccatgaccgctgctgccattaagctttttatcctgccacttatcttccttcccccggccgtctattttggattccgtggagaaggactgatcgctatcctgattatgctgggctctccgaccacggtgagctgctatgtcatggccaaagcaatggacaacgaccatgccctgacttccagcattgtggtagccgcaaccgtattatcgtccgtcagtctcacattatgggtttatttgttgcggatgttttcctttatctgatataatcattgtgaaggacaatagaaaaataagagaaataaccaaggaaagagaggagcgtgcttatgaaagatgtaaaagaacgttctgcaaagatttacaataaaaaagctgaaaaatatgagaagaccatcagcggcaagatgtctgtttccctggagcaggaaatgatcaaaaagatctgcgttcgggacaacgacaagatactggatgtaggctgcggcacaggaaccctgctgtccggtctgacgcgctggagaaatgccgaggggtacggagtggatgtttctgaggagatgatccgcagagccagcgccgacttcccggatctgcatttccaggtggcaagcagcgatgatctggattttgaagacaacacgttccgtatcatcaccgtgtgcagtgcattccaccatttccccaaccaggcggaattcatccagaaagctgccagactgctgaccccgggaggacgtctctatatcggtgtcgtggccttccccgagctcataaggatttccgggaacattgcggacaaggtacttccgtcctgtaaggtcaaacggccatctacccatgagatcctgggtatgtttaaagctgccggactcacaaagttccgggtacataaactaaaaaaactgctcatgatctcggcaaaaaagccggaatccgaggctttgccttctgaggcataacttatgaaattccctcatttgatttgagggaattttttgttttcacaaaaagcagctgacatctatttcctctgcgtcatcagccacaccggtcacttttatacctgtcaaacgctcaatctgataccggttgtcctcatggatcagatctcctcttttaaaatgattcatcacgattccgcagatctcaaaacctttcatcgccgcatattctgccgtggtcacggctgcctggatggcacccagtccggaaggcgccacgatcaacagctgaaaccctgtcagagttgccacatcggtgagcatcatcatctcatcatcatctgccctcagcggacagacaattccgccacagccttcagccaccacatagtcaaacctcttctgaatctccaaaaaactctgtgagaccacatctttctcaatcggccttccgctcattttagccgccagatgtggggagaccgatggttcatagacgtatgccacatactggtccggcggaccagaaagccccgatttcctgcacacataatccgcgtcccccggcaccagcctgtcttctgaccagacagctccgcttaaggccggtttgaagtacccagcgtcgatcccctgcctgcgcagagtttttacgagcaaggcagaaatatatgtctttcctatatctgtgccagtcgccgtcacaaaaataccgtttttcatactctatggccctcccctaacaggtctgtgcccaggtatgcttttaccctttctgcaaatgcagaggcggccacacacagcaatgcatctcccggcagatccaggggaaatgcagacagtatcacagcagcaaatggtgttttctgccctaaatatgtattcaaaatcatatacttataactgaatccgatcaagtaggtaacagccatccctgcgaaagcagcaggcaaatatgctctgagtccctccctcctttgcctgccgcaaagaattcccgtgatccaggccccggcaataaatccaatgagatatccaaagcttggccgcagcatatactgtatgcctcctcccgccgcaaaaacaggaaccccggcaagtcccacaaggacataaattcccatagaaatactcccgtaccttgggccgagaagcatccctgcaagcagtacaaataaaaattgaagagtaaaatagtccataaacggcaccgggatctgaatgaatgctccagccgcagtcagggcagcaaacataccgcacaacacaatccatcgggtttccatagtttttctcaaaacgatttcccctttcctttcgttaaactcatttcgtaacccgcttattgtatcatttcgcctttctattgtaaactatttttgattatttggtttacaatacatctcgcaaatccgctacatcagcatgacctgaaagatcaagagcatggtgatccccagtgagatcaataagatggatctgtaaaagtctttcatttcctttgttttttctttgttccatttatttctcatctgtactctctccttacatctatcttgataaattagacgcctgaaaaaacgaaaaagttgcatttcatttctctatttgtatttatggttcccggatgaaacgaaaaaaaagaaggtattttacggaatacacccgtaaaattccctcttcttaattgatatgtatcctcggcagttatctcaataataaccggaaagccaccagcattacgatccctgcggttatcagcagcaaagacttatagaaatacttcacttcccaaacttcgtgtctccttgaactcttcctcacccataccatctccttctcttttcctcttcctttgaagagacaggcagcggtccgtatcgccgcccacatccagtaagattgttaaaacattggtcaaagtttccgttcacataggtcagtcgtatgttggaaatatcttgtattgttataaaaaattaaaacttttgtaactttattataccaactcttacaagaaatttcaactattggattagttaatttttgtgagaatatttagtaaatattaccttatcactccagccactgcaaaaaccatggcagcttcttttttttcttctccagcttcttcactcctttttcccccacctgttgctccagtttttttctggtctttttgtctttggctgcctcactctcctttgtaatgcagagatccggaaacatcacgcaccaccagttatggcctgcagcatctccaagatcgattctcagcgcatcgtaagtaccttttggaaaaacatagcttccgtaatctttttgggggaattcttctctggtcatatacactttcaccgggagctcccttccgtttttctttaatgtagtcttagccacttttgcaatttcctgtttcttgctggccaatactttctcggcttcttcctttgtctttgcatgttccatatacggctttaaatactttacgacctgatcccggaccagcagcttttcagcctggtcttttttgctgtcgctgtttgcgcggatatggaatcgcacaactttctgctttatattttcattcactctgtcatcttttccttttgaccatacagcgccgaggatcacggcagcggccaggaacagcatccagatctttgattttttcttcatactatgaacatgcccggattttctaaattttaaacatgaaaacttttatcagatacccagtggacaagtaggaaatgccgcgttacgatggagctggctaaaaatttaacacaccaaatttcaaatccggggttgacatcctggtgtcaggtatagtattttaaagtcataagtcatatgactgacggacaagtggagtttaccacaggaagtatgacaacgaatttttagccgaccgtctgggcactttgcctggacgtgcggctttttttattccattaggaaagttctgcgaacctccctatgaaataaaaaagccctgcaggcagtatgcacaccaggcagccaatcaacatttttacaggaggttcctatgattgttggacacatccattccatggaatccatgggattagtcgatggccccggcatccgcaccgtgatcttttttcagggctgtgccctccggtgtaagttctgtcacaacccagacacctgggaatttacaggtggtgaagaactgaccccggaagcgctggtcaaaaagatctcccgcttcaaaccgtactttaagcagaacggcggagtaaccttttcgggtggagagccgctgatgcagccggagtttttactggaaacattaaaactctgcaaacaggaagaaattcatacatgcattgacaccgccggcgttggacagggaaattacgacgagattctttcttacacagatcttgtacttctggatctcaaagaaataacaaaaccggcatacgagtctatgaccggaaggcctatggaccgttttgatgaatttttagaggcattaaaacgaaacggcacaaagatctggatccggcatgtagtggttccggggcttacggacagcgaagaacacatgagggaattaaaagcatacatagaccgaatacccaacgtggaaaaggtagaactgcttccctatcatttgctcggcatcaataaatatgaggtgatgaatctttcttatcctctctcaaatgttccggcaatggacaaggaacaaaccagacactttcaggaaacctattttaatcaatatggaggaaaacaatgttaaaccaatggaacggctttaaagaaggaaaatggactaaggaaacgaacgtaagggattttatccagaaaaactatacattgtacgaaggtgatgacaccttcctggcaggtgttaccgatagaactcaaaaagtgtggaacaaatgcgaagaactgctctcagaggagacaaaaaaaggcggcgttttagatgtggaaactgacattatttccggcattacaaactttgcccctggatacatcgacaaagaaaatgaagtcattgtcggtctccagacagatgcgcccctgaaacgtatcgtcaacttatacggcggaaaaaggatggcccattcttccctggaacagtatggatataagctgaatccagaaattgaccgccacttcaatgaataccgcaaaacacataatgaaggtgtgtttgatgcatatccgcagcgcacaagacttgcaaggactgcaggacttttaactggtcttccggatgcatacggacgcggacgtgtcatcggcgactaccgccgtgtcgctctttacggaattgattatcttgtggaagaaaagaaacgtgacctggatgccctggacggaccgatgagtgaagaacgtatccgcgcaagagaagaagtatccgaacagatccgcgctttaggggatatcaaagaaatggctgcgtcctacggagttgacatctccaagcctgcatctaacgcgaaagaagcagtacaggccttgtacatggcttatctcgccggtgtaaaggaaaacaacggagctgccacatccctcggacgtacctctaccttccttgatatttacatccagcgtgaccttgaaagcggagttctgaccgaaaaagaagcacaggaactgattgaccagtttattatcaagctgcgtcttgtgagacatttaagaacgccggaatatgatgagctgttcggcggtgatcctacctggatcacagagtctatcggcggcatcggcattaacagcaaaccattggtaactaagacttctttccgttacctccacactctgtacaacctgggaaccgcaccggagccaaacctgaccgtactctggtctgagaagcttccagcaaacttcaagaagttctgctccaaggtttccattgatacagattccattcagtacgaaaacgacgacgttatgcgcccgatctacggagacgattacgctatcgcctgctgtgtatctgcaatgaaggtcggaaaacagacccagctgtttggtgctcgctgcaaccttgccaaatctctgttatacgctatcaacggcggtatcgacgagaagaaaggcattgaagttatccctggaattgaaccgatcactgatgacgtactggattatgacaaggtttggacaaactataaaaaggttctggcctatgtggcagaattgtatgtagatactgtcaacatcattcattacatgcacgataaatacgcttacgaggcaagccagtttgcactgcacgatacaaacctggaacgtatcgctgcatacggcgttgcggggctttccatcgcagcggattctttatcagcgatcaaatatgctactgtgaagccagtacgaaatgaaaacggcgtggctgtggactttgagaccgaaggagaattcccaaaatacggaaacgatgatgaccgggcagatgatctggctgtaaatactgtgactttattctctgaggaattaaagaaacacccaatctatagaaatgcgatccatacattgtccgcacttaccatcacatccaatgttatgtacggtaagaagacagggtctacaccagacggaagaaaattaggggagcctctcgctcctggggcaaacccaatgcacggacgcgacaacagcggtgccctggcttccttaaactctgttgccaagatcccttatcgcgacgtgtgccaggacggtgtatccaacaccttctccatcgtaccggaagctttgggaaaagatcaggaccagagagaagaaaaccttgcaaacatcctggacggatactttgtacagggagcccatcacctgaatgtcaatgtatttaaccgtgagacattgatcgatgccatggagaacccggacaaatacccgacactgaccatccgtgtttctggatatgcggttaactttaacaagctttccagagagcagcaggaagaggtcgtaagaagaactttccacgaaggaatgtaagtctgcctgtattgacgataaggctaatgggatatatgatatatatagcaattatataagctcataatatggttgagcgtttctaccaactgccgtaaatagttgattataattcattgaattatgatcatcagctatttacggcagtttttgttacatcatattagagtaccttaaaagaaagaagggtttgaatggattacaaatacttaagaatggaagattgcaagagaaaagagcattttgaatattttaacagtttaagttacccatatgttggactgaccgtaaacattgatattacaagtttattaaatacgacaaaagcagaaaatctcccgttttttcttaccatctgctactgcgtttcaaaagcggcaaatggtattccggaatttaggcagcggatactccatcataaaatcatagaatttgataactgcaaaacatctcatacgctggcattagaggacggtacctattgctattgtacccttgacagtactgtccctttttcagagtttctaccttatgcggtccgggaacaggaggccgcaaagcagaatagaactataaacgaagatgatgatatatgcggcaagatttttatttcctcgttgccctggatttcttacacctctcttgttcagcctgtacctattccagcagatagtaatccaagaatcacatggggaaagtattttgttcaggaaggtaaggtgatgatgcctgtctctgtgctgtgccatcatggcctagttgatgggatacacattgctgacttctataaattattggacaaacatattcttgcaatctgtcagccatagcccaatattaagacataggcgattcaaggacgtaaagacttgacagagaaaatcgggcgtgctatagttttggcattgaaatttttgataaaaggagaaataacatgggcgttaacatgacagaccagcttacaaggcgaaacagctctgtacaattcagaacgatgaaacattgtgcagagtacggcggtaagctttaagatttcatcgggagacagattaagcaaaaggatcggctgcaccagcagtccttattttgttacccgtcttcccggaggacccccatgatacaggctgcggacaatgttttgtccgcagccttttgttgtttctataacatagtgacttttatgtccggcagaaggcgagatccatgtgtgtatctttgtcttctgccttttttatattaattataatgcttgccacccgcttatcagaaaggaaccatacgattatgagtttattagagattaaagaattatcccatatctttggtgataaaatattatttgaaaatacagaattccagcttaacaagggagaacacgttggaattgtaggccccaacggggcaggaaagagcacccttttaaacatctgtaccggacagatcactcctgactcaggccgtgtcatctggcaaccgaaggcttcttatggatgcctggaccagtatgcgcacatggagtctgagatcaccattgcagactttttgagatcagctttccatgagttgtataccatggaagaacagatgaatcttctgtatgcacaggcggcctcaggagatgaagaatctctctcccgtgctgcccgataccaggagcagctggagacgagagatttttaccagactgacacccggattgaacaggtggcatccggtctgggtctgctccccttaggccttgaccgcaaggttggacagatcagcggcgggcagcgcgcaaaggtgatccttgcgaagcttctattagaaaagccctctgtcctgctgctggatgagcccaccaacttcttagataaagagcatgtgacatggctgtcagactacctctcagggctatccaatgcctttatggtggtctcccatgacaatgactttttggagaagaccgtcaaccgcatatgtgatctgcaaaacaaaagcctgacaaaatattatggaacctactctgagttcttaaagaagaaaacatttttacaggaagagtctgtccgccgttatgctgcccaacagaaaaggatcaaagaaacagaagattttatccgcagaaacattgcgggaaggaaatctaagatggccaaaggacgccagaaacagcttgagaggatcgaccgattagatgaccctgccttgacaacaccccgcccgcattttaacttctccactctgcccgtgaccaatgcggatcatttatccgtcagaaatatggcagtgggttatgagtatccgttgctctccggtctttcatttgctgtaaaaggagggcagaaacttgtgatcacaggtttcaacgggatcggaaaatccacactgctgaaaaccctgactggacagataaaggctcttcacggaacattttctttttcagaacaggtcactttaggatactttgaacaggacctagtctggcaggatccatcccggacaccggtccagaccgtatcagatcatgatcccgcccttccggtaaaaaaggtccgacagcatctggcccggtgcggtatctccagccagcatgcaaggcaggagataggcacattaagcggcggcgaacaggccaaggttaaattgtgcctgctgaccttgagaccctgcaactttttgatcatggatgagcccacaaatcatttggacgtgcaggcaaaggaggccctgaaggctgccctggaaaactttccgggtacagtactgctcgtatcccacgaggaatccttttaccgggactgggcggaccgtattatctgtgtgggaatgataaaatgactttatagcagagatgtagtaatataagcataacagaaaaaaatcatcgtagaatgggaccttctgcttagccgtcatccctatccagcagacattaggtccattttctacagcattctaagaaccgaacggaaatcatgtggaacatgtcatactttatcaatgtttgaggaggactatatgtgcataaataaaaccgacatcttaatatctcaggaactttccgtttctgattttttatccctccgcagacaggtggacttccagccgttgagcataactcaggctgaaaacatattaaagaataccacctatatcactgctgcatatgacggcagcaaatgcatcggcctgacccgtctgctttttgattatggaaccgatgcatatatcacagatgtcatcgtccaccctgagtatcagggatacggcatcggaaaaatgctgatcaaagatgtactcctgtttataaaggagaaatcttctccccatacgattgtcacatgcagcctttatgcaaataaaggaaaagagatgttttatgaaaagcttgggttctccaggctccccaatgagaaatatggcggcgggatggcaatcgatctgtgagatgggcctgctttcatttaattactgcacgtcatgcttcttgtcaacctgacttccgatgatggtacctgcacaaatgaagatgataagtaaaacagcacccaacagatttcttcccatgcacactgagaagatcatagcgataactcctgttatgccgcctgttaaagctcctaatcttttataggttcttgtttcaaactgcttcacacctcactccttctattactcaaaaatcatatagaaaatgttacacaatgatttctgttccaaactctttaagagctgccctcacctgctctgagggctctgtttcacagatgacaccatcgatctgagtaaaatccgcaaatacatagttagcctggaaatcaaacttctttgtctccatcatcaggtagcttctgcggcttttgctaatggcactttgcttcatggccccgtcctccggaacgtaggttgtgatggcgttttccatgacatccgctcccacaactcccataaaacaaagatcgaacctgaagttttccatcatagaaagtgtcaggttccctagaaatcctatctgggagcggttgaattcccctcccaaaaggataaaaccagtactgccgcccgccgcaaacacattggcgatatccagcatacaactcactactgtgacctgccgttttgttctgatgatctcccttgccagctccagattcgtcgtagaggtgtccagaaacactacatccccgtcctttatgagctttaccgccttttttgcgatcctttgtttctctttgagatttttttcttttctggaagaaaccgcattggtgtgccccggatgctggctttccgccaaaacggcacccccataagcgcgttttaaaagatggcggccttccatgctggccagatcttttcggatacagtcttccgtcactttaaacatctggctcagttctttcacttttactttttgattttcatgcaaaagctctagaatcttttgctgtctttcttctacaaacatgctctgtctccacctgttttttattttattctaccatatcccggcccggcatactaccggccttcgttttcctgatactcaagacccttgagcagcagaaattcgttgacgacaaaaaactgggccgtcatatacacatcggaattatatctgcctttcataaccggatgggcgtagaactgcaggctgatatcgctgagccgtgacagctcgttattgcccacctttgtcacagaaatgattctgacccccttggccctgagccttccggccagttcattgacaaatgcattttcaccggacagggaaaacaaaaagaacacatccccttctctcacgatctccagtaccatcttgatctcttccctgccctcaatgagattgcacagatagtccaggaaaagaagattcttttttaattccctggccgcattcttctggaccgcaccgctgccgtaaacgtagatctgtccggcctctgacagcagttccaggacatcggagcagtccctgtccatcatcatgtccagcgtcttaatataatcctggtaaacacgttcgatctccctggcatcaaaggactcctggtccctgctgtcccattttaaaaagatcttcagctcaccgaacccttccattcctaatttgtgggtaaagcgggaaaccgtggtgtgggacacatggcaatgctttgcaagctcctggatggacatggtctggcattcctccttatggcgcaggatatagttccagatactcatatcattctcatttaatttgtcatagttttcttcgatcagcgtctccagtctcatccgccttctcctcttttttggtttgatactccatatattttaaaaataagatctcaattaaaatgaagtatgatgtcagggaatcgtattctatctggctgaacggctgcgaaaacactgtgtcagtcacatagagtgcatagtcggccatatgggccagtgtgttttccctgagcttggtaatggacaaaaccggcacaccccggatctttaaatttcttgtaaaattgttgatgaactcattttctccggagacagatatgatgataaacaagtcatcctcggtcaccaggctgagaagcttttccgcctcctcgtatccgctcaggtcgtagatcagcctcccgctcatcatgaacgtacgctttaattctttcttaatggatgactggatcatgccgattccgtacacataaatattccttgcacggtcaaatacctttaggatctcggtgcagtctttgtccttcatgctgtcaatgacctgctggtaggaatggcacaccatgtccacatggccaatgttctccttggcctcctgattgtcaagctttaagaaaactttcagttcaccgtagccttttaaggacagcttctgggcaaaccgcaaaactgtagtcctggagacactgcacttaaaggccagctggtctatggcgagcttctcacactcttttctatgtgaggatatgtagttccatatgtacagatcattctcgttgagctgactgtagtggctgttcaccagttcgtctaatttcataaagccccctgccctttatcatttccgccgtctttctgttcctgaatctgattccaattttactctattttttccattttgtccacggacataacttaaggcagataccaaacgatatctgccttgcatttaagtttctttattcatattcgaccagagcgcttgttcctgcttccaccttctgctctgtatagaacttggaaagcttatgcccgttgggctcaacaaacaccagcatggaaacgtccggaattccttcttcctttaacatttttcggtccactttcaccagcggatcccccgcctttaccttctgtccggcctccacataagtgtcaaagcctttgccgttcagttttactgtgtccagcccgatgtggatcagaacctgaacaccgtcttcattttccagtcctatggcatgttttgtgtccgtcactgtagtcaccgttcccgtgcagggagccacaaaggtatcttcctccggctccacagcgatgccgtcgcctaatactctgcctgcgaacatgtcgtcatctacctcagaaagatcaatgctctttcctgttaccatggaataaaagactttatcccctttctttttacctttcaaaaatccgaacatcccatacctccatttatttttatttcaattccgtccagaagtctttgtttgcttcgatcagatcgtccagaatcagttttgcgattcttgcgctcggaacggtttttgacagtgtcagtgcctgccataacttctggtaacttccctcgatccatgcttccactgtgagtttttctacgctgacctgctgctccataagacctttctggaactgtggaattgctccctgacagatcttttcataaccattgcatcccacgatacaaggaatctcaaccatagctgtgcggtcaaagttttccactgccccttcgttaggaacaatcaaaaggaatctttcctgtgtattttctgcgatggcacatgcaagatcaacaatgtaggttgcgtgggcatctgcctcaaatgcacagccttcgctggttccatttgcaatgatccgttcgcactctccaaagacaaatttctctctgccgtccatgacctcattggctcttgtgtattctgcattagaagtttccactacataatcctggaacaggtaatattttagataagtgttcgggattgtgtcaggatctactgcatacacatctcttgccttttggaacgtatgtacccagctctcatccacatgctgatttgtgtcagacaatgcatccgcaaaaccattcgccttcatatgttccttaatctgaggcattaagtcgtttccattcttatcatagatcttatgccaccatccaaaatgattcagtccgtaatatcccacctgcatttcttttctggaggaaagtccaaccatgttcgccatcttttcttccaaatcaatcggcatatcacagatattcaggatcttagagttcggacgcagccttctggtcgcttctgccacgattgccgccggatttgaatagttcagcatccatgcatccggtgaatactgctccatatagtcaagaatctcgatcactcctccgatggaacgcattccgtaagcaatacctcccggtccacaggtttcctgtccaagtaccccgtattttaacggaattttttcatccagttccctcatggcatattttcctacccggatatgtgccagtacaaaatcaatgtccgtaaacgctgtctcaggatctgtcgtatatccgaattcaatctccggcgcatgctcttttaagtaaatctcacatgcctttgccactgtttcctgtctctcggcatcgttgtcataaaacataatctttctgatcgggaaacggtccatgtgctctaagagcatcagtgcgatccccggtgtgaaagtacttcccccgcctgccactgtaactgcatatttctgctttgccataatcaacatcctcctagcttttgctttgttgttttcttcgctgaccaaatagtacacccggaaagcctgcggtgacaatacatttacagggtttagggagtggtctttgcttccgtttcatggaacaaaacctgtgaattttcccaagagttattctccattatctccagtcagctctggaaaggcctccttccgacaatggagaataactatcgtagagaaagtctggtaacctccatggtccttcacgaaaaaaagccctgcagaattgaattcttctgcaggactttctatcaatgcattgcgatcctaactgtggcaaataggcagatacctgctaacgccatgaccactaggcttccggatacggttcccaaaaatttattgttccattccttcttaaaggcttctctcagtgtgattccataagtctttaacgttttgtacagaaggaatcccaaaaggagaatataccatacgttctggagcagcatctgcgctgcgatcagcagggacaggttgacggccgcataaccagcgtccagggcaagccgtttctgcataaagatcaaaaggtatgcgataaatgggttgatcattgataccaggaacataacagccaatttaggatcttcccctatggccattgatatggatcctcccgtccttgccgcacccatagacagatacgcaagacagacaaaaggcgtcaggcaaaggagcacctttgctatattataatacctgtctaaaccgctggttcttacattcatcattctcatccctgctttctaaatctttgttttacagtaaactttcaaaatcatcccgcacactcggtaccttcaggccgatgatcacctggtatgactttccgttgacagaacagccatgggctccgatggatttgaaatatgggtcatctttgcataaagtctcatcctttacattgaccctgagtcttgttgcacagtttgtcacatccacaatgttgtccctgcctcccagaccttctaagatcaaattggcaaactggaccttttgttcctctttggaacctttcttttcacggtactcttctttggacgcaaattttatttcgtcgtcatcttcacgtcccggtgtcttaaagtcaaacttctggatgaggaacttaaacactacaaaataaattccagtaaatacaagcccaataacaagtaaaagtaaatattgtttccagtgatttcccatgagtggaatccagtttagggatgccatctctatagctccgccagagtggattcctacgatacctgccagatacatggtggttgacaaggtcgcagccagcagtgcgtgaacaacgaacaatactggagccacaaacaggaatgtaaactcaatcggctctgtaacaccacagaaaatagcagtcagggtgatcggaatcaataagcctaaaattttctttttcttttctttctttgctgttgagtagaaggccagcgcaattcccggacatccgaaaatctttgaaaaacctgtagatgtaaatccagctactggcacgagtgattttaaagatgcagttgatgctgcaatctctggcagtttggttgcccagtatgaataaagacctccaggcacgaccacattatcataatagaacggtgagtataaaatatggtgcaggccaaatgggatcaatgccctctcaaggaaaacgaatacccagatacccagagcaccggctcctttgacaaatccctggaatgcaaacataccaagctgtattttgggccataagaatgctgcaagcactgctaccggaaccataacaaaaaatccgaccatgaacacaaaagtagaaccgctgaaagttcccagccactcaggaagttccgtgtcaaagaaacggttatgtaaataaataacgatccccgcaatcgcaagggcgcccatcatccccatatccagggttttaatgtttgcaatcattgtaagtccgcttgtgccgccaacttcctgtgcaaaatcaacaccgaaaactcctccccattgagagagaatggtactcaggaaatagtggaaggtaagatagagtaccagtgcctccatgcagcaccgggcattttgtttctttgccattccgatcggcagtccgaccacaaacaacagtggtagttggttaaagacggtccagccgccctgcaggagtacattccagcacttgtaccacatactggacggagcagcaaggcttcccatgatcgtctctgtggtaaacagagttccgatccctatgacaatacctgcaaaggcaaacaagagaaccggagtaaacatcgccccgccgaatttttgaattttctgcatcataatttttcatcctttctttgtcaactgacctcaaagcccggcgccaaggttttgagcacaacacatcagccggaatctgctgtttttgctgtgttgttattttcaacaaattcatcctaacagaccttgaaaatgtaatcaatatatacaaagactttagggagaggggttatcaaacaaggaagctgcacaattcctgtgaaatttcccaggaggtatatttttccgtctctatttcgatatgatttattcttgatttccgttgtcaagttcaatatcttgtgttaagatagctttatcatcctacatatagttgaaagggaaacaatgaatatgaaaaacaagaaaacttccaaggaccttaacggcaccttctatttcacaaaaaagatatccggagcctttcgttcacaagaaatttctgttatggaacttcttacatccatacaaaaagagttcccacaggaagaatacagccttaaacttttatatgaaaaattccagagctttctaaagcaaggcaccagggatcaggaaaaactcctgcttcttgtgaaggccgcggcagagctcacttcccaggaagcccccaaatgggagaacattgcggcacggatcaagatgcttgaatttgaacttcaggttcaaattcatttggaagagtatcacattcacagcttctatgaaaagatcttatttttaacggaacaaaacttatacggagagtatattttaggccattattctaaggaagatatccagttgttttcttcctggatccggcccgagagagatgacctgtttcagtactcaggcctggagcttttgcttaaccggtacgtaatacgtgaccatcaggggaaccctctggagacaccccaggaaatgtttatgggaattgccatgcacctggctatgaaggagacaaaggatcgatcccattgggtgaaacgtttttatgacatgctgagtcttttacaagtcaccatggccacaccgaccctgtcaaatgccagaaaaccgtatcatcagctctcttcctgcttcattgacactgtgccggacagcctggacggcatctacaaaagcatcgacagctttgccaaagtcagcaagttcggaggcggcatggggctttatttcggcaaggtacgggccagcggaagctctatccggggctttcagggagccgccggaggtgtgatccgctggatccgtctggcaaacgatactgctgtcgcggtggaccagcttggaatgcgccagggcgccgtggccgtctatcttgatgtgtggcacagggatcttccggaattcttaaatctcagaacaaacaacggagatgagcgcatgaaggcacatgacgtcttccccgcagtgtgttatcccgattatttctgggaacaggcacgggataatatagaaggagattggtatttaatgtgtccccatgagatcctcaccgtaaaaggatattctctggaagattgctggggcagtgaatggacggaaaaatatttggactgtgtccgggatgaacggattaaaaaacgtgtaattcctataaaagagatcgtccgtatgatcataaaaagtgccgcggaaaccgggactccgtttaccttcaacagagaccatgtaaaccgcgcaaatcccaaccagcataaaggcatcatttactgcagcaatctatgtaccgagattgcccagaacatgagtgcctcagaacagacggagcagaaaatccagatcattgacggcgaggaggtcgtagtgactgtcaccaagcccggtgactttgtggtgtgtaatctggcgagcctttcacttggcaacctgcctgtcacggactatgacaagctggcatacgtgactgagagcgctgtcagggcccttgacaatgtcattgacctgaattattttccggttccttttgctgagatcaacagcaaaagataccgtcccgtgggactgggtgtcagcggataccaccatatgctggcaaaacataaaatccagtgggagagcgaggaccatcttacatttgcggaaaaggtgttctccgatatccactatgccgccctggaggccagcagccggatcgcgcaggaaaaaggaagctatccgtactatcagggaagtgactggcagacaggcgcttatttttcaaagagaaatctagtaaacggacgctggaaagagcttcaagaccgcatccaggaacacggcctgcgaaacggttatctgcttgctgcagctcctaccagcagcacaagtatcattgcgggaaccacagcaggtctggatcctgtcatgaatcggtactttttagaggaaaaaaaatacggccttgtcccaagagtggcccctgaactttccatggataccttttggtattataaaaacgcccattatatcgaccagacatggacggtgcgcgcgtgtggagtccgccaaagacacattgaccaggcccagagtatgaatctatatataacaaatgaatacaccttccgtaaggttctggacctttacattctggcctgggaacagggggtaaagacgatttattacatgcgctccaaaagcctggaggtggaagattgtgaagtttgttcttcatgagcatagaaagagagaaaagaaatggcagaacttatgaaaagacctttgtttaatccccagggggacaccgacgttttaaaacgccggatgatcaacggcaatacaaccaatctgaatgatttcaaccatatgaagtatacatgggtcagcagctggtaccgccaggccatgaataatttctggatccctgaggaaatcaacctgggatctgacatgaaggattataaacagcttccggcaccggaacgccgtgcctatgacaaaatcctatcgttcctcatttttttagacagtatccagaccgccaaccttcccaacgtcagcggatatatcaccgccaatgaggtaaacctatgtttatctatccagacatttcaggaggccgtgcacagccagagttacagctatatgctggatacaatctgtgaacctcaggagagggatcatgtcctgtaccaatggaaggaggatccttacctgcttgagagaaaccagtttatcggagatctttataatgaatttcaggaatataaaaatgctgagtcctttgtcaagacattgatcgccaactatatcctggaaggaatttatttttacagcggctttatgtttttttataacctgggaaggaaccaccgcatgcctggttcagtgcaggaaatccggtatatcaaccgggatgagaacacccatttatggctgtttaaaaatatcctgctggaactgaaaaaagaagagccctctttatttgacgacggccatataaaggtttaccgccaaatgatcaaaaagggctgtgagcaggaaatccgctggggtcactatgtgatcggcaatgacattaaggggctctcaaaagaaatggtgacagaatatattcagtatcttggaaacttaaggtgccagaatctcggctttgctcctgtttatccaggcagggaaaaagaaccggaatctatgtcctgggtgagccagttttccaatgccaacatgattaagaccgacttttttgaggcaaagagtaccgcatatgcaaaaagcaccgctttgatcgatgacctttaatatgtttaagatctttgcaatcacaaaaatccggggaaagaatcgtctttgatctttctccggatttctggctttttactgcttattcacttttcttttttaccggtacccagacctcatactctgcattttcagggtctgcgttcagatacaattcaatgtcaggcgcctctccgaattcatatccagagttgggaagccactcagtgccgatccttttttccagctgctggatagatcctggcatactgcccttccctttaaatatagcccatgtggctgcaggcaccgtgtactcgtcccatccctcttccaacggatcctcactggaaaccgctatgagatatttccaatcctccaggctgcccacacatgcgctgacccctaggatcccctgcggttcttttccgatcttggagaccagtttctgtacggttccgtctgccgcagcttttgtccacagccccggcactatctgaaagtttttttccacatctttgtccatcggcgctgacactccgataatacgaaagctttcttttgtctcaattctgtaattcatctctacatctccttttattgtgatctgaaaactgataggaggataggattttaagataattccgctttttctcgccgccgaaggcgcaacgtgatgaatactctgaaacgcccggttaaaagctgtgggtgagtcatagccgtactttaaggctatatccacgactttttcttttccgccgcttaaatccgccgctgccatggacatccgcctcctgcggatatactctgaaagcggcacgtctgcaatgtaggaaaacattctctgaaagtgataggtggaacaacatgcgatcttagcaagttcctcatagtctatctcctccgataaatgctcctcaatataggataccgcctggttcagtctcttaatccactccatttctatctccttcctgcaataaaagaatacacctgcaccgtgaaactttcctctcattctatgcactgaaaagagaagcttccggtacgacacagttctctttcatattaacagaactgtctgtattatcaatggttttgtggcagggggtaaatacttccatagaaagttacactcattttccggcgataccgtccgcaattaattgtgccactttttttatatcttttccacattcacaatcagacttattgtcgcagaaaaagctttccacaaggatagcagccggttttgtaccattcagaaaatacagatggtcgtcctttttggcgcctctgtcccggaacaccgtggccagtttcttctgcactctctgcgcatatgccttccccgtctctgtcttatagtagacttccgcaccgtgtccggccccgtcgctggcgtttaaatgcagttccactgccaggtcatatccaccttgattgatcaatggcagtttataagacttctcttctgtctttgatgcaaatttcttttctggacatacgatcacatctacagtccatccgttcttttccagataatctttcacaagaggtgcaagctttttgttgtactggtactcattgacaacgccgctggccgatgtacacatgccgttttttaagatactgtgtcccactgaaatcactgcttttttcattctgtatcctcctttttttctctctgttcctcctgcggaccgttctctcctttggtccatgtcttgttctcattcaggacaatgttctccatgttcaggacaaacaagttatcccggttctttacattgtaagggactacatggtttatgtatttgtttccctctgctttcagaagctccacacaccttctgcggctgatccagttttcatggtactttcccagtgcgaggaaacctcccacgatggttgccagacctgagagcacggccacggccatatgcaggatactgtcccttccaaatgagctcgccgaacgcattggccaccaggatcagaggcggcagacagatggagatgcctgacagcagataatacctgattctgcacgattccgcagattttgcatacccgcaggctagatgataaaatctggcacctgcatggctttctcccatactctcccttgaataatgaatgtaatccatatcattgtccaaagcaaaactcatatccgccccctttccatcccatgacagggcaaagcagatgggtccgcctcatctccccagcccctctaggaaataaaacaagggcaaaagccgtaaaccggcttctgcccttcatatctaatcacctgcagccgtctgcaatcaccgtctgtcttccgcgtggatgtgctccatccggttacatttattatataaactccatccggtaatttcaatgactccaatgtgaatcaccatctacagcaggtgaatcactgattatgtaatctattttttatatttgttgatctggttcgcgctgatgactacgtctcccttgcctatcttgatcccttttgcctccagcagttcagatactgtgcacacttcaaatcctttcgcttttaactgaggcaggaccttttccactgccgccacagaaggtttatgaatatcatgcatcaggacaatatccccgtccttggcctgttttaagatcgtgttgactgtggcattggtattcaaagttttccaatccaatgtgtcaatgctccacaagatcaaaggcgcgtctaccgttgccttaacagtatcgttgatggcaccatacggtggccgtagcagtcccacatcggatccagtcaccttagaaatggcgccgttcatcttctccatctggagctgaaccccagaagctccgatcctcgtaagctgaggatggttccatgaatgtcctgccacttcatttccggaatccatgacttctttcaccagttctgggtatagctttgcattctgccccagcatgaagaaagttgccctggcatcgtttttatccaaagctttaacgatcctgtctgtgttttccctggccggtccgtcatcgaaagaaaaagcgatcagctttttcgccttgtcaatttttctaggcacatacagagattcttttaattcttctcctgtacccttatccatcaggccttcattagccttagctgtcatctccccgattccgtcatttacacttgtgtaatttgtctttccagagcggataaaccagaggcctcccgcagcgattactactgccaaagcaatccatacagcgattccggctttattccatctccttcttgttctccttcttctgctcattctattctcctttgtcctttatgatctgatagttacttacatcgactaaccctttgtccgtaaggcggagttccggaatcaccggaagcgccataaaggacagtgtaataaacggatcacaatcctctgatatgttcatcattcttgctgtctgtaccatagcgtcaatccgctcctgtattctttttgccggccatgtgctcataagtcctgcaatgggaagcggaagccttcccgcctcttcaccatttctcaccagcgcatagcccccctgcatatcctgaatgatttccactgctttgatgatatcctcatcactgtctcccgccgctatgatattgtgcgagtcgtgggctaccgaggtggcaatggctcctccagtgataccgtatccttttaacggtgcagctgtaatattcccggttccccggtggcgttcaaacacgcacagcttagaatacacagaatctggctgaaacagcccattctctgacggaacctgttccatcagatactttgtaataatctgtcccggtaccagccctatgacaggtaccttcccctgtgtgcgcagcaaaagctgattcttttgaaacggctttacattcactgtgtgaagcatggccccgtaatccgtatccgcttctttcccctctgaaagcatctcctgtgaagagacaccttttttatagacctggagaacgttgaaatcctccagggaatctaatgcgacgatatcagcgtcataccccttttccaggcatccgatgttttggagtccgtaggtctgtgcagtattccaggttgccatagctatggcctcctctggcttcaggcccagccggatgcttttcttcacattaaagctgatatggccttcctgctcaatggtgtccagatgcttgtcgtccgtacaaaagaggaattcttctgtgctgagacctttttcaaccaagcccgtcacaatggcctccacatttctggccgcactgccctctctgatcagaatcttcatgccggctttccatttttcttctgcctccgcaaatgatgtacattcgtggtctgtcatgactcccgcttctatataccttctcagatcttcacctgtcagtcccggtgcatggccgtctatgaccttatccttacagagagcgatcttatccatgatctccttacttccagccaggacatccggataacacatgacctctcccaggccgagcactcttggatgtccaatccacgtctccatatctttagacgtgaaatctgccccattagtttcaaacggagtggaaggaattgatgacggaagcatcacatagaccgaaacgggaagattttcggtggcacccagaagatatctcacagcttcatttccgctgacattgaccatctcatgtggatctgcgatcacggttgtcgtcccgtggggaaggattgcattggcaaactcacacggtgccgccatgctggactctatgtgcacatgggcatcgataaatcccgggcatagcacttttgccgtgcagtcgatctccttttctccggtgaaatccccgactgcggcgatcttcccatctgatacggccagatctgcctgaaagcaagtcttttttttgacgtctacaattgttccatttttaaataccagatcgtatgtcatgacaccgtccttttattgagcttgttctttcaatatatcgaccttgtccaggcgttcccacggaagatccagatcgtttcttccgaaatgtccatagttggatgtctgacggtagatcggtcttctcagatcgagcatcttgatgattcctgccggtcttaagtcgaagttctttctgatcagctccacaagagcttcgcttgatatttttcctgttccgaaagtatccacattgatggaagtagggtgtgccactccgatggcataggacagctggatctcacacttatctgccagcccggcagccacgatattttttgccacataacgcgccgcatatgctgcagaccggtctacctttgtacagtccttgccggagaacgctcccccgccgtgccttgcatatccaccgtaagtatccacgatgatctttcttcctgtaagccccgcgtctccctgagggcctcctatgacaaaacgtccggtaggattgatgaagaacttcgtatgttcgtctaccatctctgccggcagcaccttatcaaaaatctctctcttgacgtcctcatgaatctggtcttgttccacttcaggatcatgctgcgcggacagtacaactgcctccaggcggagcggttttccgttctcatcgtattccacgctgacctgggtcttaccgtccggtcttaaataaggaagtatcccttctttacgcacctgcgtaagccgctttgacagcttatgggcaagggaaattggatacggcatgtattcttcagtctcatttgtggcaaaaccgaacatcattccctgatctcctgccccaatggcatccagttcttcatctgacatgtcagattcttttgcctccaatgccttgtccacaccgagcgcaatatccttggactgttcatcaatggcagtgataacaccacaggtgctggcatcaaacccgtactttgcccttgtataaccgatatctgtaagtgtctggcgcacaaccttttgaatgtccacgtaagcgttggtcgtgatctcacccataaccatcacaagccctgtggtggtacaggtttcacacgctacccggctcatcgggtcttgttttaaaagttcatctaaaatggcatctgaaatctggtcgcagaccttgtccggatgtccttcagtgacagattctgatgtgaatagtattttttccataaatgctcctttcgcttctaaagatattcatatgtatcgaaaaaggcccgaactggtcggacctacttcaatttaacatcataagttcggcataatgtttacatttctgctgcggataacttccacttccttcacctgtcctgcgacaactttggatacgcggagcgctccgccagggaaataatagcaatgcccacatgttacttcttcattttccagatcaatgcccttgagcaccgcttctccgattgactcacccttatattcctccggaatattcacatgtaccagttcattcacctttgcaatcttctgattcggcaaaaatacggtcttgtcaatatcctcaagacggtccaggaaatacttccttataataaagagaaccgctatagaaaaaatacagagcaggttttccatcggacttgtgtgctgtgcaatcatctgtctggctatggcgaacatcaggacctccaccagtgtagaagccgtgtgcttacacagcatcttgatgaactccacgcagatcacaaggttaaacacattgagtacaaactgataaatcgcatcagactctggattgcctgataaaatggcgatcagatccttgatcatccacactccgccgccgataaccgcaatggtaatcagggctgataaataaaactctatccatttggatatcttaaacacttcgtttttcaggtattgtcgcaccggcaattcccccttaatttatacgatacgcagcttaaatctggcgatttccttctcatcgttcaccagtttgatatctccgccgaggttctggatcttcttctcaaaaccttcatatccacggtaaatatagccgatatcgctgactgtagtgtatccgtcagccgcaagacccgcaatgaccagggctgcccctgcacgcagatcgggtgctgaaacatctgcaccggtaaatagattaactccggtgatgatggctgttcttccgtccacctggatcctggctcccatcttggtcagctcatccacatagcggaaacggttttcaaaaatactctctgaaacaatactggtcccgttagacagagctaatgacacggccatctgaggctgcatatctgtcgggaatcctggataaggcagggtcttaatctgggttgaatccagccgtttggtggctacgactctgactgcgtcatcaaattcatccacctgcgctccgatctcttcgagttttgcgctgatggcttccagatgcttgggaatgacatttttgatcgtgatgtcaccttttgtggcaacagccgctgtcatgaatgttcccgcctcgatctggtccggaataatggaatactcacagtttccgagtttctccacacccttgatcttaatcacatccgtacctgctccgcggatgctggcacccatactgttcagaaaattggcaacgtcaacaacatgcggctcttttgccacattttcaatcgttgtattgcccttagccaaagctgccgccatcataacattaatggtcgcaccgacagataccacatccatataaatgtggcagccgatcagttcatctgcagtggccgtgatcataccattttcaatctcaatcctggcgcctaacgccttaaagcccttgatatgctggtcaatgggcctgctgcctatctcacagcctcctgggagagctactctcgcccttttatactttcctaaaagagcaccgatcagatagtaagatgctctgatctttctgatatattcgttatctacatcgcaatccgcattcatgccgcttccgctgatcaccacttcatgttttcctgatctttttactgttgctccgatgccttccatcgcctggagcaaaacatttgtatccctaacgtccggcatattttcaatagcacacgttccatccgtcataactgctgctgctaagataggcagggcagcattcttcgcgcctccgataacaacttctcctaccagtgggtttccgcctttaatgatatattgttccatcatacacctctatataaaactctattcaatcaatcgaatcattcattctctatcaataatctatccattctgctaaaaaataagcgtatctttttcaatacataccctcaggcaggcacaaaataccctggcataagtccagaagttccatgccgcttactcgcatatttatcagtatatcacactatattaagttttccaacactttttctaaggcttccccaatctttaaatcatcggtatcaaccgtaatgtctgcatatttttcatagagaggtattctttcatggtataaatcacaaagggtctggccgttgtccagcactacacccctgtctgccagatcgccgagccgctcagccactgtgtcaaacttcagttgcaggtaaatgacggtaccgatctgcttaaagtgatccatcgctctttggctgtagatggcgcttcccccgggggcgatcacggagttctcagcttcaactgacgcattgacatcctcctcgatctgtttgaatgtctcatttccttcctcactgataatatccttcaggagctttcctgtcttctgctggatgaccaggtctgtatcaataaattcagcccctaatgacttagccagcaaaaccccgatcgtgcttttgccagcccccggcatcccgattaaaatgtagttatttcctttttggcttatcatttctattcttcctttttttcttcttcacggagtatccaaaagttccgatctgttttcccgtctcaaaatatcctccatgggaatagatcagaggattggttttttcaagggcaaaccgtccgttttcttccatataattatcgtccaccatgatattaaccacacgcgccgtaaacatatgatgagatcctaggggagaaatctcctcaacccggcactcaatattcaccgggctttcttttatgcagggtgcatgtgaaagatgaccatattcctttgtgaggcccatttctttaaacttatccagatctcttccagaacgcacaccacagaagtctgtggccctggcgagctctttggttgtcaggttgatgacaaactcaccgcttttttcaattatgtggtaggagtgcctctctggtctcagagaaatataggtcatcggcgggttcgtgcagatggttccagtccatgccacagtgatgatgttgtccggctctccttccaatccgcagcttaccataactgcaggcagcggatagatcatgttgcccggcttccaagatatctttgacatgccgcctcctagagttctttcctgattgcttccctgagctgttccatctctccgtccccatagctgagttctttccatcccatactcacggtatccccttcatatctcgggatgatatgcatatgaaaatggaaaacagtctggcctgccacagttccattgttctgtagaatattcattccgtcacagtcaagcactgtctttaacgcccttgccaccaaagctgcaagttcaaacagctgcccggcagttgcagtgtctatatcgtagatattatcaaaatgttcttttggcaggatcagcacatgccccttgttggccggagcaatatccatgatcaccttaaacttcgagttctcataaattgtggctgagggtatttccccgcttatgatcttgcaaaatatacaatcctgtttcttcataattttcatctcctttggtttgtattgtatcttatttataggcctttttcaagaatccaaaaatgaagtgtgaaattattactatagtattcgcgcaacaaaaaaaggtgagtctttgcgactcaccttttaaatatttaattgtaattaaccggaggcttttattcgaaacgccctatttcatacatgccatacacaacttctgtattcccttcaatctctcaatcaatccgaactctgagtctttgcgactcacatatcaaacttcttgatctttcatttctttttattccgttctcttctatatacaactgattcttcgattgacgctctacctgtcctgtctctccgatctttgtataaaatctatactggacaacttatcctatattctgaaggctcactgtatgaaatttattacttattgtatatagaatgtcttctatgtcttgcgacataatatccaaacaatatcgcctcccatcgactcttttaagaaatccgttaactcgttcctctttatggttttattataaaaaacaacgccgatattgtcaagcaatttaaatatgtatacagtgttttttgttttcttcttattttattctaaatattctgaaaactttaccttcatttttcactttatccacagtttgttcacgatttgttcacatttattcagtagaataagaaatgtaaagtagttaaacatttttaaatactttcaaatcctacccctcttgaggatgaaaatcctctccttattgttttaaagttttaaagttacttacagaaaaagagcagcctgcccggctgctctttttcctttcataattcagttcttccttccagtgcccgaagaagggtaacctcatcaatatattccaaatctccgcccactggtactccgctggcaattttgcttactttgatgccggtcggcttcacaagcttgcttatatacattgccgtggtctctccttcaaggcttgagttggtagcaataatcagctcttttacatccccctgaagtctggccatcagttctttcagccggatgtctgaaggcccgattccaagcatcggagaaatggctccgtgcagaacgtggtaaataccctcatattttcctgttttttcataggccatcagatcccttgtactctccactaccatgatcgtactgtgatcccgcttgctgctggaacagataggacagatgtcctgatctgtcagggtgcagcattctctgcagtaatgaacattttccttagcatctaaaatactctcagacaaatgtttcacctggtcatgcggcatattaataatgtggaaagcaagcctcccggccgatttaggtccgatacccggaagcttccccagttcctcaatcaattttgtgatctgactgctgtaataatccatatcaattatccatccttaaaacgggaatccgcctccgagtcctccgccaagtcctccagtgattttccccatcttgctctgtgagtcctcctccatcttgcggagtgcctcgttggtagccgccacgatcaggtcttccagcatttcaatatcgtccggatcaactacttcctcgtccaggctcacacctacaacttcttttttaccggataccactacctttacaactccgcctccggcagttgcctcatatgtggtctcctcaagttcttttgtagtttcttccatctgcttctgcatcttctgtgcctgcttcatcagattgttcatatttccgcccatacccggaaatccgcctctttttgccatctcttatacctcctgaaataaatatctttttattcttctatcgtcacatccatgtgaatgcaatccaaattaatggtgtcctcgtttttcacggactccagttctccgatctcaatctttacctggaaccccgatctctgagcaagctccgtttcaagaacctcaatcttttccgggtgtctctggaagtagtccttccccatattcatgctgccctcaggcttaaacatgagtctcagtacctctgtggattcatccgcggtcagaatacccttggacagcagattctttatcatcggaggctgggcaagctttacctgcttccaatgtttgatgatctccttaagttcctgggctctcgccttcggaagcctttcatccagtatctgctctggtattttctctgctttctgagggtttggttcggacttctcagccggaggctgtgccgacaaagtaactccctgggtctttatcttctccagtgattcttccatcatacgcatccgttccagaatactggtcatatctgtctccatctggggacggcacattttgatcatggccacctccaccagtacccttctggatgttgcaaaccggatctggttcagtaattctgacaagatacggatataccggattacagtctcttcattgacctgggccgctttctgctgcatcaatcccagctgttccgaagagatctccagtgcttccatggatgcgtcacccttgcctgccaggagcagatttctcaaataccatatgaagtcggtgataaactgggtgagttctcttccctgctctacaatcctgcctatgatcccaatgaccccggtcacatcatttgcaagtatacagtccagcagctctgcatagacactgatatccacagtgccaagaacctccaggacattttcataagtgagctttttccccagataaaatgcaatgcactggtccagaagactcaaggcgtcacgcatggatccatctgccatccgggccacatatctcagggctttttcttctgtctccacctgctcttccgacatcagttccataagccgatcagcaatgatatcagccgttatccggtgaaaatcatatctctggcaccgggacaagatcgtgatcgggatcttgtgaacctctgttgtggccaggataaagatcacatactccggcggctcctccaaagtcttaagcagggcattaaatgcccccatggaaagcatatgcacctcatcaataataaacactttatattttccagaagccggggaatactgcacctgttccttgatatcacggatattgtccacgccgttgttggacgccgcgtcaatctccatcacgttcatggaactgccttcctggatctcctggcagctttcacattctccgcatggatttccattcaccgggtgctcacagttcactgccttggcgagcagctttgcaaccgacgttttaccggtccctctggttccacagaacagataggcatggccgatacgtccggcttccagctgattcttcagcgttgtgacgatatgatcctgtcccttgacctcatcaaaggtcgacggccggaactttcgatataaagccatatatgacatattctttcctcctgcatcatttccttattgtatcataacctctgaaaatggaaaaggaaaaaaatcgtcgaacttttgcccctgttttccgttgccttttacacaagctcccatataaacttatagttgtcgttgcatgaaatttgtaatagaaagaagagtgattatgaagaatcaaaatgaattgacaacattttcccatgaattgaaaaactctctgactttaatctacagccagcttcagtacatagaacaaacccacccggagcttcttgcagatcttcactggtctggcatcaaagatgatttttcttctgtgtttgacatggtccgccatatgctcactccggcgtcagatgcttctgctgccctggaacctgtagacctcacctctctgctggaggaaatcaaatattcctggagttccaaactgaaggagcacggaatcaggttttccgtccaggcagaggattcttgcccctattatatcaagggttccaagaccaagttccttcaaatctttaacaatctgatctccaacggcgtcaatgcgatcaacagaaaaaaagagactgcaagagagcctctgatttctgtccatgtaagccgtgaaggcagttttattgtctgcagcctctccgacacgggaatcggtatgacgaaggaacagcaggcgcgtgccttttaccggggtgtatcctttgagccgaaaggtaacggtatcggactgtctgtggtcagcgagattgccaaggatctggatatctctatccacatggattccgccctaaaccagggcaccacgtttacgcttattttccccggtcttgccgatacagcaaaatagccaggaggaatcctccaatgcagcccccgatatgggctgcgttgtcaattcccattgtggagaaaccatgatacaggcttcctgcaatcatcagcacaacgccccctccatagaactccttctggtatcccctgtttttgaccagtatccacagcatagccccgatgaggccgaaaattgctcctgacgcgccgacagaggctaccatttctccggtatgcatgtagtaggcggcagatacgatactcccggatataccggctcccaagtataaagccacataccgtcctgtgccgaatataggctccagccggcttcccacgagaaggaagacaatcatgttgttaaacagatgatcaaatccgttgtgcagaaagttgctggtaacaaggcggtaaaactctccctgctggagtgcgtgcatccatgtgagcgctccccagttaaagatctcttggctggccagtgtccacaaatacataaaaatattaatagccagaataaccgctgtagccttatattctcccagttttctgaaacggatccctccggatgtgtcggactgctcctcatcttttcctgcggctgacagtatcaaacataccgggtcatacagttcctcaaaagccctgtccgggtcggtccatgtagatcttcccttgtcagacagaatcagcacaagcactgaggcattaggtccaatataccgcttcaacttttcgtccagcagactggcttcttcctgcgtatacatagttccgtcgggcttgtgctcataggtcatgaacacccctttttttcttcccatctcttcttttatatagcatgggcccagaggagtcatctgtttctggtatcccctgatattcaatagatttaagattctttgatacatgacatttcctccaatagaaagccttttcaatcctattggaattataccataaattctaattgttctgtaccggcttttatttcatctccgccttggagcaccgattctttccaaaccctttcaccatttacaaatgtcccattcttagagcccaggtcccggatcagatacccgtccccatccgtaaggatctgaaaatgacgcctgctgactccgggctgggacaggcacaagtccacaccctctttctgcctacccactgtaaattctctgccttctaccggaattccaggaccattctgtccggataacctaagcatcggcatcctgtccggaaccaacagaacagtttcatcactgaacaattctgtccggcccacagaaggatccttttcttcctcccatgtctgtacattctttttcttttttctggccaccgccaaaagacaaccggtatttaccgccaaaaggactgcccctgtcaatattcctctaaaatttggaaatgtcatcccttcattccacgccctgactgaaaagtaagccatcgaagaaagcagcggaatatacaataaaacaggacagcttatctttctacattttacccgtgacaactccactggtacctgacattccatggtctccgttttcacagaaggttccttctccattacgtctgatatttttggagggtccacaaattcctttaattcttcaagagttataggcccctttctcaacctgttatgcagttcataaaaaaatgtgatctggtcccggtttctgtagtccagctgttctgtacaggactgtacaaactctttcagctgctgtgcgatatcctctccgtaacccggcacgtaacaaagtgccggtcttccttctctcacatatacttgcctggctgtcaggatcaagtgatctggattcagcagataatcctgcgcttcttctattgtacagatcaactccttaaaaaaccttttggcatccagcttcccaatctgatctatatacagattagaagaagaaagattaaaataatacgcttcctcttcctcgatccgccgcacttcacagggcaggattccgtggatcatatgagacagaagtacctgttcttcaaagacttctccctctgtctttgataccacataataatggtcaaatccctcccggatccactgttcattcaatcaagctccacctcctgatcttatctgcttctttcggaagcataaatccctgctgttcttttatgcggaatacatgcaggccaaataagtccacgcttcccaacactgggaccttaacctgagcctgtgccgtgatactccttttgtcttctgattcagatacctttacggagcttactttgcccatcatgatcttcttattcagatctgctgtaagtttgcgctccctgtttccatccatggagcagagacctacctcctttgccattcctgacgtgatacccaggtccataatataaaagaaaaaggagttgagcagcacgagcataaaacagatcaacggtatcaaaagacttgcctccagtgtaatataaccatctacctcccgcatctttcgcatggcttcattccctccgcttcgcttttctttatctttctgattgttcttgtcagtccgctgcagcttaaatctgtatggtacgcatccccctccctggcaacaaacactactgatactttacccttatgatatttagtgcagcgttcacattccctatattttgttttgttctccagatatttctccacatcagagtcctgttcgatagaaagtaaaagatgcgtacagttcacatctttgtgatatacactctcataaggtgtcacatacacctgcccatcccccgactccttttgtgtatgcacatagccggtcatggctttctgtcttatcttctgctggtaatctcctgaaaatgcaggaaggaaaggcagccgaaaggtaatcctgtaccgggctgtgatctcatagatatcctgatccttttcaaaccgtgagcctgagaacaataccccctgtgcacctccaataagagatgaacggtttagcgcgctttggtttacagcagacagaaacttttgcttaagaatcacaggccttacagactgtgtctttttcttctgcagcagatattcatatacagcttcttcctttgccgcctcggatactccgtgatatacctgcccatgaatccacaaggtttcgcccacagaggctaacgccaggaacaagaacaggaaaatagggacaaggatacatgcctccagtgtcatgctgccctcagaggaggagagcagagatgtcctgtcagattgtctgtattcaattgataatcttatattgttggctgttggcttggagaaatgtttttttatacaatccaagaacatctctgctctccccctctcattcttatttaatattccgatagttcttttagtttccactgatacctgttttttaccgggagactgacacctccaaaatgaaggggcttcagcatcatttctgtctctgcctgaaaggaaacataacatgaactcaacgagaattccggcacctccaatttgatattggcttctataagatccatcattctcagatacttctcctgcttttttgtctgaatcatcaagagcagacacagataatcagagtatgacagccctttttttacaggcctcctcttagcggacagcgacgccagaccggcaaactccatctgccacgtgtcctttgacttccagactggaacctttcttccctctgtaagattccttatatctgtcacagattctccgtaagcaagcgcagcgagcagaagctccttcgccagtttaactgcaggaaccagccctgtgatccccagcaccgaagcggccaatgcttccgcctctgcctgtttggatggatccttctgcacataaatcaggtttggaagaaaacgcaggagtaaaagtttagaaaagactgcgcccaagttttctttttcagaggattttccagcgatcagatattctatttcatattgtaatcctttcttcttttcttttgatgtgtagctgtgaaagtacttggatgcataggctatggacataagttccgttttcatacctgtctgggctgtatcctttacctgttcatctaaagtctcactcactgacccggcacgaaagaaattaagcttcttttctttttctctgctttcgtgtccataaacaacagaaatctccttttctgatacctccgcatctccgcctaaaataatggatacagctccctccctcagaagccttgccagtccctttcttggatccttggctttctttacggtctttgtatcttcttgcttccctgtgtctgatgactttttattatcctcactgtcctgttggtctgcctgatcaagaatgccttttgcctgagaggtatcttctctctccggcagcttcagtacatattcttttaaggcattgatccccgccttgccgatatcatacttcataaagtcctctatctgttttttcagtatctctccttgcctgtctgccagagaaatctttttgcttatctgtatcggtcccgcctgaaaggaaaagggatcccttcccgccgtcagatcatagtttaatgtttcaccgatccatgtatccaactgagctccgtaccgtacatccaaaccaaacagatgatacttttgttccagctctttttgataatttcccctggcactggacagggatgccagataggctccctcggccttgccttttcccagataaagataggctccttccagacacatgctcaacagcaggagaaatatgagaaacagcaggctcacatacactgtcacactccctctctgattcagtctcattgaacctgtcctgttttggacgtgatcgtcttaaatatgttctgtacaactttttttatctgtgtctggaaaataattactaatcctatgagcaccacgatgatcaaaatgacttcaacaacacccatccctgactcatctctgataaacttattcatcggttaaactcctttctgttttttctatgattcgtcctatgaaaatgataaaaatgccggcaccattaggagggtcagaatcaccaccaacatcaggatcataggcatcagaagctttgtacttgcctcctcaccttttcgtctggccgtttccttccgttctgcaaatgccgctgtctcttcctcctccaggcgttccagaagatccctggatccccggaccaggctctgggccataaggactgccagttttttataacaaggcatctgtatactatttcccaattccttaagaacctgtgtctgagacgctcccagagcgatctttttatctgcctcataaaactgcctgtatacaaacttaggatgtttttggtcataagaggcggcgattgaatgaaccgccccctgtattgtcattccagctcccagcagcaaaaccagccggcttatgatcagcggatattcatcctttgtctcctttatagcttttgcccgtttctgtttctgcctctcctcttctgtgtaccacaaaagccccagaaaaagaattcccattattaccaacactggaagccggctctggatcttttccccatcctccacacggcttcctttgactctggagggaatggtgaaactctgcttttcagcattttctctctcgatcctctgcagttctttttttgtacccgccagctttgattctttgctgccggtatctcttgggaccacccggactggtactgtgaccagctccgtgtggtcctcataggatagggctgctgttgtctttaagatcactgggcttttcaaatcttcattaaagacatttccctgctcgtcaaccagactgagatcctccgtctcccagtttaccttgatctgggtctcaggaatcctgtccggaaaatttaaagattctctcacctcatttaatgatttgttttttcctttcatatgccttttcacatattcggttcccgcgcggaatgcttctttttcttctttcctgctgtaagccttcggctggacattcagctcatatagttccttttccctgcccgaatctatacttaattcttggtttatctcctctccttctgtatctctatgaatgacgatttcctttcctgtaagccaacctgatattgctgcaagaactaagaccgccagaaaagcaaacgctgcccataaaacttttttccattgttctctaaatgaccgccacacctctatttccatctcttcctttgtcccgcagaagtaactctgaacacatattctgcggttcctgacaacactctccggaagtcggcgaatccatctttctatcattgctacacctcgatctccacaattcttcttgcccaaaacacggaaccagctaaaacggccaaacagacggttgtcaaaagggtacctcccaaagattcatataagacctgaaaatatcctgggttcataagacgcacatacagcaggatgaaaaacggcatcacagacatgatcttctgttccattttctttgcggacaccattgtgaggatctcctctttcacctgaatcttttgattcatgtgctccactgactttttaatgatctgaatcaaatttcctccgtttctcttgatcatccacaatatctgtgcaaattgctctgcttcatccacccttaattccgatgccatcctttccatcaacacttctactggctggttcatctccaaaccggaacatagaattgaaagctgctgctccaacgtacttctttttcctccgtttacggctcttaagtcatcccttgctgctctcatggagttttccagagagtaccccacactcagactgttataaatcgaaagcagcatttccttgaattccagcctggactgccttttttgtatcttctcttgttccctgagccggtaaagcatatagggatagaaaaaaacaggataggtgaaccccagccagatccggtcataaaacagataagctgccagaaagaacaagatcatcccctgtactgccgctatgacggcttttcccgtacccagacttttaaaaatactctttatgcccggtttctccgccgttgctattcgtatgctctgacaataatccctcatacgcttcatattgaccatactcctttagttttttggtattcttcagtgaatctgcaggcaggagccctttcttctgatcatagtaaaacaactttttcatttttacctggccatcttccattcctagaatctcatcaatctccagcagctttctgctgccgtccctgactcttcccagatggatgataatatcaatggctgacgcaatctgcccccttatggcaaagacaggcatatcaactcccattagcaccatcgtctccagacgcttgagcatatcttcaggtccattggcatggcctgtggatatggatccatcatgtcccgtattcattgcgtttaacatagaaagggcctcctctccccgtacttcacctacaacaatcctgtccggtctggaccttagggctgccttgatgagctgctctatggtgatctggttttctcctgctatattggcatttttcatttccaggcgtaccaggttttctatcccattcagcctaagttctgcagaatcttcaatggtgatgattctttcatctgacgggatacagttggacagcccatttaacagggttgtcttaccgctgcctgttccgcctgagataaaaatgttatatcttgccctgaccaagatctcaagaaaccgttctgtaaaaattgagaaggctcccttatctctcagccaatccatggtcatcggttccctggcaaactttctgatggtcatagtcgctccgtttaaagagaccggtggcagcattacattgaccctggaaccgtcgggaagccttgcgtctacaatgggattggactcattgacgatccggttggccccggcaacaatctgctgaatcacctgatacagtttttcttctgatgaaaaggacttactacaccttttaagcttcccgttcacctcaataaaaacattttgatatccattaatcatgatctctgtaatggaatcgtcctccagcagatcctgaaggatatccagtctgcgcagcgcattgtacacctcctttaaaagttcatacttgtcctttaatgacagataagtctcccctgacatcagatatagttcttcctcgatcagttccaaaagctgcctgtcgctgatatcgcagatcaagtctgcccggctcagaaccctttcctttaacaattctctgcatggtatctggttttgttctctgatagaaagacctccttccagtgaagcgttgaaagcacgggatgctgttctgagacttctttaaaacccagaagcctgggatcctccatgtcctcttcccagaccggaagaaacaactgatcacacagtgagaatagttcaaagtcatagatacaggctgttccgatatccagcactgctgaaattcctgcatccgtcagtctctgaaacagccactggtagtcctccacagagacctcccggtaatctagaaaacaccgtgcagaggcaaagcccttgactccttccacgatgacagcggattcaacggccagatccgcgatcccatccttccggaccttgaccgcaaacaaaagattctccatagctccttcctctagggtccgtccataagattccattccaaaatacattgccctattttcctttgcagtctgcagggcaaaatctgtccgtttccggttctccgtgggagaatagacccccgtgaccccggcagaactctccctgcccgggctaaaaatactgtaagcctcttttacgatctcttttgcgtttccataccggcaggcctgtgttgtctggtcctttttcagataatataccagtatattttcgctgatacagattccctcctcaaggataactccctttacgtcctgatcttttataaactcttttaatgcgtctgttgttgtaaatgctgctgccgtcagcggataatccttctggcgattgatatactccatcaggcgttttccatagacagcgtcttcgtcacagattcctactaacatatggctcatagacagtccctccaggcggacagcagcaaatatccgagcataactgccgcagtaaaatgaattctgttattttccttctcaggggaataagataaataagtattgatcttcttctgactgatgcattgtagaatataagaatagaaatagaataagcgcgggaccagactccggtcagacagcatcttaaacagagcaagaattccgccggtaaaaaaagaagctgccacaaggtataggttcaaacctccgagaaaaagtcctgtgacaataaaaagcttgatatcccctgcgccgaaagctcccacagcaaataggggatataaaaagatcagcggacacacactccccagcaaaacatcagggatacttaatccatgatatggcaggagcaaaatgcccaggaccagacccggcagaataaaataattaggtaccctaaactggaccagatcccatactactgctgccagcagataaaataataaaaccataggcctccttcctatggtcttattttacaatcatttactatttctgtaaagcaactttttgtaaataattgtttattatatttagataatttttacattctgtgaatcctccatccctcatcactttcataaagtgggacccgatgatcactccgtctgctccgtggctgcagacgttcttcacatcctccagagtctttattccaaaccctacatatacaggcagatctgtcttttgttttagaaagctgaccgtttttatgtatccttcgggcaggcgcctgaaggaaccggtcttccctcttccgctcatgacatatgcaaagttggtattttctttcagatgcttcatgatctcattttcatccatcgcctcattatatatttgcacaggcttcattccagatgctatagtcaaggcctcattcacgcataagacaccatcatacagcgctgtatccaatttagacagatgaaatctgttgatgccctcccggtaagtcattaatatgacccggaactgatacctgctgcggatcttctccagcagatccccaagctgtctcgggtcaatgccggcttcaagcaccttcctgtggctctgtctgatgatgtcaccgtccaaaaacggatcctccgccgggatgccaagctccaggatgggcaccttttgttcatccatcagatccaatgtcttaaaaaacgtattctcatcagggtacccggctgttatgtacaataccagatccttcatctatatacctcctaaaagctttaagatcccgcctaaaatggggccataaagacagtaatccgtctcactcaggattctcatgatcggggcataagttccaatcatcggaagcaagaaagcctgtcctatgatcaagatcataccgtttaaaaatgatcctgcaaaagcaccccggatccctcctgtagaatttccaaaaatagctgtgacagctccggtaaaaaaggtagggatcaaggcagggaaaactacaaccggatagttcatcactcccagaatacccatgcccacaaaacccgcggctaggcttaccaaaaagccaaagatgacggaggtcggatgattcggaaacaacagcggcacatcaagccccggcactgcatttggaatgatcttatctgcaatgccatggaatgccgggatgatctcagataaaagcatcctgacaccggtgatgatcactgtgatccagagaccgaactggagaccgttcagcagagaaaaggtaatgatatcccttccttcactgacattctgcataacccatcctggaccgctgatcagtgagatcagaaagaacatgaacgtcattacaaccgtcagagcgatggtcatctcccttaaaaaatttaatctctttggtatcttaatatcttccagatcttgttccttattgcctactagaccgccgatctttgcggccagccatacaccagaagaactggaatgtgccagggtgaacccttctcctcctttgatatttttcatcagcggagccacataagcacaggtgaatgtcatataacttcccagcaaaacggcacccagcagaaccagtggcagaaaacttaaattagttccaaactttaacgctgctgcgatcaaaccggagtagaaaaatgacacgtgtgcagagagatggacatatttaaacttcgtaatccttgccagaaaaatattcatcagaaatccaagcgcaaaaattaaagccatttcactgccgatatccccaagactttccgcctgggcagcacccagatcctgcaccttaacctgaagatgaaaaaccttaatgagcattggctgcaaaggcaacagtgccacaccgagagtttgtcctcctgtgttgatcagcagaaacccgatcatggtctttactgtacttgcaatgatcttggacagctctgtcttctgtaccaacatcccaagaaaaactaccattcctatgacaaacaccgcctggttaaagacgttgttgatcaagtacattaatatattcatattgtatcctttcttttatatcgtcctatagctcttttaaggtccttaaaagctgttcctttaaatatcccttgtccatcatgttgtcaatcctgatgatttttgctctggactcatgtaaaagatctgcgaagtcagatgtggtgatcacaatatcgaatgcgtctggattgacggacccgatatccgccgcctcaacactggcttcaatcccctcctctgacaggctctgctgcgcatacaggcgcagcatcatactgcttccgactcctgctccacatactgttactatatttaacatatggcttcccctttctttactacctccatgacctcctccggcgattctgcttttaagatcatgttgattttctccttatcatttaatatttccaccagttctgaaagtgctgtcaaatgtgtctggtgatccacggcacaaaggccgatgacgatttttaccggatcattgaccttatgcccaaataccaccggttcttttaatgtcataagactgataccgattttctttgccccgcattcaggccttgcatgaggcatggcgatgcccggcgctatgacgatataagtgccgttctcctttacattctggagcatggcctccacatagctttcatctgcaagtccctgcctgcacagaagtctcccgctctctctcaccgcttcatctctggtctgaatctctgcattcgtcttgatcaagtctttatttaatacttctattaacattggatctctgtcctttcctgtctttattgtctccgcagcttcctgttcaaaatactgtctgagttcttcctttaatcccccctcatccaaaatggatccatggcgtttcatgatctccaagatttcatctatactgaactttgtatcaatggagctgagtacatcactcagccgttctatatcatgtttgtccagaacaggactgaccttaatgactctcactccgtcccgaatcagttccaccgtggaaatgatcagatccactttttgtttctgtaaaatctcatccacttttctagcggggaacgcacccagaatcgagatctgaaatctgcttttcagctgggataaaagcatctgggatgtgctcgtcccagtgctgcataccaccatggccaagggaagtcttttctttctctttttctgtctctccagcgctgccgcgaaacagatcgtcagaaaggaaacctcctcttccggaaaactaacgccaagatctttctccgccagagaaatacggttcatcatccgttcatggatcaagctgaaattctccatcacatattcatacattggattgtcaatcggcatacctccaaggatcctataatacgccggccgcaaatgggccagcaggccgtagaacagctgctgatccgacataaactcagcattcagttcttcttccatagccttgattaattttctgaccacgatctgaaggggcagccactggtccacgatctttccgaagttcttttcatcctgcaggctgctggcgataaagagcgaagcgagatacgctttttcattttcaggaaacaaaatcctaaaatccatttcaatctcgctgctcttatccgagacggcccgatactcatttgattcttctaggccaggatacagaaatgtcatttctatttcatttccatttctgatcctgtaaatagaaaatccgagacacaggacaatgcggctgtaggcttcatctgaaagccttatatgaagttcttcctccagatcagatacggtccggatgatctttacggattcatctatctcctcactcccccttaatacctttagctcatctgccgggttcttaactcccttttcttctgtaagacacgctgtccatgcggccctgactgaacgctccctgccctcaatacagattcccttatacggataagtcattaatttcaagtcatgtacatccatccagctctttacttttctcagatcattgacaatcgtatttctggaatatttaaaatggttcgatatttcgtcaattgtaacatagccagtacactccaaaaggtatcggataatatgaaaactccgttccctaggagaaaaattactgtcctgtccgctccatatgatcttctgaagtttccttttcgcatggctgtccatccggagcataacccctctattcttttctctggccagagacataaaaccgtttttacaaagataatcgtcgatttggttcaaatcattgtaagcggtcctcatactgatagaaaacctttgcgaaatctcttttactgtcacatattgatcatcattttgaattaagaataagaaaatagcttttaatcgattattcactgtttctccctccttaaaaccattatatgattgtacgcatatccgtgcaaaaccaaatattttcaagatgtcctgcaatactctgaacgccaaaaaactgcacaagtccgtgcagttttttaatgatatctatgaaattttcatctactcccagacaataggaaatcttccagagccaacgaaagacaatgtagaaaaactcacacaatacagcccaatacatacaatactacaatccctggcagtcccaaaagtgccccagttccgatggatgctatatttaagtccacaggcgcgtggattccgtttttctgacaatagacatggatgacaaatacgagagccgcgcagaaccctcctcttgccagcaagaccaggaggtaggacggcctctttaatatcccgtaaagcacacagaggccgcagcctcccaccattatgtacaaaagcatctgattctgatccataaaaaatccctccttatgtctaatgtatgtagacataaagagggttaatccaacttttttaaattagctgaaaattcctttaatggtatccacaactcctgagaaccagtttttcaccttctcaaaaaagccgctgtcgttcagtttattgtagatgtcctttgcctgttcctttaactgatccacatttaagttcaggtcggagatcttatccatcagttcctggatcttctggcggtcagcgtcagacagattgatctctaaatcctttgctgactcatcgatcgccttaccgatttcctgaggtgtctttagattgtcttctgctaccttctgcttcacatcggcgatgagcttttccgcatcatcttttcctatgctctcggccacttcacctgtagtgatcaactcatccgtggccgcatccttgctcttttcaggaattttctttcctgtcatagcctcataggacttcatgactcccacaagcgcggcagtcccggagatcttaaaaggaccggcaaccttcacatccgcatccttgatccctgcagtcacaagagcgttcttgtacattccctcagtacagtatgtaatgttctctgtctgcacattgaccccgcttccgctgtcagtcttcttgacagtgacagatgataacgccctgctcccgataaccttgctggataaatagtctcccagatattcatgttcctctttatttgtaaccttgatcatcgtatagccgcccgtatcgcttactcccagcagctccagtactgtctgtttttcttttgaacttaaatcagcgcccaatgccaagtactgttcgccgtccacactgtctgccttgacgaactttgacggcacaaatgaaaatgccatgactgccgccatgactgcggctgccgctctgaataaactttttctttttctcatctcattttcctccgtaaattattcttacccgtttagtttaacacaacatttctgcacaaatagcaagaaaaaacttatttttttcttacacttctgtctcagatgttaaagcaggcattgaaaaacagacagggaagccgataaaaaatatcattctgttcacagtttgttcatattcttgtcaaattcccctcacattttccgcttatactaaaaccatagtaaccaaacttatttgattgctaggcttttaaaattttttcataaccagccgggagcttaactgttcccggcttcctctccgtttagacggatttttttcgtttcctcaggcagatagatgcaaatatcaaccatcccaaagccgtcagaatgataccttccttaaaaccttccggacagtattccagtttgatctcatgcttcccttcagatacatccacacagagaaatgcttttccaagagagtttacctctgtctccttaccgtccacgaggaccttccagcccttatcataaggaattgagaaaaacaccaatccatcttcattcatactcacagtgcccttcagtgtgctgctgtcagcctcctccaactggaacgcctgctcctgcatttttccatacaaatctttcatggcatcctcatccagagacgcaagggttaccctgaccaccccggacataaggtcatcttgttttagtctcatactgaccgtgatatgatctccctttttcagatcccccagatagatacactgtgcattcagacgtccgctcacatatacctcgttattccggtaaattaccgtatcctccacctggcttccgtcaaaatgaaaatacagcttgccgtcctccgtcaccggaatctcaaatgtcatgttatcggcaagactggccgtgttttcaaaaacatattccccatcattgctctgggtgatcttgcaggcgtttgtcttcggcttttctgtcttgatcatgtgaaagatatcatttcctccaaacgcatcgccggacagtctgttctgtaccaaaaatggatttacatcatcatacttccatttgtaggcggactttttcattccatatcccacagctgtattgtaaggatttccatacacattgatgtctccgatcctatccagatattgataatctgtggtgtttgtatcggaggttctcagaaggttataccgtacccccagcaggttattagtaaacggagttgccccttcatacagatactcattgacaccggtgtaaaatcccagatcatccatcatgtccaccacatccccaagggctgtggaaccgaacatcgtcactccgtccagggtatgccagatgctctcatccagcatccttcccttgatcagttccattctctgatccggtcctgtcttatatttattcttcaccttctgaatattctttgtatcgccgaagtattcacttacccgtacctggccgttttctgaaaaaccatacactgccattcctgccgcttctatcacaagcagtaaagaacatatcagcaccataccccgtctggacagcgttttcctgtcatacagcgcaaacacaacaagataaagaaagatcgctgctgtcgtgaatgccagcaccttacggtcaaatgcctttgtgttaagcaggctggcaatgcccaccgacatacaaaggataccgcaggaaatacacagtttccaggcctgctgccgtccttctctctttatgaccagcagcccgtcgtaagccatgatcagcagtaaaaaaatgtacagatatgcaaaccggttagggattccgtattgattgtggaatccatgccagatataaccgagcaacggcatattaaaactgaaaaacagaaacagcatcaacagcgcccgcttgatctttgtcttccatgagatcctggaagccataaagtaaaacaaaacaaaaacaagggtcaaaatcccacagtaaaggttgatctccccgtcattcacagagttagtgatgggagcggtccctaaaaagtgtctgcagtaaagatctgcaaagtttccgtaccacagatccttcgggaaatcccacttggcagaggaggtcttcatgatccccagataagccgggagcaggaccgcgcccgccatcatagccgacaaaagagaatatccggcaaatttcaacccgttgacaaagaacgccttcaccttcttatggtcatacagcagataccataatacaagaaacaagcaggtcataaatgacatgtaaaaattacagagcagcgaaaaaaacagcgccccgcagtagagtctgccgtccctcttttttatgagccggtccatccctgcaaggatcagcgggagcatcatcatgacttccagccacatgatattccagctgtaccccacaatatagctgctcagtgcgtagcaaagcccgaatgccacaatgctgatatcctgtctttttttatccctggatctgaaataataggccgcagtcagcccacaaagggcaatcttaataatgtagagatgactgaggaccatgttcagcatctctttcggaaacagtacgatcacaagattcaagggactggacagatagtatgcccacagccctaaaaagttgtagcccaggcctccgtggaaggaataaaaaaggttgtccagtgacttaagcttgtcatgataatctgcaaaaaacggaaggtactgatgcagggcatccacgatcagaaaggagttgtctccaaacggctgtactcccatcacaactgcaatgccttctaatataaagaatggggcaaggaatgcccaaattaaatatttgttctgctggtaaaaattatttctttttggcatcttctctcttccacctcctaatgcgccgattgacttccataatcatatcatatcgctttttcatcatggatatgacactgccgtgggtgagttccgttacatttccaccatgtctgcggtatagcagaagaatatcatctataaatacagatctgcccagctgttccgacagcaggccgatccactgatcatggatccagatagagtccggcaccggaagcagacggctcagcagatctcttcggaaagccatacagcatccaatatacgaattcttttttatgttcttccaaaatccaggttcgctgtctctccactgaaaggttgtctcatttaaacttttcagttcttcatcggaaatcaaagcattgtgcaccaccacagtaactgacgggtcctcaaaacaagctgtgactttccggactttctcgggaagccacacatcatcctggtcagccaaaaagaccacatctcctgtacagtgaatcaatccgttctgaaaattctttacaacgccctggcccggccctttgatgacctggactcttttatcattttcggcaagatccctcaacagcttttctgaaccatcctggtcagaatccacagagatgatcacctcatcttcggctccgagctgctccagaatagaatccgcctgttcctttatatactcttttccattatagtaagcaatgacaactgaattcttcatagttctttcctttctatatattttgttattatatcatacccttaataaaacatgaaatatttccctgtccctttcatcgtattcactttagcacattaaagcagtaatttactattgttttctgaaaatatttcttgtataatgttatcgacaaaagtccaagcatagcaaaatactaatgtattgtttaaggaggatacacaatgtcatatgttgatgaagtaattgagaaagtggttgcccagaatcctgcagaaccagagttccatcaggcagtcaaagaagtactggaatctcttcgcacagtcgtagaagccaatgaagaaaagtttaaaaaagaagccttattagagcgtctggtaaatccggaacgccaatttaaattccgtgtaccttgggtagatgacaaagggcaggttcaggtgaacacaggttaccgtgttcagttcaacagtgccatcgggccttacaaaggcggattaagactccatccgtctgtaaaccttggtatcatcaagtttttaggatttgaacagatctttaagaattcccttacaggtctgccgatcggaggaggaaaaggcggatctgactttgatccaaaaggaaaatctgacagagaagtcatggcattctgccagagcttcatgacagagctttgtaaatacatcggagcagacacagacgtacctgcaggagatatcggtacaggggccagagagatcggttatatgtttggacaatacaagagaatccgcggcgtatacgaaggtgtgctcacaggaaaaggattatcttacggagggtccctggcccggacagaagctaccggatacggtctcctctaccttacagacgaaatgctaaagtgcaacggtaaatctctgaaagatgccactgtttgtatttccggttccggaaatgtagcaatctacgctacccagaaagcacagcagttaggtgccaaagtggtaactgtctctgactccacaggatggatttatgacaaagacggtatcgatgtagctttattaaaggacgtaaaagaagtaaaacgcgcacgcctcacagaatatgccaaggcacgccctagcgctgagtatcatgaaggaaaaggcgtatggactgtcccttgtgatgttgctctcccatgcgctacccagaacgaattagatattgaagatgccaagacattagttgcaaacggatgctatgctgtagcggaaggtgccaacatgcctactacattggaggcaacagaataccttcaggctaacaacatcttatttgctcctggtaaagcggccaacgccggcggtgttgccacatctgcactggaaatgtcccagaacagcgagcgtttaagctggtccttcgaggaagtagacggaaaattacagaacatcatggtcaatatcttccacaacttagatgacgctgcaaaacgctacggtctggaaggtaactatgtggctggcgcaaacattgcaggatttgaaaaagttgttgacgctatgacagctcaggggattgtatgacattttccacatgatttccgttcagctcttagaatgcttcactccaatcatgtagaaaatggacgtaatgtctgctggggatggctgttgcaagacaaaaggcgccacctacgatagttttttcttcattgtcggaaggaggcctttccagagccgactggagacaatggagaaaaactattttaattaacagaagtgctgggaaaacttactcccggcacttttcttgttccataggaaagctctgcgaacctccctatggaataaaaaagccctatgggcagtatgcacacaaattatttctctcagcttatccgtatcgccattctctatttcttttttacttctggctattgcctgaatttcgtgaggaaggggttgatcctccggtataaatttaatgagatcctttaatacttctttactcatatataacattcctcctatatttaaattccttatatttactgtttgcgaaagtacacagccatccaccacaaattcgttgtaaaacaaaaaaacatgctgtgaaatcacagcatgttttttgttttacattctatatgagataacagaattaaagaactttgctcaaaaattcttttgtcctgtcttctcttggatgatcaaagatctgttccggagttccttcttccagaatgacccctccgtccataaacagaaccctgtcagccacttcccttgcaaagcccatctcatgggtgacaacggccatggtcataccttcctttgcaagctgtttcataacctcaagaacttctccgaccatttccgggtctaaagctgaggtaggttcatcgaacaacatgacatccggtgacagagcaagagatcttgcaatggccacacgctgtttctgccccccggacagctgcaccggataacttcctgccttatcccctacaccaacacggttcaaaagctccatcgctttcttcttggcctcatccggtgtcatcatcttatgcctgatgggcgctaacgtcacattgtccaggatagacagatgaggaaacaggttgaaatgctggaataccatccccacttttctgcggagctcgtccacgtcacaacctttttccattatgttgatcccgtcaatattaatgtccccttttgtcggtgtctccagaagatttagacagcgtaaaaatgtactcttccctgatcctgatgcgccgatgatacagacacattcacccttttcgatatgacagttaatgccttttaagacttccagggagccgaaatatttgtgaagttctttaacgtttatcactctgtctcagcctcctctctacagcattgagaactaaggtcagtaccttaacgatcaagtaataaatgaccgccgtccctatcaacggagtcagcgcttcatatgttctggagataacaaagtctgctgccttgctcaaatcaacgatagatacatatcccagaatcgctgtctctttgatcaatacgataaattcatttcccaatgcgggaagaatatttttgattgcctgcggtaagataatgtctttcatggtttgtccatatgacaatccgagagaacgtccgccctccatctggccctgatccactgccaggattccggcgcgaataatctctgagacataggcggcactgtttaaaccaaaagtcacagttcccacgatcagtccatccacaccttttaagattacaaagaacatgatcatcagctgagtgacagtcggtgttccccttatgatgtcaatgtacacgtatgcaattttagataaaaccgtactttttccttttttctccgcagtcagccgcatcaaagccaataccgttcccagggcaacaccaaggaggatggcaagtacagagacaagaatcgtcatctttaaaccatcaaggtacatcaggtaacgtttcccggagataaatgccttataaaatgaatccaaactcataatttatcttacctttccatcctgttacttatcgatatatttcgccttcagtttgtctaatgtaccgtcttctttcatggcttttaattgtttattgatctcttttaccaatttctcgtttccttttggaagagcaatgcagtagtattcttctgctgctttatctctgacaatctttaagcccttgttgttctttacaaactccatggcaggtttttcatcgatgacaactgcgtcaactccgccgttttttagatccataacagcattcacaccctttggaaaacgcctcacgtctacgcctttgacaaccggtttctgtttctccccaaagttttctcccgttgcaagcttatctcctgttgttccttcctgaacaccgactttctttcctttaagatctgtcatctttttaagcttactgtctttttttacaatcataacctggctgcttgtataatagctgtcagagaagtcgactgcttccgtacgctccggatcttttgtcattccggctgcaaccgcattaattgtcttagattccagagagccaatcagagatttgaattccatattcttgatctctatcttgacatccatgcgttttgcaatttctttcatcatcgcaatatcaaaaccatcaatctttttgttatcatcaacatactcaaacggagggaattccgcattggttcccacaatgattttttcaggtatcgttgcttcttctttcttgctgcatcctgcaaacaacatggttgctgctaacacaccggctaatgctacggttataaattttttcatgttcttctccttcttctttttatttcatgattatgggtttagaataacggtacaaccgctcctttgtattccttctccatatacttcttcacggcatcgctctttaatgctttgatcagcgccttaatagagtccttgtcctcgttgcctttctttactgcaaccacattgccataggtctttgctccgcctacagacttttcgtcttccacagccagagcatctttattgaccgtcatgccggcctgcagagcatagtttccgttgatgacagcgtaatccacatccttcagagaacgcggcagctgtgctgcttccagttctttgatctcaatgttcttcggattcttcacaatgtccttctttgttgctgtcagggtagccccgtctttcagcttgatcaagccctgggcttccaaaagcagaagtgctctcgcttcatttgtggtgtcgttgggaactgcgactacagcgcctttttttacatccttcagtgattttgcttttccagggaagataccaaatggctcatagtggatcattccagctgaagtcaggtccagcttgtgttcctttgcaaaattcttcaggtacgtgatgtgctggaaataattcgcgtcaagatcccctgaacccaatgcgttattcggctgtacatagtctgaatattctttgatctccagagtatagccgtctttctccagttcctttgccgcaacctttaagatgtctgcgtgtggtgatgggcttgcaccgactacgattgtcttgtcctcttttttagagctgccgcatcctgcaagcactccaaaacagacaacagcagacagtgccactgctattaactttttcatcgctactctccttaccttttcataatatatagcttctgtaattgtaccctttaataggcagattgtaaagactcacggaacatttcaaaggccgatggaatggcgtattcctcttctaattctttcttttctacccacataaggccgtctgaggccacaggctcatccagagataccaaaacccctgtcatctgccattcaatatggctaaaaatatgtttcccctcgtgggtgaattcataggcacagtccttcataccccagctgtccagctgttcttccaccagctcctggctgcactttccaagtacatttggaaattcccaaagtcctgctaaaagtccattttcatctcttttatggagcgccaccataccgtctgattcaataacaaaaacagttcttttctcaatttttcgtttcttttttggtttcttcactggcagctgcccgattaagtcctttttataggcagtacatactgtgtcccacggacagtcacagcattttggctccccgttgggcacacatacgatagcccccagttcgatcagggcctggttaaagtcacctgccctttcatccggcatcatctccatgaccctggctgccatgtccttttttgtcttttcttttaatatatcagaatcatcaccgagaagtctcgccatcacacggagcacattcccgtccactgcagggacggggatatcgtacgcaatggaagcgattgcgcctgctgtgtatatgccgatgccttttaactcaagcagctgttcatagtcggctggtagttccccgttatatttctccatgatcgtctgggccgcagctttcaggtttctggcccggttataatatccaagcccctcccaaagtttcataagcttctgttcttccacctgggccaaatctttgatctttggaagttcctccatgaaacggtcaaaataaggcttcaccgcttctaccctggtctgctggagcatgatctcagaaacccatatgcggtagggattcttatcagctctccatggcaggatccttgcattatggtcataccagaaaagcaaggctttcccgatctcctttgtcaattccattttcagtatcccttctataataagatgttaagatcatatatctccgacggtttattatatcagggaaaccgacatttttctactgtgagattcttgaaaataaaatccttttatactccatgtcctatagctacacaaaatacgtaaactgtctcggcccccttctccatcattactttggtacaacattctgccgtggcaccggtagtatagatgtcatcaaccaatagaattcttttccctcttacctcctcggaagcccaaaagctgtgctccatagctgcttgacgttctttcggtgtcagggcctttaaaggttttgtatactttatacgtgtcaatacatgctcactgacaggaatgtttaagatgtctccaatcccctccgcaaacagcgttgcctgattaaaccctctctgtcttctttttctcttatgcacgggaacggggacgatcagatctatgttcagttctcgcagaagattggctttttgtcttctgatctcttccacataaaactgtgtgaactccctctgattctcatattttactgcagccagagaatcccttacttcattgttatagagacacagagccattcccctgtaaaaagtctttggatgttttctgcagtcactgcaaaactccgtttcctccctctccagaggtttcccacaggaaaaacaggaaggctcccggacaaattccacttttttataacaatccgggcatataagggtttggggattttttaagatatggcggcagatcggacagcgccttggaaatagataggataaaaataaagaaaacattgtgatcctttccgaaagcaaaggattccttatttttacattatactattaggacacttttcaatcaatgtatcgcagcacagaaaatcagccggagaaggtatcaatttctccggcttttgaggatttatacatgatagtgtatcttagttcatttcttttttggctttcacaagcgcttctaacatttcttcaatcttgcctttgcggctaggagcatttaagattccgctggtgccgccgcttccgtgagctccacccacaacaactctgtaaacgtcatctccggtgctgactccggcagcctggatgatcttaatatcaggattcacagacttcacagcttcatttgtagcttcaatgtaagcatcatcgcttgtgcttcctgtaccgatcaggctggtcggctcacagatcataacatcaggtccaagctctgcaatcgctcttgtctgctccacagagtcagagcatacaatcgtgagcatatccagttcatttgcccgtttcattgtcttatccaaatcactgatcggaagcggatgctctgcatgatttaagatcaccgcatctactccggcagccttcaaagcgtctggaaggatgaatcccattcctcttccaggaacaagtccgtccatgtgctgtgtggtaacaatcaggtttttggtctcctgtgcgatctgttttaaatccacatgctggccggtgaaaataatatcaatatcatattcctctgccagctggtcacagacctttgcaagctctaaggattcctctccaaaaatatatgcttttggattgacgattaaaaatggtactctaagttctctcttcatgttaaaacatcccttcctattcgcccattacaatgatcttgcattttcttgtgcgggcacgtgtgcggtcaaagtctacaaagtaaacatatcctgtggatcctacgcctaattttccgtcttctacgtcaaatacctggctggagccgagcatagtagccttcaggtgggcatcacagttccagagggcttttctgtccccgtccggcagatattctgccgcgttcggccatgcctctactgcctcgtagtgtttttcccctggataaatatagagatccttagaatcctgatttgggatgatcttttccagcacattgtttaaatcttcctgaaggaattcatctcctgcttcgttgtagtcatggacgaattcttcaaagaaaactgaacaagttgtatgcggtgaaataacagtacatgttccgcttttgattccactgtttttaatcgcctcttttacctgaggggtaatatcaaggtatgtaggcgtcttaccatgagattccaggctgatttgttctttatatacagtcatgattgattgctcctcctttaattgtttggaaattaagcttcttttgtttcaaatacggaatagtagtgttccaggcatttctgcattccctgttttgacaatgcttttacatccagataagtttccggtttattattgtcaatctcctcttttgccgcaaccagaaggtcggagaagatattaattttcgtgattccatttattgcgcagcggtttaagttttcatctcctgaagaggatcctccatgaagtacaagcggagtatcgacagccgcagcgatttcttttaatctttcaaaattgatttcaggtattcccttatacattccatgagctgtaccgatagaaattgcaagagagtctactcctgtctcttccgcaaatttcttagcttcttctactgttgtatactgagagtcagatgtttcatgattctcataattttccccggctcctacatggccgatttctgcttcgactaccactccttttggatgtgcataatcaatgatttcttttgtctttcttacgttttcttcaaaagtatcctgagaagcgtcaatcataacggaagaaaatccaagatcaattgcttttttaataacttccggtgttgtcccatgatctaaatgaagaacaaccggtacttttgcttcctcagcatatttctttcctactaaagccgcatcttccaatgtgatgttttctccgatatgagcctctgccaatgcaaggattaatgggagattatgtctttctgctgtttcaacatgccagcggagagactccaggtctatgaagtttggtgcagggatcgcaaattttccttcctgcgcttttttaaacagttcttttgaagttaccagcatcttctctttcctccttaaattaagtgtgcaggcaagccggcaccgttttaccggcctgccttacacatctacagtctgttctgcctttggctttgactataaaacgtttcttccgtacatagcgtcctgttcttttcttaactgatagatcagggtagacttatctaattcaacatcatcgtatgtaagcagttcgcccttcttcacgtctctcttcatcactgccttgtttgtcacaagtccgaatggtacatatcctttttcgttagactctttcgcttccgcgatggatccatgtgttgtgaatcctccgattccatcgatagtctggcctgctttcaggtcgatcttcgctcttgtgatacattctgatactaatccgtcgatcggcacgcaggtaacttctccgtcaatgactgcttttgctacagtaagcggtgtctctaagttacataagtggtatggacggtataaggtccagagcggtccaggtcccatgctgtggtatgccatctggtatgcgatctcttcgttcggtgtagaaactgtcacgaagactccaggagctactccgtttacatactcaacaactccatgtttgttcaggattccgccgtctttcttcagctttaagatatcatttaattctttgattccttctgttccaggggcagtctgtggtccgtgtcctccgatcacatccggcactaatcctgtgtagttggacattgcggtcatctctaccatagtctttgttccgtctttgaatgcacacagcatcttcgggctcatgactcttctggttgcttcttctaatacagtgtccgggttgcagtcgtagtcaagcttgttgttctttcctttacccatgacttctacgttcattcccattgcctttgcgaagctgtaaagttccatgacagctcccggctcatctcctgcggaccctgtatagatgaccccttctttttctgccatcttctttaagtaaggcccgatgactacgtcagtctcaacgttcagcataaccacatgctttttgttcttcatcgcgtcagttgctacttttgcgcctacatccggcacaccagttgcgtcgatggcacactctactaagttcgcctgggatacgaagtttgcgtcttcacaagctacatatttccctgcttccatagctgcgtttgcatcagcaagagttttcgccactgcgatatcatcatcttttacacctgcatatttgaatgcgttgactgcgttttctactttaatgtcggaaacgatggccggcatcataccgttcattaagaccatctgggttaccattcctcgtcccatctggccggcacctacgataccagtcttgatgatctttccttcttcctgtctcttgattagttttttgtccatgtttaacataacatcaatctccttaaattctatgtatgattgttagattgttacctgatttcaatagtgccgccggctttcaagtcctccggcagcaatgcattgccttctagcatgatgcatccggggcgctctgcctcagttcctcccttaaaactcaacgtacagtggccaagttcctttaatgtatgaggtgcctcgcttcccacggcgctgatcttaaactctttgccgcagatgaccatggtgtctcctggggctggttcttctgtcagttctgctttcgtatgtaagactgacagttccgcaagctcgggcggtgcatcctcattaaagataatgataaagttcatatcggcatctgagagaaacgccagggcgtctggtcccagacccgtaatggttgactgatatttcatatgttcgccttatccctccgttttggtatgtttgtttttagtacattccgatactgaatgcgaatgcgatcagtactgccaaaggtccggttatgatccttgagaacagcacagctggaacacccatttcaatggtctccggctctgattctccaagactcagtccaaccggcacgaagtcagctcctacctgcgcatcgatggcaaacagggccggcagcgcatactgggccgggatgtttccaagcgcgaactgggctcccaaaagggttcctactacctgcgcgataacagctccaggtcccaggatcggtgacaggaacggcagcgcacatacaaaggagattcccagcattcccggtaaggtactgcacagtggggagatcgtctttgcgatgatgtttcctaatccgctggcgctgatgattcccaaaagtgtacttgtgaaggccatgaacggcagcacgttcttgatgatcatctcgatggtctcacgtccagcctggaagaacttgctgactacgttacctacgcctttaccgatcttgacgatcagtccctgtttctttccgtcattggcctgggcgatctcttcttttgcctggtccttggacttcggtccgtcctctgcggcagcggctggtttggatgtctctgttccgcctttataatcggattccacgatgcacttttctgtgactgcggatacatagatctccggtgtgatgtactgcgcaagcggtcccgcctgccctaccggcatcaggttaacggtaaagataccctttttcggatatactccgcatcttgcagttcctccgcagtctaccactgccaccagcacttcctcatccggtgctgtagtcttaaatccgtccagcgcttctccgccggtcatgtctgcgatcttctgtgctaccgggtggattcctcctccggtcacgctcaggatcttatggcatttttcagttgctgtgatggtcaggggtcctccccagccgccgtctccggccttaatcgttattgttttatacataccttttcctcctcgcactgactatttgttagcttttccagtcattctgaagtagatctgttccgttaagattccgcggatcagaatgacgatcacaccgacgataaagtatcttacggcaagtcctccgacagacaggccgagctttgtgattccggctgagataccggtgtatacgaacagttcgccagggttcgcatgtgggaaaagtcccgtaacaggatgtacaaaacttacacaggagtcataataagcaggtttatatttctcgtctacgaaacgtccgaaggtgtagcacatcgggtttcctaagaacagcaccgcgatgatcggaagcagtgtgtaacgaagcactgcaaatctggtcagcttctgtgcgaagcgttctaccctctcttctccgatcagcttgatcactgagtttacagctgtcatcaggcagacaaccaacgggatgattccggtcacccatcccataaatgtggtaccgccttcttggaataacttgataaatccattggcagcgttagatatgatttccatattttctcctccttcttaattgaaatatatcaatttctcctatatatataaaatattgtcagacaaaattcccaaaaaagaaaaaccaagctaaaacatgcttttgggccctcaaaacaagttcagtcagtcttctttctgtaatcctgccagtctatatatatattccaaagcactgctacagggttgttccctgaagcctcatatccagtgcttccaaagcacggatgtatcctttgtaatattttctctttttcttatccatcacccgaaatttgtccaggtgttcatagatgctggttcccaccatctcctgatccagaatcttggtgatcggtttaaacttagtaaggaaactcagcccttccatgatctctccaccagtgataattccgtctgcatcgcatgcgatcatgacaatattcccggaaagaaatcttcccttcttctgtccgatgcctacatttccaagctggtgtaccctcttaacggctcttctgtaatctttcacctgaaaataaccgcccacggcctgcacaacaaacaatacaaagataactaacaaaaatactgaaattccctgcatctttctatgtacctccttctcaaagcagcttctcagcgcattcattatttgtgatcagcatattgacatatcccccgcgtatcgctccttttacagcttcggcacggttggcgcctccggctatggcaatgcggttcctgatctttttaatcatcggaaatgtcatccctgctactctctcattaaactgctgaaacggttcagcattcccctctttgtcaaaaaactgaagagcaatgtctcccgcgactccctgctttacatactgatccatctcctctttgctgaggtaacctgcctgtatcaaagtagatccgccgctttccgggatacccactcccataataatcgtatccagtttcttgaaatcttcaaaaatataattaacagatttttcgttcaaaaaatattccatgatctttcgttcggaaaaaaccgccggcgacagaaactgcgtataggttccgccgaactttttggcaaattccttggcgatctgattggcctggacatctacttttgaaactgtgccctgactgacgcctcccaagatcggaacaaacaggtaatgattctctttcgagaatacccggttcgtccgggctacattatggagcgtaaaccccatggatacacctatataatccccgtccttaaagtactgtgagaggaacagggctgctttctcatacagcctggagatggaatctgtctttgtgtccagcggactgctctccaccacgacaacttcctttaagccatatttacgctccagtgccttctccagcttcccatatgaaaattgtactggattaatgacttcaacttttacgattccgctttccttgcctttttgaagcattcttgaaacggttgctctggatatcccgaggtaatcactgatgtcctgctgcttcatatcatcctcataatacaaactgcagcatttgtagatcaatctccaatcatccactatttttttcatatgttctctcccgtgtatattaatgtcattccctgatgttttagattgtattaattatcatgcaattactctaccaaaatcttaaatctttatcaatgcaatttcgttgaacaaatgtcgaagtagactttttctgaacgtatacttttacatttgttctaaaaattcgttaaaaaaatgacagatatttttgtacagattagttcacaagtcaatcgccccataacccgatttcatttgtaaatatgttaaacttttaacccattctcaatcgtttctttgttcaatacgccttaattttcgcttatttttgtaaatttttctggtatcagaagaagataataccatccgcaaaaacgaaaaaaaaccggaaagatcttcccggttttttgcgatagtacaatatgttcaataaaatatctgaaatttatttttataacaaaatttgaggatatttctttataatcatctttaaagtctcatctgcgttgtcaaaggtatactgcagatcctggtctgtcatcgccgtattcgtaaacatgttgtggaaatgggaaatataaactccccttctcaccatctcaccgatccactcctgatggggtatcatagattcatctggatctttcaaaatgattttaaacagagacggaagtccggtagtgcttaaatttaccttgttggcatcagctacctgtttcaggccggatataagtttttcccccgtttttctcatgatacctgtggcatcgatctctttcatctttgtgagagtggccacagatgctgccaaaggaaccgcggacagccaatagcttcccgtataattcatatcctccactgcatctctcatctcttttcgcccaaccagagctgccatattccagccgttggctatggccttaccaagcgtcagaagatcggccttgattccaaaataatggtcagatcctgcaagatccatacgaaagcctgcccgcacatcatcaatgatcagcacgatgccatgatcatcacagagttttctgactttcggccaataatcctccttcggcagcacattatcatagtgagaaatgtggtcatacggcatggacaggatccctgcgatttctcctggatgatcctttaccatcttttcaatggcatcaaagtcattaaacggtacataaagattattacaaatttcctcatccagaactcccggagtacccggtttctggcaccattgatagactccgtgatatccgtgctccatcatgatgatcttcttcctgcctgtggcatgacgggccgtcatcaccgccagagtggtcacatctccgccgttcttggcaaaaaacgcccagtccgcgcagtttaaggtctccaccagcttctccgcacattcgatcatcaccggagaaaccacggtggtacagttccctttttccctctgtctcagcgcggcggcatccacatccggatcttggtaccccagcgcatttggtccatatgcacaagcataatctataaaacggttcccatccacatcccagatataggttccctcagcgtggtcggagaacagcgggtaacagcccataggattcagcctggcacgccccacccccaggtgtccgtacaagccgcatggaactacttcatttgctctgtcatatagctcaaagcttttatcatatctatatgcttccatattcactgcccccttctatctcaatccatttgcatgttcatatgccagattcagaattttatcaaatgcatcgtttaatgttgacagtcccatgagcttcagctgcttatgaaccgtggccgcatacgtactgagcttcttgtccagaagctttaacgctgaatcaacatccccgtattcgtaaattgctctcggatgttctgaggattctacaaatgtaagctgatgatctttaatcaaaatattcagagcgatcccgtccgtgatcttcaccacgatctttccgtccagcagacggtcagccagtttcctgccttcttcgtcttcattggccagttgcacggccagccggattctatctataaatttttgttctttttctgtcataactattcattcctttctggacacatcacaattattaacagtttcattcagttttttggctgatattgccatttcttatgccgcatgctatactggatttaattacttttcgcgaacaaggaggtatctcatgtcgaaagaacggaataagaaaatagagtcaagcattctagaatacctgggctctcacgaaaaattgcttacgcgtgatgccattcaattgtttgacctctcagagtctaccatccgccgtatcttcggccggctggaggaaaagaaaaaggtagtccgcacctatgggggcattattcttgccaagcctgacaattactatcactacgatatcatcaagcagaaaatgaaacgagaaaaggagctgatcggcaaatatgcagctgaaatgattctagattccgattttatctacatggactgcggaacaaccactgcatatatggcccaatcccttgtgtctaggtttcagaacagcaccctttcaagcagtttaaacatagtgaccaattctctgatcaatcttgagatcctgaattcctactgcaatgtgatcctggtgggcggtacgctgtttgacgaacgcaagagtatggccggtacattaggtgtcaatttcctgtcccagtttcatttttccaaatcttttctgggagcggacggcatgacatttgagcacggattttccagcgataacatcaatacatccagactgtccggcactgcattgactctctcaaaagaatcttatgtgctcctggattcctccaaaatcgggcatccgtcctatgtaaactatgctgaactggatgatgccaccgctgtcatcactgacaacggcattcaagaagatgacatcaaacagttttctgaacacaagatcagcctttatattgcagagtaatgtatgacattttcaccagttctccggcttgctgtctcagggacgtaagattttctaactttcagcaaagcctctccggcggcccgttcggaactcgctgacgctcagacagcctcactgcgcaatgcgcaccgcctacgagtctttacttcaagaagaaaaactaacgtcccttcgaatgcaaggcctccgaactggtgaaaatggacgtaatgtctgctggagatggctgttgcaagacaaaaggcgccacatacgatagttatttaccactattggaggagcgcatttcaaaagcgcgacggaaatagtggtaaataacttatagaatcgatcaaagcttttttcttgcatcactccattttgttgatttactctggactgtctgctggagatagatctccacaccgctgtcctgaagttcattgagcatactgcattcctgctccgtcaccgtgatcggtccctccaggaccttggcaccctcccggaccccggtcccgccgatctgaagtgacggataagaaatgccctccctgcagcactcatatgcagtcttgatatccttaaagatcagcattatgctatcatttccgaactggtctgctttgtactgcagaaccccgtcctcttttgtataaaccgagaattcaatccccggaggaaccgcaagggaaagaatatctctcatcatttcattttctgccgtagccgtatcgatgaccacaatcttaccggcactgcactttccgatccaaccactggctacctgcccatggatcatacggttgtcaatccgggtcaatactagtgttcccatataaaaaccacctttcttttgtctcgttccgctagctcatggcaatgccatctaccacatgattggtgtgaagcattctaagagtcaaacggaaattatgtggaatatgttacgctataatacccaatgctccaagtataattcctacaatcatagttccaaagattactttgataacactcatatttttgcgtttgatcgtaaagaagatggccattgtggcaatgaatgtcagcagattcggcatcaacacatcaaacaattctttttgcagtgcaaatgaaaatttacccgttgcaatcgtaagcgggcaggatacgctgaccagggagctgatcattcctccgataacgaacatacccatgacggtgaagaaggacatgaccttgttgatcagaccgctctgcactaaatctttgattgctttattacccagattataccccagatgcattaggatgaatgcctgtgagttacagagcactgctccgatcaggactacgaccaatgccggccaccacgctccagtcaaagcatacggacacatcaaggccaatgaagtaggtatgatcgtggcccagtttaaggtatcgcccacggccgccataggcgggaacagagctgcttttgtatccgagatgatctcccctgggattggtgctccttttgctttctgctcctccatagaaagaaggattccaaccggaagcgcagatgtcatatcttccgcgttaaataattctgaagtcctcaccatagcttcctgaagtccatcatcattacctttatacaattttctcagacaaggcatcatggtcgccacaataccatttgcctgataccgctcgtagctgtttccgtttgagtagaaggaaagcatacggatggatgcccaattcagatcttttttggtcagcgccgcgtcctcaactgatgtgctccttaagttcagtgacagatgttcccctttgttctgacaccggaagtcaaaccatgccagaatgacagaaacaatagcgataccaatgccgctgactcccgaatatgccgcaaataaaaatcctgcgataaaaaacggcatgtatcctttctttccaatagaagatgcaactatgcagagtcctacgatcggcatcagggaagccaaagcatttaatccattctgaagccagcccgggagtccattgacaaagaagccgatgttgcttgccccaaagaataataccagtgtcattgggatccaatataaaatgactttaaataaggatgggtaaatgacggttgacagccacagcttgtcatactgcctgctgctgataaacttgtccgtcagggcgttccaaaaggatcccacggtcatacggatgttggtcagctggctcatgacgattccgactgcaacggccactgccatagcagatttaatgtccatgcccgaggcgataacaacagatgctgtgatgatccctgctgccgcgttgtcgttggtgatgacccagcctgcctgagtctgtcccaaaaacatgggctggatcgttgcgccgacgatcatagcggtcggcacatcccccatgaccaggcctactaaaagtgccgatgtaaggggttgataaaataacagattgagggagtggtcaaacactcctaaaaaactaaaccagtaaaatcctccgagtataattgcctgccataaatgcataacataacatctcctctcttactttttcatcttatccattacattgataactgcatcttttcctgtcctttctaaaatttccggcattctctcaagttctgctgattctctctgtccgacagcttcaagtaccattccaaggttcactcctgttactgcatatgcctgtccctcattttgtttcaatgcttcccctgctgtcttcatcagatattggttaaagggggtccctccgaacagatccagcagtactactgcccctttcggaaagctcccggccagacggcaaagctctgcgccccactcatcgatgtcatctgctggctccaatcccaggcatgcaatattctggcattctccgtagatcatctgtactgcttctatcatgctcttcccgatactcccatgactgcagatcaaaatgccggtcaagtcttcctcaattgtctcaggtgttatgcgtatcatctctctcctccttccttctgttaataaaattttagcacggtcttttctccccgtcaataatttttgattgattctttcattattctgaatatttcattcattcctatatagtttcaagacttgtaccgaattttcttcaaaccgtttctggcttgcctcatcaatgtttgaatcaatgaccactccgtcaatattctccaatctgcagctgataccaaaggattgcttccctatttttgtagaatccatcagcacataggttttctcagcctgcttagatgcctttttgctaagcagagatacattcacgctggtggaagtaaatccctctgtaaaagtaaatccgtctgtacccaaaaagcttttattaaaacggaattgggcaagaaatgtctcgctcagatggccagacacatcctttctgtcttttgaatactttccccctacaatgatcacatcgcagtgcggaaccaggatctctagattgaccactgaatttgtaataaccgtcaaatccctgacctctttttcttccaggcgtcttgccagcgcctttgacatttccaaggtggtggtaccgccgtctatgtaaataaattccctgtccctcaccagctttgacgcggctgctccaatctcttgtttctctgccacatttctcacagcgatttccttataccggtacctcccttcctctgaaactgctttgatcccgccgaagacccgctgtgccgctccctctttctgaagctcaataaatatccttcttatggtggattcagagacgccgagcaggttcatgccctcggccgtggtcatctcaccattctgtctcacataatcaatcacctttgcctcattacatgaacttcgttttcccatggttcctcccctctgatgccgggctacatgagcattcttggatctgtatattcgagcccgaagctgtctgccacgtttttgcatgtgatctgtccgtcataagtattaatagctgaataaatggacggatatttgacgcatgcagattcaactcccctatctgcaattttaagaccgtatcccagcgtggcattggccagtgcaatcgtagaagtcctgggcactgcacccggcatatttcccacgcagtagtgggccacttggtctaccatataaacagggtcatcgtgatatgtaacctttgtagtttcacagcatcccccctggtccactgccacgtccacgatcagggatcccggcttcatctgttttaaatattcccttttgataatcttcggtgcggccttgcccggaatcagcacagagccgatgaccaaatcagcttctgaaagcgcctcctttaccgctccgtcggtactcataaggggctgaatacggcttccaaagatatcatccagataattaagacgcataaggtcgatatccataatagtcacatcggctcccattcccacggcgatcttgcaggcattggagcctacggttcccgctcccagtatgagggcctttgctcttttagtccccggtacacctcccaataaaatcccttctccgccaaacggtttttccagatattttgccccctcctggacgctgagcctgcccgcaatctggctcataggtgtcagcagcggcaggctcctgtcttcttccatcaaggtctcataggcaacgccctttacctttgcatggaggagtgcatccattaagggcttgtcagctgcaatgtgcaaatatgtataaaggatcaatccctcgtgaaataatgggtattcctctttgagcggttctttcacttttatgatcatttccgaccaatcccatactgccgctgcgtcttccatgatcctggctccagcagctttatactcttcatccgtaaagccggatccggtacccgcccccgcctgtacagccacctcatgtccggcatggacgtagctttttgcattatccggagtcaggccaacacgatactctttcttcttgatctccgtcacacttccgatcctcatcctcatacctcctgtctttgttattttaattgttatctttatattatgaccgtttctttcatttgtcaatgcatttctgattgttttcttcttttaagcgactgttttattcccaggggactttaacagaggttctgtaggaattccccatgacataagaaagaatccctcttgcggcgggtcgctttggcgacatgattccttaccgccgcagtgcgatcctttcggagcgttatttatttcatagaacacactttcctataaaataaataacagcatcccattgaaggatgctgctggttaattcatatgtaaatgtgtgtattcagagatttccgccgctgtcgttataaatccattgccgtagttcgttccttgtctgtttattatatccgaccacataatggtcttttgactctgaagtatgcctaaaaataagtctgcacctcttgggtttctcttttatatatgtcttaatgtcgttctttctgctgaaactgaacctgattcggctgactgccctcagaagatattcaggattatccaaaatcttatgatccggactacagatcaaatctatcatatcatcaatccgttctggcagctccctctcagaaaaatccaggtttaactgggcaaagaagtcattgataataaaaccccggaaatcagagattattccagtttgacaactgtagcatacaacaagatcacaacccatgattcttcgcactgcccggtcataatttagataaacaagtttatggctgaaagtataaaacataataccccctgatgtaaccaatgctgctccgcctgtaagataatacaataaaaggtccccggcagctgatccatttgacagcatatacactgcatatacatctagaaccaacccgattaaccatgtactgaagttaaacgtcagacatttgtaccactttccaaactgaaacatcttattctcattgaccacatatggcaaagatactgatactagagataagactatacaggtaaccggagtcagttgttcacagatctggctgaccagatttttatccccttgaaactgatataacacaggcagatgcacaccaagatacagaactacaaacagcagaaatgtacttttggtcttcacctcctgtttggtccgctcccagtcaaacttcagaagacttgtaatatattcgttgactttatttttctccatggtgaacgtttcatcctgccagccgtacatcttttcctctatataggcaatctgtttccatatgtgctcatccttgaaaaaatcaagctgcttatcgtcaggatattgactcagagaagggaaaaaaccataaccatttaagttgacctttaactctgcaaacacttccccaacctgttccctgtctgcctgatacagtctgcaggctgtctgtttcatatcatttctccaatcacttctggcgctggtgacatattggagactgtttgatttattttttgaaacatattcaataagtgctacgatcacaacagatgacaataaaacctcgataattcccattcttccaccacctctcctatataacttaccttttcccttatatctcctttctattatacactaaattaaaacattaaaaaatcctgccatcagattcaatcaccattaggcaggatttctaatatcttatggaacaatgaggttcactcttctttcaagcttcttctacacagtagaaaaatgcttactgccgctgagattcctatcagtgcaagcgtttctggtatcccttctgctttatcactggtctttgctgttcgtacagattttcttattctctttttatattcccagtctggcaactttttctgtgttgttttcttctctacaaatgaagtttttgtattgtctttcttttccgtatcaggaatcctggtccattctgcttccaactctatgtcttcgtgtattggggtttcaaaatcccatttgctttcctttccgtcattatccgtgtagtaccaccctgcaaagttatgtccttttttcttgggttcctccggtaccacggccttctgcccgccttccacagtctgtgtttcaggagtataatctccgcctttagaatcaaatgtaacgttatgccatccggtcaaagttataaacacggaaacttccctcccatctctcattgaaaaggtcagtggaaatattccggtttttcccgcagtttttttactgttaatcaagtcgaactgttccctgtttaccttcagctccgcgttgtcaccttggctgtctttgctcttagctttgcataatccgattagttcatcggttgtaaaagccagtcccccggtgggatgtctggcatcattggccccgatgcttgatgtagggttttcagggctatatttggtcccatccgtaccttcttttctcaaaaatacttgaatcgtcacctgggttccatttggtgtctggaaagtcagaggataatctccaacatttccagctgtttttgcttgattgatcacctggatctgacctggatcagggaatacaagctgttcttttggtatctcattctcattttcatcagctgcctttactttcgataattcttttaattgctcttcgtcaaacccttcccctccggtcttgctgatgatatgttttcccttgataatctcacggctgtccgggtcttctgttatctcatcatactccccgaccagagtcacattcaccgttaccttacttccgtcaggagcttcataactcagctcaaagacacccgcttttccctttgttttcgcttcgtttatttttttaaaatgctcttgatctactttaaattcttttagatcaacattatttccttctttgtcttttgctttgatttgtccaaagtttttaagttcttcttctgtaaatgcattgcctccggtttcctttataaaatcgttggccccaagcatgggagccggcttttccggccgcagctcattggcatcatttccatcatccctcagaaaaacgctaatagtagccgttgtaccgttgggcgtagtatatgtaataggaaattctcctgtcttcccagatgtttttgcctcattgaccgcttccagctgggcagggtcagcaagcgtcaactctccctctggaaaatctgttccgttctgttgttttccggtcacttttgtgagatatgtaatctgctctttggaaaatgcttcccctccggtcttgctaatcacatgattggctccgatctgttccttcgtcgtatcttcgatcccattgacatcccgaaacggaccaaaatagactttcgtataaaacttacctacaacaatatccgtatcagatgaaaagggagtccctgcagtaaaggaatagtctgtgagagacgttccatcctgaatataaccctgataccctttatcgggagatgcaataacattggataccttatcgtttcctccccctgaaccgatccccggcatattagtggctttatctcccactgccgtgaccacagtatcgccgccgctgatcttaatattggttgtgatctgactagatcctgggtaagtccgtgacgcccctatgccaggagcgtataaacctcctacagcctccactatccctccggatatgtaaacgccgtctaccttacttccgtatcctgagccgatccccgacccactctcagttcctattgccttgacattcccgccggtaatataaatatccttcgtgtatcctcctccccaggcctctgccacacaggcagctccaatgcccggcgaatccccgccggctgaggcttcgatatttcctcccttgatcgtcagattggaaaacccgctctccccctttttcgctgtgtttctaaatgtactgccaagccctcctgcatgatacaatttgggattccctttagccaataaactcccacacttttctttgctgcatttatgtcccttctcatctgcatattcacattgaattgtcagagctccgtccataccgtcttttgcaacagcattgcccgcatctgcacttgttacattgtcgtttgttcctgcattgcttgtcaatgcattattccccaccagagtaactatcacatcagcatgggacacgttcaggcagtcgtggtttgacagactgcaggtaatatttacattatctaaggtaagttgagctgtcacgtccttttctactataatattatactgcgttgtagttcctgtaatatgatatccatttggatttagggttgtctcatcttcatcaagacctccgccctttgctccggatgcagtgatcctgatatttccttgacttacatccaaatcagtctggccttccgttgattttctatgggaagcttttatgatttctttaaaattagaaggagtcgttttttctgtccgaaggatttcctttttatttaccccccccccaatttctggaagtctttctttaaggcttgtcaatgcttctgatgtatcgaaagactcctcctcttttgtatgcggcatctgcgcaggctcttttatttcttccgtctctgtacttccctcatgctccatgtcttcgccttctgcgaacacagtcatcgaatttatacaaaaaaccgcagcaagcaaaaaaacaaatacttttctcttcacaccttctcctccttcaatagtatttttatatcaggttcttaggaagaaaaaatagttagataaaataataaggaaaactaaagagcccctcccgtattccaatcaagaaataacgaaacggactctaaagccaccattttcattgattatatttacggcagcagctcttcctgttcttcaatcctccggcaaagcgtggagtatctcttctgctcattgacgttctggatcatctgctgcaccgttgacttccggcctaccatcgtgatacactgcttggctctggtgactccggtatacaaaagattccggttaaacagtactctgggccccgtaagaagcggcatgaccaccgcagggtactcacttccctgggacttatgtatggtcaccgcataggcaagctccagctcgtccagcatagaataagagtattcagccactctgatatcatcaaataccaccgtgaccttttccgtgtagtcattaatccgtgtgatcctgccgatgtcaccattaaagacaccttttccctcttccacggtaaatcctttctcattctttacttcccactccatctgataattgttcttgatctgcatgaccttgtccccttctctgaacagacaggagacagcctgtttctcctgcttttcttcagcggggggattcagatattcctggagcacttcatttaacttatcaaccccaagttcccctttgcgcataggcgtcaatacctggatatcatacggtttggcgttgacataacccggcagcttatctctcaccagatagacaaggaccccgaggatgtcccccagcctttctctctcaagaaagaaaaagtccctgctcttattgtcaaggtcaatggtctttccctcattgatcctgtgggcattgcttacgatatggctggtctcatcctggcggaagatttggtttaattctaccaccttaaaagaacccgatgcgatcatatcctttagtacatttccaggccccacggagggcagctggttggcatctcccacaaacacaaacctggttcccggtacggcggcactcaaaagggaattcattaaaaagatatccaccatggacatctcatccacaatgatcacatccgtctcaatgggattccctgcattccgctcgaacttcatgctgtccccgctgctggaatcaccgtttaattccagcagcctgtgaatggtcgtggcttcgtatcccgtggcctctgtcatacgcttcgccgccctgcctgtgggggctaccagtctgatgtccaatgtctctgattcaaaatagcgtatcatcccgttaatggtggtcgtctttccggttcccggccctccggtgagtatgatcacaccgttttccgcaaccgcctcaatggcctctttttgtttctcggcaaaagtgatcgaaagcccatcctcgatcttggcgatcattgtcctcacttcagagattgacacatcataggtcatattcaggtcacaaagcatcttggcagtgttcaattccaggtaatactgggctgccccatagatgcgggtctgttcctcttcctcttttatgatgatctttttctggatcatcatatccagaagatggggttcgatcatctcctcttccacttccagcatccttgcggtgtttctcaagagaatttccttaggcagataaatatgccctgatgccagtgcctgcattagggtataaaaaatgcctgatatgatccggtaatcggagctgctgccgatccccacctgcctggcgatctcgtcagcaatcttaaaccctactccctcaatgtcatctgccatctggtaaggattgttctggatcacatcatacagacggtccccgtactctttaaagatcttgaccgccagattggtggtgatgccataaccagacagaaacatcatagcctgccgcatttcctgcttctcagaaaactccacagcaatgctcctcgccttcttttccgttactcctttgatctcagcaaggcgttccggttcctcctcgataatacggaaggtatccatcttaaattttttcacgatccgcttggcaattgccggtcctactcctttgatggctccagagcctaagtaccgctccatcccctggatatcgtccggcatagtgatctcataagagttcatctgaaactggggcccgtgcaccggatgatccacgtattccccttccagttccatgtattctccttcatggagaaactgaaagatgccgaccacggtctcctcatctccgtccatatcaaggctcagcactgtataaccattgtcctcattccgaaaacggatgtggtccacatacccggaaatccgtcccatccaactcccctccttttaacagatacttggcgtaacaaaacaaccaggataaaataccctggttgtcctcttccggctcaaaaaagcgctaaaaacagtactgactatttctcagcctttttgtcttctccggataaaaattcaatgtattttccagttccgatggcaactgctgtcagaggatcctctgctgtcatcgtgttgattcctgtcttagattcgatcagttcttccagaccctggatcagagatcctcctccggtcagaacaataccgcggtctgaaatatctgccgcgagctcaggcggagttctctccaatacgttatggacagcgtccacgatctgataagcaggctcacgtaaagcctcttcggtctcctcagatgtaacggtaacagtctttggaaggcctgtcacaaggtttcttcctcgcacatccattgtggcgttttccggacgtttataaacagtaccgatgttgatcttaatatcctcagcggtacgctctccgatgagcaggttgtgctttttacgcatgtaacgcacgatcgcctcgtcaaaatcatctcctgcgactttgatggaagtgctcacaaccacacctcccagggaaatgacagcgatatcagccgttcctcctccgatatcaacgatcatatttccgcatggctttgcgatatcaattccggcgccgatggctgccgcaacaggttcttcaatgatagagacctctctggcccctgcctggtaagtagcgtcctctactgcctttttctctacttctgtggcaccgctcggcacacacacgctgatgcggggctttcttccgaagatagactttccgactgtgcggttgatgaagtaactcagcatcttttctgtcactgtataatcagaaataacaccctgacggagcgggcgcactgccacgatattaccaggtgttcttccaagcatcaaacgggcttcttccccaattgctttaattttgtttgtatctctgtcaaatgccactacagatggctcttttaaaacgactcctttgccctttgcgtacaccaggacgctggctgtacctaaatcaattccgatatctgaacctgccatgtttcaaaattcccctttcgaattctctattattatcattatgttaaatgtcaattattcgtatacacgctctttttaattataatcaaagttagaaaaatttcaattgttttttacatattcaaacaaaattcagcaaaacttaagatttctgaaatatctataaggattcccacctgccagaggctccgcatggcagaaccaagccatttgaagaaactggaagaccaatctcttccgctgtcactctgccgccgaacttcgccttcacttccgttgccagcatataggagagcaccgccggctgcagtcccgttgtgtaagaattaatcagaaaaaatacggggtttttcgacaaaattttcgtacagagttgaaccaaaggaaatattttctcctcgatcttccagatctcaccctttggtccccgtccatatgacggcgggtccatgatgatcccgtcatactgattcccacgccggatctcccgttcaacaaacttcacacagtcgtctaccagccaccggatcggtttatcagaaagtccagaagcctgggcattttccttggcccagttgaccatccctttggatgcatccacatgggtaacactcgcccctgccgccgcagccgccaatgtggcacctccggtatatgcaaaaaggttcagaacctttacagggcgtcctgcctttttgatcttgtcagaaaaccagtcccagttgaccgcctgttccgggaaaacacccgtatgcttaaaactaaacggctgtaaatgaaacttaagtttcttataccggatatcccacgtcttgggcaggtcaaaaaattcccactggccgccgcctctgctgctcctgtgatagtggccgttcggctttttccattgctttgccttctttggtgtctgccataaaacctggggatccggccgtactaaataatagtctccccatctttctaatttttcaccacaagaagtatctaaaacttcataatcattccactgatctgcaatccacatcttacgttctcttccttttcttcatcgtattaaagacagatgacgtttcccttccggcccatctgatttccttctaatattatcatactccgctcttccatctgaatctctcctcccggcagtcttccgttttttggctcatcagccgtatctgcggtaatctcccagaaataatccagtggcagctccggcagcctcaccgtgtgcggctcccagtgcatattcatcataacataaacaatatcgtctgtgtcactatctttttctcttcctgcgaacaggacacccagaagatggttttgatagtctcttataggcttccacggctgttctccgtgaaagctgacagatggaagcccgcacaaagcttccccgcctctggaacgcagaaccggatgtttttttctaaacctgatcattttttttacaaactgggtgatgtcctggttctccaccagcagatcccagttcagccaggaaatttcgttatcctggcagtacgcattattattcccattttgggtgttcaaaaattcgtctcccgcatacatcatcggtacaccctggcttgtcattaaagccgcaaaagcatttctcacaagctttcttctcagctttaaaatatccggccggtctgtctcaccttccgtcccacagttccagctgttattattgttgtcaccgtctgtattgttccatccgttttccatattatgcttttcattgtaagagtaaaggtcccacatggtgaatccatcatggcaggtgataaaattcacggaggcggcatctcctctggtctctctgtcatagatatctctggagccgctcatcctctgtgctgccgcctctgccagacctggatctcctttcaaaaaccttctcatatcgtccctgtaccggccgttccactcagaccaccgattccatgacggaaaagaacctacctgataaagccctgccgcatcccaggcctcagcgatcaattttaccctgccaaggatcggatcaaaagcaagcctctcaaggagcggcggtttactcagcggcgatccgtcctcgctccttccgagaatcgaagccagatcaaaccggaacccgtcaatcctgtagtctgtcacccaatatctcaagcagtccaggatcatattctgcaccaccggatgattgcagttgagcgtattcccgcagccgctgaagttaaaatactttccgtcgggcgtcagcatataataaatattgttgtcaaagcccttaaaagatataaacggaccatcttcattgccctcagctgtatgattaaatacaacatcgaggatcacttcaatgtcattgtcatgaagctcacggattagatatttaagttccgttccctctctgttaaattccttttccgagctgtaactcgtattaggcgcaaaaaaactcaccgggttatatccccagtagtccaggagcttccggcctcccacatatctggtatcccttgtctcgtcaaattcaaaaatcggcataagctctactgcattaatgcccagatcttttaaataaggaatcttctcccggataccgtcaaaggtgcccggatgcttcacgtcggacgtattgtgcttggtgaagcccctggtgtggagttcatatatgataagatccttcatatcagtaggcctgcgtctggctcttccccagttaaaatcattggaaaccaccctggcgcggtagcagtctttgctgtactcaggcttctctccccagttgctctgccccgtcaccgctttggcataaggatccagcagacaccggtttctgtcaaacagcagccctctcgcaggatcctgcggtccgtcaacccggtagttgtactcgatcttcctgatctccagcccaaatacgatcatagaataaacatttccaattcggtagttttcgggaaatggtatctccgcaaaaggttcctttgcctttctcttatataataccaaagtacaagccgtcccattcttggtatgtacggtaaagctgacgcctccctcgatggctgtggcgccgttctgaaggtagaaacccggacggacctcaaatccatttaccgtgtccatagaccttagctgtctgtcctccccgatcctttttatatccataagctgcgctcctttatactccgtcaaataagggttattcagaaatccatgaaatatgctttatttcattataacatatatgattccaatccctgtcatcaaagcgtagagcttcccgatctaaaaatattgttaatcaataaaaattataccaacaccttctttttccttgtctaaaagtaatgatatattcacttcttcttacatagaataaactatggcttgaaatttcaccctgcctttccatgttcttttatcaaggattactggaaaacggaaatactatgtaatggataaggaggcacgaatgaaaaatagattaaacaaaggacaagtcgcggtgctgatattgatgctctccgttatagctgtacaaggtgtatatctggtaagaaccagccgggagatgaaaaatctaaagaaatcctcggctaccagcgcagagattcaaaaaaaccgtaaaatcctcaaggagataacaacgcatgatctgggagatttccctttccttccgaaaagagtcgatccccaaaaaaagctgatcgcattttcgtttgacgacggcccttccagaaaaaatacagagaagattttaaaggctctcgacaagaacaacgcacgggccactttttttatgctaggccaaaatgcaaaatattatccggatctggttaagaaagtttcagaatccggaaacgaggtggcgggacattcatggaatcatcctctgctcaccaagctcggcaaaagcggtgttaaaaatcagatgaaccagatgaacagagcaatctcatctgtcactggatcaaatgtcggtcttttaaggccgccatacggttccataaacagtacggttaagaaaacggtcaaggaccccttgattctttggagtatcgatacccttgactggaaaacattaaacgctgacaaaacggctgacgcaatactcaaacaggccaaggacggtgatatcatccttatgcatgatatccacgctcccacggtggaggcagtgaaaaaggtccttcccaagctcgaaaaaaatgggttccaggtctgtactgtctcagaacttctcgaagccagaaacattgaactgcatccgggggatgtggtggtcagtgccaatgatgtttaccggtataaaaaataaactcgttttttgccttcagtccggcttttgctgcctaactgaaggtatttttttaaatataatatgagtgcatgtgccagatacgctgacagtcccttcatttacgtcgttacggctttttctttctcccttaatgtaatataataaaaggattaggggataggaggccatacattggattaacatacgaaaagtagtcctctcatttattgataagctgccgaacatcacccttacagccaatgtttcttcggatgcaaatactcctgctgcgatatctgcaagataagcagatccttctggatcgtctgaaaaccgcttatgacaattttgcagggatttaaatcgctactccgcattgatatataactgtttatgaaaggataggctgctatgcacaaactattaatcattgatgacagtaaaaccgtcctgaatcaggccatgatgcttctcaaggatttttatcatgtcttccctgccatctcaggctcaacggcactaaagatattagagcatcatataccggacctgattcttctggacctgttgatgccggaaatggatggacgggagtttttcatcctcttaaaaagccgtccggaactttctgatattccggtcatttttctaatctcagatacgaatgaccagaccgaggcagaatgtatttctcttggggcctgcgatttcatcagaaaaccaatcataaaagaagttcttctgagcagagtggaaaagacactggagctttttgattaccggcgtgacttgcagcaaacgctggatgagaaaacccgacagattgagacagcctatattcagaccatggcagctcttgccaacaccattgacgccaaagacccggatactaatggacattccataagagttgcctactactccggccagatcgcccatcaactgggatattcaaaagaggattgtgaaaatatttattttattgcattgctccatgatgtgggaaaaatcggtgttccggattcggtgctcaaaaaaagagaccggctgacagaggaagaatacgaactgatgaaacaacatacgaccataggtgctcacatcttaaaggatatcaaaatgctgccggggctttgtgacggaacactttaccaccatgaacgctatgacggaactggttatccaaacggcctgtcaggagaagcaatacccagaatcgcacgtatcatcagtgtagctgacacattcgatgctatgactgccacccgctgctaccgaaagggtatggatcctaagatcgcacttgaggaattaaaacgcaaccgcggcacacagtttgatccggagatcaccgatacctttttagagattgcagatggattggaggtatcaaatcatgaggctgatcttatgtgagtttgagatctatgatacatggagcatcatggcatccctgaactagatagccaagctgacttcctcgtcctgtcttctgcgcaccggaattatccttcctgtggggagaagctactccaaacaggcgaaagaagcttttaagatttggagtatcaaggccatataaaaagagaaaaggacagtatatctcgtccttttcccttttgcggtcatcagtctaaatccagatgatctttccccgtatatttttcccatgcactaataaaatcttctgacgcactgactgcatttttattgttcacgatcttttcaaataagtctggcccgacggtgactgcgtcaattcctcccacaagcagttccttgacctgggataagtttttaaagcttgcagcgattactttacaatcaattttttgttctttaaatactttctggatctcaagagctaccttaactccgtccatctccagatcacaaatcctgtttacataaggagctacataggctgctccgcagtttgctgccatcaacgcctgctgcacggaataaatagctgtggcaagcgtatcgatcccttcatcttttaacagcttgatggcacgcaggccattaggagtcgccggtatttttaccacaactttttctctcaatgacatgagctttttggtttcctcaatgatcttatctgtttcatctgaaataacctgtaggaaaagtacctttccttccgggacggatgccgcaagttttttgatctcagcgccgtctttgacaatgatcgtaggattgctggtaaccccttttacattgtatgcttctacatagttttcaattttttcataatctgcactgtctaaataaaattccatgatttctccttttttataaaagctgttctgcggtaagactgtcagtgaccagcacattgatcaatcctgtctttgcagcagcttttatggcttcggttttttctgttccataggctgccccgattcttatgggtatatccttcagttcttctaaggtcagcccgatcatccgacgatcaaatccgctttctaatgccttaccctcttttgtatagacacgtcctgcgatctccccaatccctccctgccgtgctaaacttaagatcaactctgaattttgtgaatccagagccgcaatggaggaagcgctggtcattgttcctattccaaaaactcctgcctgacagctccttgccctttccagtgcccttttgatttgaggctcttccatcaggagctttttcatctccagacttttgacatacatgggcgcaggaaggttatggccaattccatgcaccatctccgccaattttgaacagagcagattagaataactcagtgcaagacttcctgggtcagctgtttccggcatggccgttccaagcagcggaacaacccggatcccatttgcctttatgtttctacccattttctcggaatcaaacgtgtctataatctgtttcatcgtatatccccaggtaacacccagcgatatattatttttcatgaccctcgacagataaagcccagccgctctcgcgaccagatatcctgaattggcctgatccgctgaagctgcgatgaccgcttccttcagcggatattttttctccagttctttttccagctccatagtgttctctgccgggaagtcaatgatgatctttacataaccttcgttttttgcttttgttaaagctcttgatattgtggttcttgaaacattcagcctcttagcaatctgttcctgagacatctcctctttataataaaagtccacaactttcattaaaaatcgttcatcatttttgctcatagtactatcgatcctttttgtgtgcacatttgacacatgaatcacatttgttcatgttggatttatgatatcattctgtttctgcaccgtcaatatgaacaatttcacatattcagctatcttctgtgtcgatcttcatcaaagctttttcgggtacttctttcttttctacttcctcccagcttttcacatctttatctctattggatactatcccataaattacccttaggtaagccccttttttgataggttcttcgtcggtcccatagaattctaactttatcgatttgccattttgatcaaatccattcaggcggtacaggtaatttgagtcttctctgctctctgaaattgaagtgatccttgtgtaatattccttgcccgtatgatttctctgttgcagatatcgtcttacagcgccagcccctgccaatataacaataaatataaaaattacggataagattacagttgatatagttctcataggtaacctcctgtctatgtatgtgtttttatcaatgctgtctatatcttagtacacattctggcgttttttatctttctgcttatcatacatatagatcagcgcaaacaacaggcttgcctgaatgttcgttgaaaaacacccaagcaagcctaatatctttgcattaattaaattatttctatcagataaatcttttatctaagaccttccgctcccatcaaataattgacaaactgctgtgcggtccttccggagattcctccatgggatagttcccatttatttgcctctttgcagagctcctcgtcagacatggtaataccctcttttctggccagctcgatgacaatatggaaatactccttctgggtaggcttggcatagctgatggtgactccaaaccggttgaccagagaaagcttttcttccatcgtatcggatttatggattccgttcagattctttacatcatctcggtcgctccatgtctccttgatcaaatgccttctgttggatgtggcatagatcaggatattctcaggttttgtctccactccgccttcgatcaccgctttcaggaatttgtattccacctcaaactcttcaaaggacaggtcatccatataaatgataaaccggtaattccggtttttaatatgtgcaatcacattggacagatccttgaactgatgcttgtagatctcgatcatccggagtccctggtcataatactggttgacgatagccttgatactggtagactttccagtaccactgtctccgaacagcaggacgttgttggctttccttccctgcacaaaggcctctgtattgtctatgagcttcttcttctgaatctcatagcctaccaagtcatcaagcgtcaccttatccatgttgttaatggcccggaatgcgatctcaccgctatgattttcttcaatcctgaacgctttattgagtccgaacattcccacgccataggccttataaaagcctgtcaccacctggaaaaactcgtgttcatccttagtcccttccagttttctgctcagtgcctggaccttctcgctgacatttttattgtacataagctccggttttccgatcgctttgtagtctgagagccggctgaagcagtctaccccaagatatgactcgatccttgaaaagtcataatcaaacagctctttaaaagcgcggaaatcattttctgcaaaataatttacgcttccgtccctggctcccaccttttcacaggtgatactaaatgggttttcgttggtgatcagcaaaaacgtcaggtagttatgccagagattctcgtcaaacccataatctgtggccacctgaaggatccttttgatctgcctgaacacccttgtggtcaggacctctttggattggctttcttcatccatgcagcggaaaatatcacttaactgcatcaaaatagaatccggctccatgtcgccgtatatgagtaactttgaaacatttttatacatttgttcctccacctttcatgttcttctaccagcttccgccgcctccgccgccgaagccgcccccggagaatccgccccctccaaaggagccgcctccaaatccacctccgcctccagacgatggcttcggaggttccgggacagacagagtgcttgctgcctgtgccatgttacccatgagacagcggttaaagatgtaataatcaaaaaatgtgaactgacggtctgtcacataccaatccggcgcagccagtccgagatccttcagcttctccgcaaacacatcagagagcccgaaaacataagcatacggcatgatgtggtaaaacagctgaggctggtcttctgctagtgctttcatcctgtccagctccgctgtctcgataaaatcacggagcccggccaagtgtcccatccattcaatacactggtgtgtcctctttttcataaatcctgtcatcaggatcatacctgcagtcataaccagcacggcggctaaaacccagatataattgaatatctcatcattccttacacggacaacatagcttccggtataagctgccgcagaaagaaaacttgccgccagagcccagaatacccacagctttctgctctccctgcttctggcataccagccgtccaccgctgtggtaaacaagagcattccgcctaatacaaggatccacaatacgatctcaacgatcattcttgggatacccgtataagaataaacacttgagacaagcataaacaggcccagcggaagtgctgagagtaccatggatattcctcttgctgctcttgaggatgtggtataaatattaaactccttcttccttccgaaaaacccaatcagtttatttttagccacctgcagagtatctgcatatttgtatttcagatcgtcaatcttgaccttatccttaccgtcaaacaggttgtcaaacatgatcctctgatagccaggtgctgtactggcaagatcggcctttttatggaatatgagttttcctttcttttcttcaatcttaagatatccccggtcagcccagtaaaggatcagggaaagcagatcttgatcctgcacctttccgtcgataatataacctacccccgcactatccagtccgtccggcggctgatattgtatggatggaatgatcttctcatcccttccgaacataagaaacagacaaagcacaataccaaaaataataacggaggggatcaggatcatccatggaatcccggcgacctgctggcttccttcaaaatatccagcatccaacccggcaaagcaggtcagcccgctgccaagcggaaggctcttctttaacgtgcccgtcactgtcatgttttcttcatttttgtcaatggtgagaacgtcttctgcgttctttgtggaaccgtattctccgtaataaaacttcagccggcccatgtcaaattttttgggaaactttatggtaaacctgcttcctgcagggatctcattcttccactgtgtggggaatatattacagtagatgttatcgtaactgctcttctgaaactttggatttagaagatattcaaacttataattgccttcccataccgtcgtatcctcatctccgaacctgaacaccttgtttcctttttcactgctcacactcacagtctcattggatctcagcatatccagaggcgcataatatggcaccttttgaagaacgccgtttttgtcataggcagatacagttcctttattaggtacataccggtatatcccatgccgcggctccgaaaatttcacattgattctttctgtgatatcataggatccgtcttctcctaccacaacctttgtctggtactgttttgtcctcatataagggtccgactcaacctgcgatggagaaggcccagctatgctttcaaacgcaatccctccgcagatacataagaccagcagaaggacagcggcgaagccggagctccataattttttcatagtgacctccctgtgtcaaagcattaaaaagaaacttttacattctcccgttctgcctcatcactgatttcgtataatggttttctcctaaacttaaagatacctgctacgatattgccagggaacatttctgccttggtgttgtacttgttgacaacgccgttgtagtatcttctggatcctgcgatctcctcctcgatcctctgaagctgttcctgcagctgaaggaagttctggttggccttcagatcaggataagcctccgcaactgcaaataaggaacgcagtgctcctgtcaagacattttcattggccagacgctcttccggattggaggcgctcattgccatatttctggcggacactaccttttccagtgttcctgattcatgcttcgcataacctttgacagtctccacgtagtttgggatcagatcgtaccttttcttcagagaaacgtccatcgcagagtatgcctcttcggttttgtttcttaaagtgataaatccgttatacgagcctaccagccaaattgccagtaccgcaataattactataataatgattaatgctgccattgttatttcctcctttagttttaataattccagtataacactaaataactttacaggaaactacagaaatgaaccgcgcagctttaagtggaggacaatatttttttcccttccgtgctcatcctcggctttgaacatgatctctccaggaatataatggtcaaagcacagcttctccgctgtgatctgataattttccagccaatcccccggtatgcgcctgtcaattcttatactctctgttcttattttccctggaatgccctccagcaaaacctcaactctgccactgtttgaaagaactcctgcccatcctaaatggctgcagatacagtaaagtccctttctcccatcagactggcttgctaattctaccattcttgaacgaatcttctctcttttcagcatctccatttttcacctcataaattagttttacttaactttttcgcatatcttattccttagtatgctcttcatagatgccagaataacttttccggcgtgtatgccgtttctgccggcgcaaacagcgcagcatatttttaagatattcatccggtcccaaacatgtgcagaaaaatttttataaatccagctgttaaacttccggagccttactttaccgcatcggtagttttttatggaataaagcgggcaaatccaaaaatacttcctactctctcactctttaagggccttatctactcaaaaaataggaccggaaaaatttccggtcctaaatggataaatatgaaatagaggaataaattcaagaaaagtgtatggcatgttctacatgatttccgttcagctcttagaatgcctcactccaatcatgtagaacatggacgtagtgtctgctggagaagggattctatcaaaagaaaggtgccgcttttgggtatatgtttttgtccgctgccttctcgttctacccgaagtatctctttaacaggccttcaaaggcttttccatggcgggcttcatcccttgccatctcatgaacggtgtcatggatcgcatctaagttcgctgcctttgctctctttgcaaggtcaaactttcctgctgtagcaccattctctgcttctactctcatctcaaggtttttctttgtgctgtctgttacgacttctccaagcagttcagcaaactttgatgcatgctctgcttcttctaatgctgctttttcccagtataatccgatctccggatatccttctctatgtgccacacggctcattgcaaggtacatacctacttcagagcattctccttcaaagtttgctcttaagtctgccatgatgtcctcgctggctccctgtgccactccgactacatgctcagctgcccattctctgtctcctgtctgctctttgaacttctctgcaggacatgttggacatttctctggtgctgtttctccctcgtgaacatatccgcatactgtacaaacccatttcttcataataatgatctcctttgcttactaatctatgttgtgttatttttctttcctatccaagaatctcagtaacagtaattgttattgttttcttgttgagataataatatcatcaagctttttatctgtcaataacttttttgaattttttaaatttgatttccttactcaactttttttaagccataatagtttcttatatttatgaagaagacaaaatataaagatttttaacctcttgttattgaatgcttaaatatcctaagatatttctaaggtttgtttatacttcatttataattgtttatttttttaacattgaatctgtccttcgttctgctatactttaattacagtttttcatatattttaatcctctcttttcattaaatataggacaagggtgttttaagatcactggctttaaccagttgttttaaaacacccttgtcctatatttctcaaatctcattgctcactgtctgccccacctcaatatatggtgaattacattgatccccccgttcatttaagtgtctgtcatcgaagttcccaaagttgtgggtattctgcactatgatatctttaaatttaaccggcagtcccggcgaagaataaaaactctttccccgctgtacctggaaatggagatgcggctctgttgtgttgcctgaattaccgcactccgcaagtttctcccctctctttacagactggcccacggacacaagtatactgccaggtctgagatgggctgacagggagtactcatgatctaaatgtctgatcaggatgtagttgcctctgatatcacgggcgtcacatgagacagctctatttttcgtaaccttactgtcgggattcccatcaccgacttctgcaatcataccatcagccggggctaagatctctttcccataacaataaaaggaccttacctctgtctcttctcctgtaaaactattcccatctccatccagtataataaaatcataggcgtacctttgtgtgggaacttcccatgagtgggaagtccttttcgtgacaccgccgtttgccacagcccatttaccgtgaaatggcagtgaatatatcattcttgaatcattattattaatatccggaagcttccctttatatttatgtctcaaaacaaagattccccatatctgcttcaatgattgcaaaataataggaccgttcatcccttacccaacctcctttaccactcccgatggtcttgaaaacttatttttatactcctttaccagacttttatattctggattgttccacaagaacgatagctctttttctgtctccatctcctttagaatagcaggcaacaaatcgacattataatttttgatctgggtttctgataatttcagatgtttatacagcggggactgggtgatattccattttttctgtatggtatcaagtgcatccctatagattgaaagacatgtctgtgtatcctgtctatttaccgcaagctcaagctgggccgcgcgcgatgtgcagtccatgatctcaaattctttcgttaaggcttcatacttatcagcgtagtattgtgcatcagcgtatctttcattacggatcgccgcctttgtcatacccattaaaatagtttgtatatcaactgcagtctccgcaagttttgactcataaagctcgcaagcgtcctcataacgttccagtttcatagaaagcctcgctgacatcagccctttgtcaggagaagacacgggcagctgctttatccgttcttccgcaagttcatactcaccgcgtccaaaatgcgattcaatcagtgcagacagagcttgagcagaaatcaaaggatcaccgcttttggcaatacggcaaaagagtttattgagctctccttgataatcctccttattttgtatgacaaataaatccagtccgtttttcagatcaaatgccagcgtgtaaatcagcaagtcgcaggttgggtactctgagattttctgcatggcggtttggaacgcagaatcaaatccctgtttcttcataagagcataaagttcatcggacagatgctggatttcggtctcctgcagatcttctttaaaagacattaaagtattcagatctgttttcagcagtcttgccaatgcaggcagtattgtgatgtcaggaaatgtattgccgttttcccacttgctcacagacggagtggacacgcctaaatattgggctatctgttcctgggtaaacccttgctccctgcgcttttgccgtattgtctcatttattttcattggcagcctcctaaaaaactctataacgttccatatgacaatcatactaaatcacttacctttgcacaataacgcatcagctaacttatcatgtaataaaattgcctgtcagttaaaatgaaaaaccgtttcataagagttttctaagatttgtttatatttcgtttataattgtttattttctatacattgtatctgatgaagattctgatatactttaattatagtttttcatatattttaatcctctcttttcattaaatataaaaaacaggttccgtccaaccagcggaacctgtttttttgttgttaattacatcagctatttaccactattggagaaggcatttcaaaaatgcgacggaaatagtggtgaataactatcgtaggatggcaccttctgtttaactgtcatccttatccagcagacactacgtctatgttctacatgattggagtgaggcattctaagagctgaacggaaatcatgtggaacatgtcatgtatttttcaacgccttatggagcaccctggcaaccgttcctcctacaatggaacctgccagtatctcgatcactgcattcacccctacaaaggcgcagataaacatcagcgggttcagattgcccatcgttgaattgagattttgaaaatactccgtattccagtaacaaagtaccatgacacccataaaaaatacggtgttcagaaacggagcacaaaatcctgctacatagtaataggaagtctttgcctgtccgccccgtttcaatgttttaaaaattactccggtcaggaaccccatcagcgcccttgtcggaactgccaccaaaaatgcataaaacggattgattcccacaagaactgcaccaaatggattcattccaaaaaatcttgcaaaactgatgagcccgaatgccagccccaggactgcaccggctgccggtgagaatatcatggctcccacccctaccggaattgtaagcagagagacttcaagtaatccaagacgtagatatcccagcggcgtaaatgtcataataaaaatgatggctatgaacaatgcgatctgcaccactctaagaacttttttgtttcccactttttcatcctcctgtatttccctttatattaccacgctgtttgcgggttccacaagttcttttggaaaaacactcctattcctttccgcttctgtcattccgccgccagaaaaacattcgtcattattctttttctttcactcgatcttttttagctctgcttcctgaatctttctgtctcttatgttctttacatgaatatggagcccatagacttccaattcaaacactgccccgtcctttggaatggaatgaagctggctgaagatcaggccccccagtgtgtcataatccgggtgtccgggaatctccaaacccagctcctccgctatggtgtccagcttcactgccccggaacatctccacaggttttcactgactttactgatctcaggcggttctgagggatcaaattcatcatagatatttcccacgatctcctccaaaagatcttccatagtaataataccgctcacttcgccgtactcatctaccacaaccgcaagatgaatctttttcttctgcatatcttgaaacagcacagaggaaggaatcgtctccggaacaaagtaaacagggcgcagcagtttatccaaaggtgtagaccgcccttcattctggctgatcagaaaatccctggcattgagtattcccctgatgtcatttagatctttttggtaaaccggaaatctggacagtccgctgtccttgattgtgtgtaaaatttcttccctggactgctccagatagatggctgtcacctcagagctgtgggtcatatgatctcttgccgttgtatcccccagttcaaatacattttctatccactctttctcctcgctgtctatggtacccctttcctctcccaattccatcatcagccggatttcctcttctgtcactgtgtcttcctctgcctccgttttcatatggagcactttgagaaccacattggtagaagccgacaaaaaccagaccacaggcttcatgaccaatgccacagcggagacagcactgcaggaaatcttcgctgccgcaagaggcttctgcatggcgatccgttttggaacaagttcgccaaaaatcagtgtaaaataggataagatcaaagtgatcagaatcacggcgattgtgtccaatgcagaaacagaaatggacgtgaaccctatatcttcataaatccactttacaaaatacccggagaaattatcggctgcgaaagcgcttcccaggaatccagccagtgtgatcccaatctgtattgtcgagagaaatccggatggttcctccacaagttttaacagcttcccagcttttttatctccttcttcggatagtttctttaccttcgccccattcagagaaataacagcaatctctgccatggcgaagaaagcatttaacaatatcaaaataatctgtaccagtaactgtgcggctattttattcaatttggcacactccttttctttttcatattaaatctatacgccaacagataccctaaatcatctgcgcatatggatatgaagatacgaaaaggcgcaatccgccattgtatcaaacagcagactacgcctgtatattatatgatataaattgtttgccgaatcactgtcgtcagcttcgtccataacttctctaatacctctttctgaattaagtaagcttattatacggatgcttatgagaaaagtcaatattagtcagacgaaaatattcaaaatgctgtctctcacctaccagctgccgcctccgcctcctccaaagcctccgcctgaaaaaccacctttgtttccgctggctgatcctcctccagatgcatttacagatgacggctgactcaaagagactgcggcaaacgaaagattccctgccatacaacttaacatgataccagcattccagttttttatttcatatccagcatgataccagcccggggcaggaatttgcaaagtcttcagcttctctgcaaacttgtcataaagaccaaatacataagcatagggcatgatatgataaaatatttcaggctggtcttctgccagtactttcatacggtcaagctctgcagtttcgataaaaaagcgcagccctgacagctgtcccatccaccggatacattttgaagtcctttttttcataaaacatgtcagcggcatcataattgctgatacggctaagacaactcctatttctaccgaataatcaaatatttcattttgggatgccttatatgtataaaaaacaaagtaacatatttctgataagtaaaaaagagccgcgcctcctgccgtcaacatcattctcttttctccggaaaaagagtaccagccgtccactcccctgcagcaaaagtacattcccatacccattccaacgcataataatgcctgaactacaacgcctacggccgtcatataagaataatgacctgtaagaacagtaatccagataactgacagtaatgtgcataggaaagctgctttctgcagcctccatgatggcttggtatagattccggccttgctttggccatcaaatctctgtatcaactgcgttttggcgttttccatggtgatccagaaatcattttgcagtccgttcaagtagacagattcctggttccgaaacagccgccggaatacagtctgctgatagtttggcgcatcttccggaagttcctttagtttatgcagagttataagatattcttcttcctcttctatccacaagttgcccctgtcggcccaatacagtaccaatgaaaggatgtccttgtcatccgcaattccatcaataacatatcctacagctgcgctgtccatatcctgcggaggttcaaactctatggaagaaatgattttttcatccctgccaaagcacagatacaagactacaagcactgcaagaagaatagtcggcggaatccaaagaaataaagatatttctggtttttctttaatttctgtaaatcccttctgtatctgtccagaaaaacaggtaatcccgctgcccgcagaaagatttctcttcagcgttccggtaacagtgttctcctttgtattcttttttaattctatcaagtgatcagcactttctgctgatccataggccccatgataaaactcaagctgatctaagtctgcgttttggggaaaatggatcgtgaaacggcttcccttaggtatatcattcttccacctggagggataaatattataatagatgtacgggaatggctgcccctgccgttcaggagtcagccggtatgtaaattcataatcaccttcccggaccgttttatcactgtggccaaaacgaaatacctttgccccgttctgcttagattcagatatatcactgtttggcagttcaagctccacctttgcgagaaaagggaatttttctatattatcgccctttttatacgccacaaatcctttatcaggtatgtaccgataaatcccatgcctgtcctccgaaaacctcactttaatctgttctgttactatataagagcccttttcatccacttcgatatcaacatcataggtctctgttttcatatataaatctttttttatatctggatcaatctcttccacaaggcggtcaaaatagcccgcctttacaaacaatatggccaatatcatcagcagaggaatgaattttttgagactaaaacttttcatatacggcttcgttcctttctgtcattttttataccatatctcatttttattctcctttatacccatgtttacggttgattttattatatcatttttggtttgttattgtctaaaatacaacataaatatgggattaaaactcttccccatttttatgccttagaatcacataacagtataaaaaccatccggccattctgacagatccctgatttttctcaagagagccaactctcccccgctggacagttggtttctttttctctcaacattacataaaaactcttaaaaacagccattgactgtgcattcaccggatggattatagtgatattaagatcaaaattcatattgccacaggaggtagaaaattatgagaacagaagcatttttaagttacaaaatgacgacggcagatgcaggcagtccggagggtgtgatcccggtaggcagacagtttgatttcatcggagatgtagagacagagctgatgatcttaaacgacggagatgagtctctttgccttggttataacgatgtaaaatttatggaagatgcttatgtgggagaccagctggactttaaggcaaccatggtcaaggtaggaaacacatcaagaacctgtctgatccagacatttaaagtcgcaactcccgcaaaaagacttggtattgaaggtgccaaggacggagatatgtactattttgacgagccaaaactgatcactgagggaaatgtgatcctcgtagtaaaaaaagaacttcagagaggcgcacagccggacggaaccgtcaaagatccatggaaagcaatcgattaatcttgcatataggaaatgaaaaatcaaggaggtcatgatatgagcgaacagacagtaacaatgagatacagaatgtcaagcagagatgaattttacggcggaggtgtagtaaacggtgcgcgctccattacttatatgggagacaccgcagaccgcctgatggcaaaggtgtgcggcaatacaggaagatgctgccttgtagaaaagatcagattatataaccctgtatttgctggggattatatggaatttatcgcaagagtgacaaagactgagggcaacaaagtatatatccagtgccgttctttcaaagtagcccagattccagagaatccggaatttgaaagttccattgatatgctggacgatccggaaatctcaactgaagcattttttgtttatgaagtgccggaacacaaagtaaaagcttaaataaaaggaggatcacatgaaagcattagaaggcgttaaggtcctggatctgacacacgcatataacggaccgttctgcactaccctgctggcagacaacggagcagatgtcatcaaatttgagccgatccagggagaccagtgcaggagctggggaccgatcgatgaaaaaagcggagagagtggattttatgcattcttaaaccgaaataaaaaaggtgtcactctgaaccttaagaatgaaaaagcgagagaaatcttttatgacttagtaaaagacgccgatgtggttgttgaaaacttccgggccggtgtatctaagaaattaaaggtggattatgaaacattaaaggagatcaatccaagcatcatctatgcttctggttctggcttcggtcagtacggaccgctgtctaaccgtccgtgctatgacattgtagcccagtctatgggtggtatggtaaacatgacaggattcccggactcccctccaacgaaagttgggccttctatcgctgacaatgtaactggtatttatctgtgtgtgggagttttgatggcgctgtttaaccgggaacggaccggccgcggacagcaggtggatgtggctatggcggataccatcttcagtctgctggaaaatgccattgttaccacaacaatggacggcgtgatcccacagcgtcagggaaatattgatccttctattgccccatttgatatctatgaggcaaaagacggatatattgcaatcggagtgggtaatgaccggctgtttaaaaccttctgtgaaaccattggcagagaggacctgcttgacgatccacgttatcagacaaacgatctgagatgtaaaaactacacaaacggcttgcagcaacttatcagtgaatgggttgccaccaaaggaaagaaagagatcgaagacctgtttgataaagcaggcatcccctgtggtccagtgctggatatgcaggaagccatcgaccatccgcatttccaggcaagagaaatgatggtacatatggatcatccgacaatcggtgaaatgtatttccagggatgcccaattaagttgacagagactcctggcagcgtagacactcctgcccctctgctcggacagcacaataaagaagtatttggactgactgatgaggaactggagtcattaaaggccgaaggcgtaatgtaattaggagagcaggaggtaaaaatggattttaaactgacagacggacaggaaatgctgaaaaagacagtccgtgaatttgctgaaaaagttgtaggtcccagagctgaagaggtggatcagaccgggatctttccgagagatacatttgagcagatggcaaagctcggatttacagggatcggaaccccagaagaatatggcggaagcgggggcaatgacattgataaagtgatcacagtgacggagcttgcaaaaaaatgcgcggccactgctggtattttatccatccacaccatctttgcttctgtactttcaaagttcggcaacgaagaacagaagaaaaaatatctccccgaggtaacatccggcgggcaccttgccgcctttgcgctgacagaaccgaatgcaggctctgacgctgcggcagtaaggacaacggctgtcctggatgaagaaaccggggaatatgtattaaacggtaccaaatgctttatttccggaggaggccaggccaagtatcttctcatttttgccctgactgatccaaccaagggagtcaaaggcctatcctgcattttagtggaaaaaggcactcctggattctctgtaggtaaaattgaaaataaaatgggaatccacggttctgagaccgctgaattgatctttgaccaatgccgggttccaaaagaaaaccttgtaggaaaagaaggaacaggatttaagatcgctatgacagctctggacggagccagaatcggtgtagctgcacaggcattaggaatcgcggaaggtgcactcgatgagagtgtcaagtatatgaacgaaagagttcagttcggaaaaccgatcaaggcacttcagggactgcagtggtatattgcagatatggccacaaaaactgagtgcgcaaaatggatgatctattatgctgcctatttaaaaagtaccggcaaaccccatacaaaagaggctgccatcgctaagctaaacgctgctgagactgcaagatttgtcaccaatctcgctctgcagattcacggcggatacggatatatgaaagattatcctctggagcgtatgtacagagatgccaaaatcacagaaatatatgaaggtacttctgagatccataaggttgtgatctcaagggctgtattaaattctaaaggaaagtaatgggagggaaagcatgaagatcattgtatgcgtaaagcaggttccggataccaacgaagtccggatcaaccaggaaaccgggacactgatccgggaaggagtcccaagcattatcaatccggatgacaaaaatgcattggaggctgcccttgtcctgaaggaacagacaggagccgaagtctctgtagtgagcatggggcctccccaggccgcagatgcgttaaaggaagccatcgctctgggtgcagaccatgcatatctggtgagcgaccgggctttcggaggatccgacacatgggccaccgcaacgatccttgcggcagctattgaaaagatcggcagttatgacctgatcctctgcggaagacaggctattgacggtgataccgcacaggtaggacccgagattgctgaatttcttggcatcccgcagattacttatgccaaacatatcgagtatgacggggaagccctgaatgtgacaagatttacggaaacaggagactataagatccgggcagaacttccggtgctcctgactgccatcaaggaactgaatgagcccagattcccaaccgtacagggaattttcagagcttatgacggggatgtggaaattaaaatactgggcttatccgacctggatgtagaccagacccagattggacttaaaggttctcccaccaacgtataccgttcctttgtccctgttaaatccaagcaaagtgagatcatcgagggaagaacggattcagaaaaagcggaaaccctcattgacaagcttctgcaggcaaatttgatttaaggaggacataaaaatggaacgagcaaaagtaaaccaaggtattgacctgagtgcatatgaggatgtctgggtccttggagaacaaagggaaggtaagatccagcccgttaccatcgaactgatgggagaaggccggaaacttgcagatcagcttaagaaaaaacttgcagttgtcattcccggatatcagattgaacaggaagccgagaagcttcttcactatggcgcagatgtcgtttactatatgtcgcatccgctgcttaaaagcttctccactgatggctatacatccgcttttgtacagctgatccaggagaaaaaacctgagattgttctggtaggtgcaacatctataggccgtgatatcggaccgaggatcgccgcccggcttggaacagggcttacggcggactgcacaaagctagagattgataaggaggacggaaagattcttcagacacggcctgctttcggagggaaccttatggccacgatcgtttgtccaaagaaccgtccacagatgtctactgtaaggcctggtgtcatggagaaagcaattcatcaggaaacagtctgcggtacattaaagacctttattcctgacctctcagaaaatgatatcagggcaaaactgattgaaatcattaaaaaagaaaagaaacaagtcaatctgaccgatgcacgtattatcgtatctggcggaagagggcttaaatccgcagaaggtttcgagcttatccgccagctggcagatgttctcggagcggaagtaggttcctccagggcgtgcgtggaagcgggatggatcgatgcctcccaccaggtcggacagaccggaaccacagtacggccggacatatatattgcctgcggtatctcaggtgcaatccagcatttagcgggcatgaacgaatcaaaatatattattgctatcaataaagatccagaggcaccgatcttcggaatctgtgactatggaatcgtgggagatttaaacgatgtgatcccggcgatgatcgctaagctcacacaaaaggaggtttcaatatgaattttcaattaaccgaccagcaattatctatccagagtattacaaggcagctggctcagacagaactgctgccgaacgtattaaaagatgacgaagagggaagatttcctgagaaagcttatgcaaagatgggacagatggggctgatcggccttccgttcccaaaagaatacggcggccagggtgctgattatctgtcctatgtactggctgtagaagagatctccaaggtgaactcctctgtgggaattgcttattccgtatgtacttccctgttctccggcggcctgatcaactctgccagtgaggagatcaaaaagaaataccttcctgatgtcttgtcagggaaaaagatgggtgctttctgtcttacagaaccggaagcaggttccgacgccgcaggttgtaaaacaactgccctttgggacggagaggcttatgtcttaaatggcctaaaatgctttatcactaacggacctctggccgattattttcttgttttcgcactgacagatccggaaaagaaaacaaagggcctgtctgcattcgttgttgagaaagcaatgcctggagtttctgtaggaaccatcgaaaacaaatgtggtattagaagtgcgcaggtttcagagatcatctttgaaaatgtgagagttccgaaagaaaatatggttggcgaagaaggcaaaggctttgctgtagctatgaaggatctggacggcggaaggatcggtgtggctgcccagggactgggtatcgcaaaaggtgcttatgagatcgcagtacagtatctgaaagaccgccagcagtttgggaaacctctgtttaagaatcaatatctggcattcaagatggcagagttgtccgtacagatcgagcaggcacagtacatgctctataaagctgccatggacaaacaggaaggacgtaattactccatctctgccgctaaagcaaaaatggtatgcactgatgcagctatgcaggtttcccaggaagctgtacagatgctcggaggcaatggttatatgaaagaataccatgtagagagaatgatgagagatgccaagatcacacagatctatgaaggaactaatgagatccagaaacttgtgatcagcggaagcttattcaggtaacatataggtacggtaacaacaaagaggtacggcagccccctgccgcacctctttattttgtataataatattaattacagcattgtatgatcaacagtatacattataatccttataaatttcagaaaacacctgctctgcaggttttgaacgcccttccagcatatccgtatatcccttttctaactcttcatttatctgtttttctgtcatacttgtctctctcctttcaatcacataatactgaataatccttcttttaataaaataataacatacgaaataaagaattctactgaattccaaattatttttaaaatctcatcacattcttttctcttatcgtatgagagtcattcaatcgttagctggagataattgaaaaaatcacaacagatacaaagctttcaaactggcgaaaatggataaaaactatcgcaggatggcatcccgtattttatatccttcggatggacgtaatgtctgcttgagaaggtcttctgtcaaaagaagggtgacacttttcaaaagttatttaccactattggaggagcgcatttcaaaagcgcgacggaaatagtggtaaataactcatgacatcaaaacgctccgcgaggatgtacacaaaatatgtagggaaatgatttgaccttatcaaatcgcattagacgctcaacgttgtcaagctcttgtgacaggaatgataatcttggtaacatgttcattttcattgcgcaggtctacaggagagatgataaattcctctgataccgggcctgctattttatagtggttttggttgatccactgaatgatcttgatatgggttttgataacatcactgtatggacccacatggaacgcagttgctgcccggaaaccgccgaactttctgacgtgcggggaagagctttcctccacctggatgccgaattctatgtcacagtctttggatagaaactggtccagcagctctgtgtaataggtgacagtgatcggtccgcagacttttaggccatgtcttgagacttcatcattaatctctacccagcgctccagggagacttcatcgttgtggtaggactgcatgatcttacgggagtggtacagattcacttcaggcacctctttgacggagatcgcctccagctcaccggcctggatcttttttaattcatcgtcatagaggtgaaggatctgggcgccttcttttaatctctgaagaaactgctctccttcaaaatatttctgattcaggttttctatttcttttttaatacacaccagcttatcttcaatcttctgctccagatttttaacctggtccgcagaaacgatctctttgatctccttaatagaaaaacccagcatacgcagcttccggataatagagatcgtcaccatctgatccttgctgtagtagcggtatttgctctccgccttacggatctccggtaccacgagcttgatctcatcataataacgaagtgttttaatcgacgtattacaagtggctgccacttcgccgatagagtaatattgatttctgtccaaaataaagtccctccactcaaatttcatataccttatcgtgcgcagcacgcccacccgaagggtataagacacgggatgccctattgggtataccttatcgtgcgaagcacgtccacccgcagggtatggaatacgggatgcccttttgggtataaccttatcgtgcgtagtgcgccaagcccgaagggcataaaatacgagctgccctattgggtataagaatattataccttatcgcgtgaagcgcgtccatccgaaggatataaaacacggtgtgccctgtgggaatgagttatttaccactatttccgtcgcgcttttgaaatacgctcctccaatagtggtaaataacttttgaaaagtgtcacccttcttttgacagaagcccttctccagcagacattacgtccattttctacatgattggagtgaggcattctaagagccgaacggaaatcatgtggaaaatgtcatacccacagggcacaccgtattatatacccttcgggtggacgtgctgcgcacgataaggtatagaaatttcctctgacatcaagagagccatcctgcagaaactatcaaagtatctgcaggatggctctctttctttactggattaaaaaataaaaacttcttactccttctccaccggtacgatgatcttcgtgaccctccgggtctcatcatttacatccaggggcgaaaggataaattcttccgtggccggtccgacggtcttataatcgtgctttttgatccacttgatcaactggatatatgtacttgaaatatcctcataattccctatatgaatcaccgtggccgcaagcattccgccgaaaggacggatatgatcagcaggccttgactcctccacctggacagcgaattcaatctcagaatcctgggacaggaatttattgagtatattgctgtcataaaaagtgacatataccggacctactatcttacaattcatggtcttggccttatccatgatccccagccaccgttcaagagagatctctgaataatcataatccttcatgacccggcggtcatataaaagatgaacctccggaataaattctacagagaccttcatctcatcggaacggctgtccgacagctcttcaaggatatcaataccactctgaattttcttcagaaaatagcaatattccgtgtatcggttgatgctctcctcaatctcttgtttcatagattgaagtttaatcagcatgtttttttcaagtgctttggcttcattttcagaaacgatctccttgatttcttttaaggaaaaccccatttgtttcaaattcttaataatgactaccgtgatgatctgccccttagaataaaggcggtaatgagtctcctgatttctctggtccggagtaaacagaccgatctcatcataatacctcagtgttttctgcggaatatcgcagattgccgagagttcccctatgctataataaggcttgtctataaaaataagaaacacctccctcagtacattttttacgccattgctattataccaaaaaccatcggtttaatatagggtgacatagatcttttgtatatttggcaacgcagaaagaacgctgaaatccacagcgttctttctgcttatattaacgtaaaggaaaacgatgttacctacttgtcggcatcacattttaaaactgcgttcagaagtacagatgccccctgagtacactgttccggtgatgtatattctggttcacagtgagaatgtccgtccttagaaggaacaaataccattgttgtcggcatcatgtatgctgcaaactgagcatcatgtcctgcaccggaattgatcttctggttggaataaccgagttcatccactgcttcctgtacataattaaccagttctttgtcatagtaaacagtatctctggtccatgccacttcataatcgactttgcattttactacttcttttggcattgacttgataacattgacaacctgttcgatcacttctggtttttcatgtcttgcatcaatagagaattctacatagtctggaataactgtgtgtacatttggatgacagtagatctctccagttgtataaaccaattctggatccagtttatccaactcatcgtggagatactgaagaacctttgaagctccgtataaagcatcctggcggtatttcatcggagtggttcccgcatggtctgactgtccgtaaaccttaatcttgtaattgatcattccaagaacacaggttacgacaccaatatctttctttgcagcttccaggatcggtccctgttcgatatgaagctcaaacatagccatatagtctttgttatttaaacggttttctctggcccctttatatccggaagcttccaatgcctccccgaatgttttttcaggatccagaacagatttggacgcaagcatattttcatggataaagtttttcttgatatcgtccggaagatagtcgttacagattacccctgaggacatcatagccggcggatataaagaaccttcttcgttggtccagatcatagcggttacattgtgtttgtgaggaatcttctggtctgcaatggactccagaacttccatagctcccataaccccaaggattccgtcataatttccgccgttctttacagagtcacagtgggaagccataacaatgttcggaagatccggctcagatcctttgagtgtcgcatagacatttgccatatcatctgttttgatctctgccccgatggcttccattctctttacgaattctccccgtgcctgtaaggcttccggtgaaagtgagtatcttgtgatgcccccgtgtcccgcatccccaaacttgctcatcgtttttattttgtctgccatccgatctaaatcacatgtatacataatgaaacctccttattttttgtttaaccgatagtttttaaaaatattccagcacacagctgccacgatcgttccaaaagctatggaagctcctgtaataaatgcttccagccggtactgtgcaaattgttcccagtcagctttgaatgcgttctgcatcatcataaataatgccgccccggggatcagggggatcatgccgactgcaagatataatgttgcgggaacctttgtcctgactgccaaaaattccgcgtagattcctaaaaataatgccgccgcaaaatactgtttcccatactggggaaaaatcagccctgccgaaagatacacgcaccatgcaagacaccctcccagtgaggtatagaaaatttctttcccgtgcagattgaataaaaaagcaaagcccagggcgccgaaaaatgctgctatgatttgatttaatccgctcattttaaactcctctcaattcataatgcagacattttgattacagccagctggccactgcaaagcccaaagcaatagaaaggcttaaaaggactgcctccccgaaacgggtcaggcctgataaaaaattatctgatatcatttcccggatacagtttgtaaacataagtccggggatcaggatcatcacattaccgatactgatcttatcagaggaacatccaattcctgtacgtgccgccatgaccgccaggacccctgctgccaaggaacaaaggcaggagaccaggaaacggttcatgttcatgtttttcagagggatctccacgatcttgatcaaaactcctatgaccgcggagattgccgcatccagcacagagcctccaaaaaacagggtaaaggcagatgatattaatgcatagatcagcatgccctgccggttcgtatattggggcaattcgtgaatccttttcagatcacttctgacttcatccatatccggaaggctcacacacacgttccgggacaaattgttcagatatttaagctcctgaagattaaaagctaagccatggattcttctggactgggttatgataccgaaattcttggaggaaatagtggcaacaattgtatatgtaatagaaaaaacctcagtccgttcagatccataagctgtgcagatccgaaggatcgaatcttccacgcggctgatctctgcaccggagatcagcatacgcgccccgatctccaatgcattttcaagcatttgttccgcttcttttctagtaaccgccttacccatggtaccctcgcttttttatcttaattttctagggcttcgttttacaaattggcccataccaggagttcccttgaactctccgtctgcatacactacatttccgcggaggaatgtgcgcactggatatccgtgaagctttttgccttcccagatggtatggtcacagtctgaatgcattgtatcaacgctgaccgtgaaatccttatctttgtcgtaaatgacgatatctgcgtccttacctactgcaatagaacctttctggtcacatccgaagatctttgcaggatttgttgagcacagctctactgctctctggaaagatatctttccggagtttgctgcatccagcatatatggatataagttctcaattcctgagcatccgttcgggatctttgtaaagtcgtctttaccccagtctttttcataactctggaacggacaatggtcagtggctacggtatcaatggaaccgttcttgatcgctttccacaatgcgtcctggctctcctgtcctttgatcggaggggagcatacaaagttacgtccgtcctctctcttatagacatcacaggtgaactccagatactgcgggcaggtttccacaaacacaggcgccccttcttctttggcctggaggcaggcctcgagcccttccttatccgccatatgtacaagatataacggtgcatccaggtgttttgaccaatgtacagctcttttatctgcctcagcctccacaaattccggacggctcatgtaatgataccaggcacttgtctttccctcttttaaaaactgttctgtgtacatatcgatcaaatccggattctccgcgtggacattgatcattgctcccagttccctcgcacgaagcatcagtttagcaagtgttccgtcacttaccatccatccttcttttttatacacaaggaagcatttgaaacttgtgatcccctctttgacggcttcttccatctcttcaatgatcgctccgtcagaaaggtctgtgatacagcagtgggatgcaaaatccacacatgcttctttctctaaaacagcttttttctccgcgataactccccggatcgtttccccggtatgctgtaccggatagtcaaagactgtcgtgactcctccgcaggcagctgccctggttccggaaagatagctgtcagaagaaatcgtaccgccgaacggcattgccaaatgggtgtgcacatccagtgctcccggaagcaccagctttcctgcggcgtcatatacttcatccgcatctgcctcaatattttttgcaatggccacaatttttccgtcttgcacgcctacatccgcagaaaacatttcagaagctgttacaacagtaccgttcttgatcactaagtcgaactttttcatatgattgtcccccaatctgacttatgctttactcatacttggttttcatttttacttcatgctcttctactcccggtttcatttcaaccttgccaggggtaatgcagtccatcaccggacagacattcaggcacagatggcacccaacgcatttgtcttcattgagaactggttttctctcttcttcatcccatgtgatggcctggtgtccgccgtcaaagcaggatacatagcatctgccgcatcccacacatttatccttattgaattcaggatagaggataaaggtacggtcgatatcatctgccggcacgatgttcggaagtgccactcctaccagatcagacagtttgtcaattccatggtcttccatgaaatgagacagtccgctgatcatgtcttccacgatgcggtatccatactgcataacagaggttgtcacctgaaggttggaagatcctacgaggataaagtctaatgcgtccttccatgtctcgataccgccaattcctgtgatcggcacatcttttaattccggatgctgtttcatctgtgtgataaaacgcagagcgattggttttacagcggctcctgagtaacctgagatggaggatttaccatttacaaccggcattgctgtcatattttctacatcaatatttgtgatggctttgaccgtgttgatagcagcgattcccttcgccccgccttccattgcagcgatagcaggaatctccatgtttccgatatttggagtcattttagcgatcactggaagatgtgtagcgcctgagacaacttcacagtatctgcgcaccaagtccggattctgtcctacgtcagatcccatggcagaggatgtcatctgcggacaagagaagttacactcgatcatgtcaactccagcctctgttacttttttcgcaagaatctcccattcctcttcgttgcttcccatgatactggcaacaatgactttggtcggataatcctgtttcagccttctcatatattcaaggttatcttccagaggtttatctgagatcatttccatgttcttaaatccggtccaaggggtcccttcctttgaagtgatatcaaaacgaggggagcattcattcggaatgaaaataccaatggttttataataaactcctgcccaacctgcttccagagctttggcacacatctcatagttgcttcctaccggagaggatgagaggaagaacgggttttcacatttgactcctaaaaaatcaatagataaatctttcttaatggacatatacaatgcctcctttctatttgttaaaatagtctgcgatctgttctgcagcttctttaccttcagcaacagcttctactacggtttttccgccgtttaccatgtccccgcctgtgaagacattttcaccggctgttatggctgccacatcatctccgattgcctggccgatcgccagcacaacctggtcagttttcatggtcagtccggattccccgtcgcgtcctgcaaatttcattgcggtcacatgtccttcttctccgacgatctctgccggtgcgaattcctgaatgattgggattcccatgctctgtacgaagttgacttcatcgatgtccgcaggtgcttcttcaacggttctcctgtaaacgatggtagcctttgcccccagctgttttgcagtagttacacagtccatggcaacatccccgccgccgatgacgatgacattttctccaagaaccagctgctctgtatttgttttagcttctcttaagaagtcaatggcagttaccacaccttccaagtctttgccaggtatatcaaccatctttgatttccagagaccagctccaacaaataccgcatcataatcttttttaagctcttcaagctttgctgcatcaacagcttcgttgaacttaaattcaacgccaagcttttcgatggtctggatatcaaaatctaccacttcctgaggaagtctggtcgggatgattccatatgtaagaacaccgcccgctttatcttgcgcttcatagaccgtcacagaatatccttctaaagctaactgtcttgcgcatgataaagacgctggacctgcaccgacacatgcaatcttttctttcttcggctctgcagcttctaagaactccattccctgttttttctcttcttctacgaggaaacgctggatctttccgatctcgatcggtttgtcaattcctgtacggctgcacgcctgctcacacatcttaccatatggacagacttgagcacagcagcctgccagcgggttgttttcacgaactgtctctgcagctccttttatattacggaaacgaagggaacggatgaactttccaggatcggttcctgccgggcatcctttgctgcaaggtgaatcatggcagagaaggcatctggatgcttcttccattgcagttcttaaattaaagcccttttccatttcttccccatactctttttttgtaattttactcatggttgtttcacactccttttttattatcaatttcatggttttcaatcagagactgtgtcttttggcttaagttattcttttccgaatttcttgaaaaggaatctgcctgaatagtcacaggacactccaagaatattgcctaacagaaggcatattaagagcattttccaatctccgccgctggcgaatgcagaaaaacctcccataaacgtattgggtaccagagacaaaacatcaatgtgagattgaaatacgatcagccaggagaagaatcctgttacgactgctccaaagatgattgtgttgttgatgcctccggacagaatgatcagcattccccacagcagccctgtgtagttgctgcacatcgatttgataaaccctgttttcccgcagccggcggaaaagtacgaagtgcatccgacgaatccgatccatgtggcaagccccagggcagaaccgactccctgccagatacagcagaaaatcccagtaccgatggcgttagccataattacactcatagttgctcctttcttattgcgtttctgttatttgttaagttcattgtatcggatacacgatgtggaaagtaaagagcagattctttctttttttacgagattagttaaggcaaaccttccaaaactaccagtaaataattgttgatgaatataaaaaaaagaaaattaagtttgatttttaacaaactaacgttgaatgacgtagaaattgcataaaaatattaagatgacagcaaatattatggataaaataacgaaaaaaaccttcccgtaacgggaaggtttttgcagtttctctggttatttatactataaatatgtaatcaggtagtatgcagcaatactttaagaatttactaatttaatcttcctttataaatttttcttaccttccctttcttaataagagcaatcaatccataattccctcttataaatccccattccttataccctttttttgcttttgttttatatacaggctttccccatgttgtcagtacagccttcttggtagacatgccgaccgttatgttccggccaatataaatttgctttgtcgtacttgctctctgatctccatatttgtcataaataataacttttatactttttccagcttttttctttggaagttttactttaattgtttcattaaatttcttgcccttaatctttttcgttatggtcttaccgctgactttaatcttgagtttatccgttttctccgcacctgtacattgaatattggcatactttgtttttgtaaactgggtatttttaacctttaccttacaataagacttcttaatagaagtattgattactttgtagtatccgtttggagcaaccgcttttatataaacctttgtacctgttctaaaaataggtatataaatcgagaaatctccatcgttgtctgcggtagtattataagtacgatttcctatttttaaggttatctttgtcttgggcaatgtctcaccccatacttcaccatcagcataccccgtaccagcatttagcttaaatttaatagctttatttttaatggtagaagaggcgtaagtcttacatccatctttatcttccactgttacagtgacctttgatcctaccttttgctgtggaaaagaaatattatatttatattcattaaagtcattttttttgaatgtaccgttgtaggtttttccattaatagtcgctcgtatataacttggtgctgcttgatgttcataatcttgataataagagcctgacaaacgactgacagacaaatctttgatattcacttcaatatcttttttaccgacagttcttgtaatcgtattagtaaaacttccattggagtcttcataccaaaacttaatcttcgttcccacagactgaggaggatatgatacatatactgtttcagaactactacttgggtaatttccataataaatctttccatttatttcagcacacagcctatcataaaatggagatttccctgatgccctgctgggaaatgctgcataaaaatgtttttctgtttttatattctgattgtcattactaatttttttattaagaacttcacttggacactcatgttcatcatatccagtcaacgaaaccggagtaccgtctttttgcctcggataatttattgtaaatttacctttatttacagtaccacgatattgattacttccaatttttgcgataacatacgtagaattatccggagcccaatcagatattttttttggataacaactcataaaacgagtatcaccccatggtagtttacaggcttctatggtagctgtcctcaattcttgaacactgccatcttctgcttccagccacaattcgactttctgtccaactggttgaactggatatttaatcagtggcttatcccttttatactctctgccaaatacagaataataatctactccgttaactcttgcgtgcaatcgaacatcattatcaatttcgtaagctgaaatagaatccctgctgaacatcataccaccaatagacaactttctgtttgttattgtatactctcttgtctcctgacaatagccgtctccccaggtaacctgtattttgtttcctatattctgtgcaggataatccacttgaagtgttccatctccattaactttccctatatatatatctttaattccgacatctgcagaaatattatttattgtgcctttgaagctttcttttacggtaaattgctttggacttgcctgtccatcgtatgtagatatgacatgcttgcctacgtaatctgtagctgttgtagtctttcttttatcagctgtctcaagatatgcagtgacttttacacctggtgcgtaacctttatcaaaggttatctcaaagtcttgagattgacttgtaatatctagtttcttagtaaatgtatctgctccagctgtaatatgggctgtaacagcctgtttctcatccacttttgaaacagaaatctttaaatccgtatgtccgctgatatccaattccaatccccagtttaaatctgccgctgcacttacctcaggcatctgataaacgtttcctgaaagtatgattgctgcggtcaaaatgacgcaaagcattttctttaaaatatgtttcataattctctctccctcctgagcatgtaaatttgttactcctcattgtagtttcattataccatttctgctgtataataccagagatccggccctgcaaaagaacaaaaataatggatatattctgaagctgtgactttcactccaatgtctgctacaatattcaaagaaagaggcaataccaacatctcagaaaaggagagtattgtgcaggaactgatcacgctaaataatatcacgcaccagtatcaaaatgagaccattttacaagacttaaacctgacagtctctgaacatcagtccatcgcttttaccggacataacggctgcggaaaaagtacgctgttaaagatcattgccgggttgatccgctctacacagggcagtatccgatattatcgagatcctctgtttcattatgtacctgagagatttccaaaaatgaatctcaccgcacgccagtatttaagccgcatgggaaagctggacagcctcgatgccggagaggtctgcagacagatcaagaaattaagcgaagatttttttctctccgagatgctggatcttcccatgaaacacttgtcaaaggggactctacagaaagtatccgtgattcaggctcttatgaaaagaccggatgtgctgctcctggacgagccgctgtcaggccaagatacggattctcagaatgtatttatagaaaagctcaacgaactgcgaagacagggtacagtacttatcatgtcctgccatgagcagtatctaatggacagtatttctgacacggtatataaaatagataacacgcagttgttccgtctggacgataagaaaagttccggcggcagacattatatcttatggtttgagaggggcatagaaagcaggctgcccgaaagttgttccggccggatgaccatctgcggtgacaggtataagatggaagttcaggagaatgaaagcaaccagctgattgcctgtatgatacaggaaggatggttattgagggggatggaagatgcagatcatcagtgaattgataaaatatcattggcagcagtatctaaagacaaacaaatttgtcatgccctttgccgccctcatcatcatgctttatactatatattcctcaaaaccagtgggagtggtggacagtctcaccagctcctgcctgtttgtattcctgatcgcttcatggattggtatctctgcctgtgcccttgaggatccagcctctgaacaggtcatcatcttaaagataaaaagccataaaaaatattattttaaccatactcttttcttggtgagcttaagcgcagtcactgcattaatctccactgtagttccaatcttgatcaatctgtcaaacggcggccggctgtttaacagatctctgttgttttcagacattatctccggattcctgctgctatttttatcctcctttttaggatgcactctaggagaattgtctcatccaagaatgattcaagaccggaaatcggccctattgatcatcttttttattgacattgtctctgtcataaagacagcactgttaacaagctttccaatcttaaaactgattctttggatcgtgccgccgatttcactggtccctacagccttcactaactccaagtattttatgtggaagacaacagctttggccagcgctgttttaattctatatagctgcatactggcattcttaaagatcatgctcctttcaaagagaaagttttaaaatgaaaaactacaaatccaaaaagaaatcccagatggtttatccgggatttctttcatattcaaatatttacttattgatctctatgtgaagattattcttatcgcagactgcgatcactcccatgagtgacttggcgtcaatgcatgtatgttcatttaccagtcttaccgggtacctgctcttttccatctggcatacaaattttataatttcattcagactgctaaaatgtatttttgtttgatccactatcatcacctgctttcatccattgatgaaattcttcccacaaactgtatatttcatacatcagacaggctatttttctcttaccctgaaaaaaagtttatttatatgaaacagtccatacccaagcaggagaaaaatgacagtaagaatgagaacaaacattatacagtacacatatccgcgtttttctacatccagaaaaaaataaatataatttccggtaacccgtccaaagaagcccgcaaacactagatacgcggcaggcatgatgagaatgctcaatacacttttaccttttagaatctcattcatatcacaaaacacaaaaaaataaactgccatgaatagcggattgagcagatgtagaaatagaaatgtgccctgaaaatcaaattcaccggtaaaagctgtacacacaaaaaggaccagaactaagagcatcgtgacatctaaaaataaaatttccgggacttttcttttacagcacagggcggcggcagtccctaaaagaaaaagtcccgacaaaaaattacttaggaatgtcagttcatatagatgatctaatcttccacgataactatacaaagcagtagtaagaaacaaaattgacagtactgacgtcagagttagctgaagcctttttctcatcataaacgattgcccttaactatgattcattattctaattatatagactatttttttgattatgacattttcactccgctcatatttcttttccaagtacgaccaaggtagtaacccctcccataatgaatcccatccccaaaagatcgtatactccaaaactttgtccaagcagacagaaagaaagcactgccgccgttaaagactcaacactggaatacatactggccttgactggccctatatatgtaacaccccgcagataacagctaaagggtatgaccgttccataaaccacaatacccaggaccataaacactgtttgtccatctcatattcccggtatatcccacagatgtgcgaaagccgccagaatcaatcctcccgtcagcatgccccatccgatgacctcaagaagtccgaatctgccaagcagctttttgggctgcagattatataccgataaaaaaacagcagacgcaattccaaaaaacattgcttccttggggatcaaaagagtataaatggaaccatgtgatgctaagaggaagactcctaagattaccagaaacaatacaatcaattctgtaagctgaggctttcttttttctgctgccagacagaacagtaaaataaataccggggccaggtaatgcagtaccgtagcaattcccggattggaatattgatttccccgaaactccggacagcccccagcacagaccggaaaacacaacaagaaaagttcctttcatattcttattcattttccttagtcccgcatgtcaaaaaccagctgagtgcccttctgatgctctcatcccagaaaatccagtcgtgtccgccgttccactcttcataagtataggggatctcaagacttcttaactgttttataaactcctggctctggggatatatatcatcctgaagcccacaggaaatgtacagcctggggatctgacgttttttctcttttaacttccgtaaaacggtggaaagatcattttctgagtccaatatcttttctactggaccgaatactttcttatataactctgtatattgcggataatcattgtattccatgcgaatatccagagcgccggagaagctggctcccgcacaaaagcgctcgggaaagtttaacgccagcttcatgctgccgaagccgcccatggacagtccagccacatagttgtcttcccgtttgtctgatatcaaaggaaaataggatttcatgagtcccggaagctcttctccgatataatcccagtatctttttccctgaacattgtttgtataatagcccttctccccttccggcatgataacaatccagtccccctcctttgcgtaccgttcaataggggttctcctgacccactttgtatgatcatctccaagaccatgaagcagatacaatgttttcagttttctttttccttttatatccctgtgttccgggatcaccacataagcaccaacctcctctttcaagatatcagagtaaaattcacaatgaatcagagccatctgtatcacctcctaatataatcgttctcaatccaaaccaaaatacatccttactatctgcggaagttccttcttaacatagcgggaaaactcttcttgctcctctacttctgatccggcatccggaagaaccactgccatctggcagccctgtgcaatccattctataggaattctccgcatccattttgtgtgatcgcactgtacccccggcaaaagatacagtacttgataattcctttccactctgtctttggcctctccctcgccgggttctggcagggccacataaaaagatgtatttctgtcaagctcttttgaaaagatatggcattgaaacaatcccataatgaatccccctgttcttaaaacaatccgatcacagaaccggcaattccgattgcaataatcaaaagtacaattttagcagtactgacctgtttttttcggattagataatatactccaaagacgatcaagagcggcagaaagccgggcacgatcccatccagcgtatcctttaaaacaaactttccaatttttaaagctggttctgccgtgacaagacttgatgacagaacccccatcataaacatacccaggatatttgcaccatccaatatttcatttaagagacccgacttcataatctgtgcaaaggaccttcttcctgtgctgtatcctaaacaaaacagcatgtaagccacgatctcacagcctaccacaagccccagcagcactgctgctgcgctcaacgctcccctggccgccaaggcccctgcaaatgcggttcccagggtccatgccgtcccccagtgaatggtgtctccaatagcggcaactggtcccatggtaccggtcttaaaactggtaatcaattcgtccggaatcttattcgaattttctgctttctcttcttccagagcgatggagggaccaaaaataagatttccaaacatcaattctgtgttaaaaaactgcagatgccgttgaagtgccgcggcaaggtcctgctttttcgtatagatttttttcagcgcaggcaccattgcattgcaccatccgatggcctgcattctttcaaaatttaagcttgtctcaccccagagactcagcctccggtaacacttatttaaatccttcttcgtcagtacactttctttttcctgaatcttcgttttcttttgttcactcatggtcatccgcctccattcctgcctctcttttcagaaggacaatgataaacgccaggcatccgccgaaaattcccagcacaaggttactccatcccgtcatctgcagggcaaaaaaaccaagaatcataaacacgatgtattttggttttccgatcatatgcatgatcagcgcaaatcccaatgcaggaagcattccaccggcgacctctagtccatgcatcactacctccggaatatattttagaatgacatccaccaccgacgttccaaataacactacgataaacacgggcagaaacgccacaagaagatttaacagtccgggatagatcactgcacatctgtatattcctcttgtatctgcttctttcgcataccggtctgctgaatgtgcaaacctgatagcaatggttttcctcaagttgatcaaaaacactcccaatagtcccacaggaactgccagtgtaaccgcaactgacggcttcatacccgtcatcagcgcaataggtgctacacaggcccctgcgatggcactgtccgccgggaagttgccgcccggtgcgataacccccacatagatcagctgaatggttccacctatgatcaaaccctcgattggttttcctaaaatcagccctgccagcaatccgctggtaattggagattcaaaaatcgtatatccagtgttgtatccaatctccatcttatgaagccagttgcacagccccatcactgccgccaataaaaataactgcatatcttttcctcctatctcagtttctctttcgctttttgcatcgttactgctgtttcctcaggaatgctcttaaaaatgatctcagataccgtctggttgatattttccagctctgtaaattcttttttgttcagataaatgccatctgagataaactgtctttctccctctcccgggacacctcccaccacgaggaaatcaaacttcacaccgctctccacagcctttgcgcaggcttccacgtttttaaagagcaaaaatacagatgcattgatctgttctaagatttcagccgcaccctcttgggaaacaactttaaatttcacacctttggggacggccattttataaatttcgatcataaaatcatcgttccttaaggcgtcatctactaccacaatcatatctactggataatatttgatccattttgtgataacttgtccgtgaatcagccggaagtcaattctggctacttttatatctgccatatttctctcctttataccttatttgtaatccgtattccgctggatgccgcttcaaaacagcggtctgcaagttcctccaaagtcagtccatcctccgcagacatcaaaaactctatcatcatcggtagatttaaccctgtcagacagaatagatgatgtctgcgcgcagccagagtagacaggttagacggggtaccccctaagatgtccgtaaagatcatgactccgtcaccctcctctgctttttcaatgctgctttgtatctcctcgtaaaaattatcagcgttgtcgttcttttccagacagagggttataatattcctatattcacccgcaatcaaagaaacacttctcatcaacgacctgctcaagtccccgtgggtagcaatgattaatccgaccacacctacacctcctctcattgttttgatcgttttctttatacgaaatttaatagcaaataccgtgccaagtgtctctgcccccctaaaaccatatttatctttgacacatgacgggatctttctttgacacattgcatatatctccaaaaaaagtttgacacatgcaaaaaaggctgaacttgatatgcaccaagttcagtcttttttactctctctttattttccaaagtctttgatcttgctctcgatcaaattatagatcagccgtatttctctcatgttgactgatacatgatatctcttctcaatggatgacaggcacttcttcgacatctcacagaactcttgatgtgtcctggcaaactcaccgaatgtgtgtaacggctcctgatttttctgctgcataaggcgttccaccataataccgatatgcatatacagaatatgctttaaatccggcgtgaactttaattttagttccagttccatttgatggatcgcatatcctacatcatctatgataatttcaggatttaagatggtcagttgactcataatgttacgcaggctgaagcttttgatgatattttcaatcatcgtgttgattctcttttctgaatagattgttttcagtacatgatttaatgtttcatatcctttttggtccactaattcattcagcagcaatacttccatatcttctaattccaattcattggtagagatgatcagggatacgttatacagatcaaatacatcgtcaccactccccctttgtgccagtttttcgtagtcatactccagaataagaatcttgtcatcgtcaaaacaggttctcagcatgtcacaaatcttatctgcaacctccaaccccttcatacagcagactaagatggcgttttgcttttctttttttctaataaagtgataggtcgttgaattatatcgcacggttgtttttagaattgcctctatgtcccgtttctgcagcaattcatttcccacgtccagcgccatctgcgttgtcacgttgttgataatccctaaatttccttccacaagatcactgatatcatctgtgatgctcagaaccgaacccatatccacaagtataagtaccccggaggatgtgttgactttttttaaataggaccggagtctctccactatctgcttttttgacgtgtcataaggcatatcaaaggcgtcaaatatatagcttgaatatacttggtttacaaggcttgcgatgctggatgctgtggaatatccgtgtgtgatgataatggcattatataaatatttttcttcatccatctggcagtggaaaaacaggattaaaaacagcttcagcagctcctcgttggcattgtaatccatagtctcatttaccattctgtaaaataactccgccattttggactgccggaacagcttttttgccagtttcgatttcatttccgtcaggtagtcctttttatcctctctgagaaacgtgctgtttctgctcagaagaaccaacacctttgtcagaacaatcactgcagtgcccgtatattcaaacccatagttgctctgcatgaatttaaagatattttccacatgctctttataaacaatttccaccgatgaagactctatgtcatatacaatatggtccataataccttctatcagtttcttattctgcttgctgaacctgtcatatgtaatactattttttgtatatttctttataaggcggatcatagaatccatctgcagaatctctccgatagagtccaaagaacggatcataatgtcctccgagtctttgttgacaaagatccattgggaggtactgctgttttttatagaattataatccacagaatactggacatttaagtcctgcatcgtcacctcaatgtaatcctgatgtttctcctgtctgttctgggcattggcacagctgatcttgattatatttttcagggatccgatattcccttttcctttaaaggttaacagattatttatcacattactgctgattttaaaattacagtccaggatgtgtgcttcctgttcaaatagattttgtatgatcttcatccgttcattgctgcttctctcactgtaggatggtatggtaacagtaagcgggattctcctgataaaggtttccaacaaaacattatcaatattttccgtggtggcaaaaatcagcttgacatttaactctttttcatctgctccatcccccaggggcgtgatccttcctgtatcaatataacggaacagcttttcctggccctctggaggcagcctgtgcacttcatccaagagcagataaccctgatccgctttttccagaagccctgcaaagtctttattagccccggtaaatgctcctcttttgtatccaaataaaacagatgataacagctctttattgtttgcgtaatctgcacagttcagaacaacaaacggtgcttcctccgatatgatcttctgccgcctggcatacagataaatcttctccgcaagcatactttttcctaccccgctgggccccagcagcatgattggaagtccccgtcccggataagcagcagaaattttgcacttattcagcacctgctccatgtcataagaaagctccgagatctctttaaatacgtcatcttcaacttgctcatctttcttatcaatcctgtcttggtctgtctctccctcgtataaagtaaacagtacaggctttgtcttctttttggtcagaaagtgctctctttccagttcatttaaaatagcgcttgctgcattccgtttcatccccacagcctctgccacggtaccggcgccgattcctaagtgtccgtcaatctcgagaaaatattgttttattttatctttgttcgttatcctggccattgacacatcctccaaaagcattgacacatttttatctcaagtatattatacctcttaagcctggctgtgtaattgtttatatgtgtcaaaaaaagcagaacaaatgaatgctctgctttttgctatctgctgtctcacagttttgaagaaagaaacttctataattcttcgccgtttgttttgatcaccctctgataccagtaaaaggacttcttgtttgatcttcacggcctctttcatggcatggatgtgttctcttcactccccctctctctggttatattcttcatccagcaaaagctccgataccttttccatatgattggtatcttaatcagctcatcgctcatgagcagcacatacacaaccggtacgctaaagtggaaaataattgctgcagtggctcctaacagcagagaaaatccccacatagatactgtgtctacgatcaaaccaaacctggtatctccgccggagcgaaaaatccctacaatcaaagtttcatcaaatgtctgggcaaccgcataataagccatcacaaacatcatacaacgcaaataatcctttgttaacggtgacatatttaacacggacagaatcatccgggaagacaatagtataatcacagcgctgcagatccccagaagaatactcagttttacaaaacggtccgcataaaccctggcatgtttatattttttctctccaagaatcttcccaaggtaaatggccgcggcgttggatattccaaatccaacaaccatagacatttccttggtaacctgagctactgagtttgccgctaccgccgcacttcccatatgtccgagaatcgctgtgcttgcagagttggctgctccccacaaaacttcatttaaaataacagggattgcatacataagaaaatcttttaataatctgcggtcaatatgtattaaataagtcatacgaaaaagaatttccctgttaaataattttgcgtatccaatgacaaggatcaattccaggattcttgccagaagggtcgccaatgccgctccctgaatccctatcacaggacatccaaacattccaaatataaaaatggcattcaatattatattgcagatcagagaactcaaatatacaaaagtagcaacctgaatgcgctccacactccgcataatatacaagtacacctgggtcattccagtgactgtataggaaaacgccacaatccgcagatacttcgtaccttgtctgaccacctctgtttcattggtaaatatccttatcaatgactccggtatcaagagggatgccaatgtaaaaacaagtgtcactgtaactgccaggcgcatccccatagcaagtatcctctcgatcgtctttgtatcaccttttccccaatattgagctgtaagaatcgttgcgccggatgttaaaccgaacaaaaatagtgacatgatatactgcacctgtctggctaaagatgctcccgacaaggcagtctctcctacttttccaagcataaacacatcacatgcgctgacaccggtattgatcaaattctgcatggccatcggaaggacaagggcaatgactcctttgtagaagcttttccagttcaattccggtgttttgtttttcccttttgacttataattctctcttacaattctatcaccgtctttgcaatttaaattttgttctaatgatttcttgtacttgaaacatatcgggggcaatgtgatctgccatctgccaggtaaacccaaacctttcatctttatatgcgatcacataagctcctgcattttttgccgcagatattccataatccgaatcctcaacaacaatacatcttccgggtttcacattcagccatttcatcgtctccatataaatctccgggttcggtttgctctccagaaacatttctccgcttaagatcaccggaaagtacttccttaatttgatttcatcgagaacctccagaatttcttccatagaactggaagaagccaatgcagtcttaatatgatgtttagtcaaaagttccaacagctccttaactccgggattcaaaatctccctgtaagaaagctcatatccttcttcctcctcgcagtaagtttcccatagacttctgcccttttctctgccgaaccactccatcatcatttgaagactctgggcatttgacaagccgacaatttttttcaactctttttccggaatcatacatcccttttccatcagcagttctttcagccagttataatagacgatctcgctgtcgatgatgactccgtccatatcaaaaatcactgcttcatacatgatgtttacccgaggaaaccaaagaatgcacctacgactccaagggccatcaataacagcatcatgacaatcggattacatttatccttcttaaaaatgtaataaataacaccgaacaatgccaatggaagaattcccggcataattccatctaaaattgactgtactgttgtggcatcctttcctattccgaatttaatcggaatcgacaaatacacattttctgcggtcatggcaccggcaacagtgagtccgaggatactggctgcctgcatgactttatccatgattccggatttctctaatttatccatggcctccacgcccagtttatatcctaaaaatgtcaatggatagcgcagtccaaagttcggtatattaaaaatcagccagaacaggattggacccagaatgtttcctttcatagccagagaaacaccgatccccattgcgataatccggagagttccgtgatacattgcatctccgattcctgacagcggccccataaaggctgtctttacggcggaaatagatgtggtatcaaaatccgggtctgccgcatttttttcttccatagctgccgtaattccaagaggcagcgtggaaatgtacatggttacattgtataattccatatgccgctgcaacgctttgatgtagtcctctttgtttgggtataattttttaagaatcggcaatatggcaaaacaataaccagagtgcatcatacgttcatagttccatgaatgctccattggaatggaacgaagccagactttcctcagatcactttttgtaatttttccattatagtcggcatgtatgttaaaactcatcgaaatcgcctccttccgtttcatcagcgacagccggcatccggcctgatccgaacaagccagtgctggacattccaaacagcgccgccaggatcaaaattgcaaataaagcaacacctgttgtagatacccccgaatatgcgacgataaaataaccgataaagaaaaacggagcgatgctctttttcataatcatctgtgccagaagggcaaatcccatcgccggcagaagcccgcctgcaatctccatacctgtctgtacgaattccggaactaatttcatcagtgtggtaatcttgtctgatccgagataaaaagcaatcggtacaatcggtgttgtcactccccatgccacaaaaccgcttaatataaagtttctctgaaaggctctgtcatttccgtcggcaatatttttgtccatcaaatgggcaaaaaagttcaggattggataacctgtcacattgctgatagctaatacgatgctggccaccggtagtccaagagtcagtgccatctctggtcccgctcctgcctttatggcaagcgccacgccgaggattgttccgctgaccatgtccggcgggtcatatgctccgattgatgctgctccggcaaacgccagttccagcgtcgcccccatgataatacctgcctgcagatcgcccatgatcagccctacaaaaggtccgatcacaataggtctctgaatcatacaggttcccagaaaccattcaaagtttgtacaaaaccccaggattcccagaagtattgcctgtactcctgtactcatagctgctcctccttttcatcacattaaagatggatcttctgctccgccttttccggcactccctgctggtaaacatgcacaccatcctcaatcaattcctttaacatttgttcttcttcctgatttacatagacaaccggcgccagacactttttatcttcccccggcatggtacctccgagattgagttccttaattccaagctcttttaccagtcggaaagccccttctatattttcacagacaataaataactggtatttatctgtaattccacttttaatcgctttgatactttcttcgattgtttttaccaccaccttaactcccggcggttttgccaatttcacagaggtgacacggacagggtcatcctgaagtgtgtctgtgacaagcaaaatacagtctgcactcagctttgaggtccaggaaaatgccacctgtccatgcagaagacgataatctactcttacctttttaatcatttgtatatgctcctttctcaactaaaaatcgccaagatcatccatactggctgaaacttgtatgtcattgcaatattggattccgtcttttgccgcctgaatgccctgcctgatcaacagttccgtgttcttctcctccgataagatcaactgtactgcaagaggaaggttcataccgcacactaaatgaatattcggccggtccagaaacttcatcatatcattgttgacgctccctcccataatatctgtaagtatgataatgtcatctttcaaaggatattcagcaagctttgcctgaagcttctttaaatacaactcctctccttccatataagcgttaaaataaggtattttgtttcccaaaacaaattcaatggcagatgcaattccctcagaaatacgggaatgtcctgtcaaaatgatgtgccgcaccgtatcagctcctttccctagaatggtagatcctcttcataatcgcctgttttacaatgtattttttcttcatactttgcatataacgggtgttccgttgtaatgtttctactctttgcagtccaataagccagatactgaaaaaacgcggtcaaatacaatggcgaaacagtttcatccatcctgtcctctttcttaaaatctgctttcactaaaaaggtcttgttcgtaatttctctggcagcacagcagatttcctctgtccgttttcctgccctgtcccccgcactcacaaaaaacaatgtgtattccggtgtcagctgaaggtccggcccatgaataaactcctccgcttcaaaggacgccgtaggtatatgtaccatctccgagagcttgagggaaccttcttttacggttcccatatttgctccacagccgataaaaaatgcatgtttcattgacagtagctgttctttgttttctatacaaaattcctttgccttcaaataaatacgcttgtgctccttacatgcctttttaagctctctgatcgctttttcatatacttctttgtccagctccccgagagatagctccagggataccagcataaggaaacaagtcagtgtgctcatacctttcgttacatatccaacacgctcttctcccgcaccgtattccacaaaacagtcggaaagctctgccacagccgattttgcttttccgagcaccgccattgtccgatgcccttccttctggtatttttcaatcgcctttaccacatttgtactgcttccgctttgtgaaataaataaataaatattattttcctgcggttcttcatagtaagtaaaagtaaaaggtgtcatcaaacgaaccggatttttcatataccttttcataaatgccaaagcgctgaatgccgcattataagatgacccggatgccacaataacaagtgtcttcccctgtctgatcccttccttttcaagccattctatcaggtcttttgtcaattcttttctctgttctatgtttcggaccattacagacgaggtttcctgtatatagtcttccatccgtttgcccactgcccgtactcctttctgtaaaaagttttaccgcaattatttagtaatccatcactctgtaatatcttctgatgtcaagggaatgtcctgtagcatcttccagatgtgcagtcagtcttccaagataagcttccaggaaagcaggtgagaaatctcctctgtatttttgagaaattccttttgcttcataatctttggtgtcaatcacctttacttttttggagatcttctttgcaaaattctctacacgttctgtcagcattcttgtctcatcttctcctttaaatatcatgatgctggtatcctcctccagcagttccagtgttccgtggaaaaattccggtgattgaatagattttgtacggatccactgcatttcctcaagataacacatggcaaagcagtaagttgatccccataggtttccggatccaaccagcatatggtatgtttcatctttgatctggtacgcatatgccttggcttcttcatctactttttcttttatatccgccaatgcttccggtaacttttcgaggttctcaataaattcatcgtaatcttccatatctccatttttatgtaatacagcgctgacaatcaaaaacaatttcatatggtctccatcacatgaaagttcatcacccgcaccgcacacgattggatacgtcaagaggtcttgtaacggtgcctcttcatttccactcactccaatcgtagggattcctctctctttacagtattttgctgcagcgatcgcttcctttgtggtaccggattcactataaaggactaccagtgattttttagtgaccgctttattaatacccagcacaaattctgccgcattctccatgtagattggcatagccgttcttttttttgcaaaatactccattggcatcatgatggaaatactccctccgacacctgccatgaccagattatctacccctttttcaaatgcatcatcaatatatttttcaatctgaggttttaacctcataatctctctaaagttatttaagtatgtttctctgtcataatttttgtaagccatttttattctcctttcaattccatcgtcactttgatataccacgtatacgtcttggtgcttttagcataccatatccgttcgcacctgtcaatactcctacttacaccggttatatctcttatatatttatgcattttgcacaattttttcgatttttttgttgttttctaaaatctaattatttgatacttccccatacctcttgacattttattgcaactggtatattcttttcatataccagataagcagaccagttgttgaaattactctttttttgtagttttaatatactaaaacaaataccacttatttttctttatttaataatcgtggagaattaagaataccagtgaagattgacaggaggggcgaaatgccgaaaaaacatcccgtttatttacagcttgcagatttgattgaaagaaaaattaataaaaatgaatatcctctcggaagtaaaattccttcagagagagaattaattgacacttttggcatcagccgtatgactgtccgcaaagcgatcgaagtcttaattgagaagggtcttttaacaagggtccacggaaagggtacctatgtaagccaggccactgtgcgttcccctcttgacagtattcagtccatggggaagtttatccaggactcaggactgctgccgtccaacaaagttttgctgacaaaaaaagaaaaagccggagtaaaatactccaggatttttcatttaagtcctgatgatgatatttttctgctctttaggctgcggctggcaaacggaaaaccttttgctttggaatacacctatacaccatatgacattgtccccaatctggacagctatgactttgagcagtgctcgttttatgaccttctggagacaaaccatatcagcccgtcacatgatacacagcgtcttgaaattgtgagagttctaaatcctcaggcctctttattaaatctggaagaaggctctgctgtgttcatgctccacaatactgtcagagattcttccggaaggacgattgaatatacacgatcctattatagtgaacggaccattacctttacatctactttaacttaaggagatcacatgagtaaatatattaaccttttgagtgaggaagtaaaagaaaaaatagaagcgtatattattgaaaatgagttaaaaccttatgatcccctgccctctgagcgtaagttggcagaaacctttaacgtaaatcgtctgacgattcgttctgcgttaaaaaggctgcgttatgagcaccatatcttcactcagcacggaagaggcaatttcattgctcccccgaagattgacgatgatacagaaaagttttgctcctttaccgatgggtggagcgcagatggatttaggacttccagcaaagttatttcctttgacaagaaggaggcttctttgtctgtcagcagccatctggggattgccctgggtgaaaaggtttactgcctgggacgagtgcgctatctggaagatgaacctttcctattggaaacctcgttcattcctgaaaagtactgtcctggtctggagcagtacaattttgctgttcaatctctatatgatactctcattcatgtttatgatttgaatttaaaacggattgatgaaacgatcacgatcacttccctgacaaatgaggaaagccgctatttaaatgcagaagaaaacgatattggattctgcattaaatccactgcatacgatgaggaaaaagtgatagaatattgtattaccatcaatcgggcagaccgatatatgatggtcagtacattgggaaatgataaggatcaactcatagcagatacttatcaatagccctgcctacgccttcatggtcacaatctgctgtttcaatgcggcaggccttttttacatcagcctctgcattctccatggcaaccgctaatccggcaccggtccgtgaaagaaccatggtccatcttggcatataccaagatatcttttgaagaaatataattcatagtatattgaactgtatcagtgtggataaacctttcagcaatcattttatctcttttcctgtcatatatacaggagccatttgcaaagatcacataacgtagatctggatttcacagttgaaatgtgttgattatagaaattaatttctaaccatagaaataaccagaaaggcagaaattaagcacaaaaaaggaacccaaccggtttcattttatcaaggcttaaaagctctgaataaaaaccgagagattccataaaaataataaggtatttgtttctataaatcttttgttttatacacgctgtatccttcatagtaatagctataatcaatccccttcatatacatttctctgtcatttattttatctgttaatgcttgttttaaaaggacttttatttctatctcttttatggggcttctttccatagcaagcaggtaatcatctttgtcaaccgcactccaatctatgacttgacccaatttattttttaacatgagatcaagccaaattcgcatgctgcgcccatttccctcccgaaatggatgggctatattcatctcaacatacttttcaataatctcatcaaaagtcccttgtggcattttttctatactttttaatgcgtcttttaaatacatgatcggcgcaaatctaaaattaccttttgccaagttcactttacggagttttccagcaaaatcataaatatctccgaacaaatacttatgaatttgttcaagagcatcatatgatcctgcattcaagtgatccaaaaagcaagactcaaacatttctacagcctttttcttacttattttttcttctgcccttgcaagttctgcagaatctgtaatacctaatttattttcaagtatcatctaaaaactcctttgctaaatgtaaataaatccggaaaaccaaacatggtttcccggattttattaatcgtatattacaatacagatctagaattactcgatgattgtagcaactcttcctgatccaactgtacgtccaccttcacggatagcgaaagataatccctgagccatagcgattgggtgaatcagttcgattgtcatttctacgttgtcaccaggcatgcacatttcaacaccttctggtaattcaacaacacctgttacgtcagttgttctgaagtagaactgaggacggtatttgttgaagaaaggagtatgacgtccaccttcatcttttgttaaaacgtatacctgagctgtaaactttgtgtggcatgtgatagaacctggtttacaaagaacctgtcctctttcgatttcttctctctgaacaccacggagaagagcaccgatgttatcaccagcctgagcttcgtcaagaagtttacggaacatctcgataccagttacgacaacttttcttgtctcttctttgataccaacgatttcaacttcttcagatacgtgaagaacaccactttcaactctaccagttgcaacagtaccacgtcctgtgatagagaatacatcctctactggcataaggaaaggtttgtctgtgtcacgctgtgggtctggaatccagctgtcaactgcagccataagttccatgatcttgtctccccactcgctgttaggatcttcaagagcttttaaggcagatccctggatgatcggtgtatcgtcacctgggaattcgtactcgcttaataactcacggatttccatctctactaattctaataattcttcatcgtctaccatgtcacatttgttcatgaatactacgatgtaaggtacacctacctgacgagaaagtaagatatgctcttttgtctgagccataacaccgtcagttgcagctactactaagatagctccgtccatctgagcagcaccagtgatcatgttctttacataatcggcatggcctgggcagtctacgtgagcgtagtggcggttgtctgtttcatattctacgtgagctgtggagatagtgattccacgttctctttcttccggagctttatcgatgttttcgaaatcaacggctgcgtttccttctactctggcacttaatgtctttgtgatcgcagctgttaaagtagttttaccatgatcgacgtgaccaatggtaccaatgttacaatgaggtttggttctctcaaacttttctttagccattttaaatgtcctccttattagccctttgggcaaatagataaattattatttactaccgggtcgacgattcaccttaccaaaggccgtcctacccttgattatatttcatttctttgaagaattcaagcaaatttttaatgaaaaaaacctgcttattttgttttgtcagcgatgattttttcctgtacactcttcggtaccggctcgtagctgttgaagaacatagagtagtttccacggccctgtgttctggaacgtaagtctgttgagtatccgaacatttccgcaagaggaacgaaagctctgatgatctttccgcctccaacatcgtccataccctcgatacgtccacggcgtgagttgatatcaccgataacatctcccatgtaatcttcaggagttgtaacttcgactctcatgatcggctctaagatgatagctccggctttctgcattgcttctttaaatgccatagaaccggcgatcttaaaggccatctctgaggaatcgacatcatggtaagatccatcgtatacagtagctttcacaccaagtaccgggaatcctccaaggataccgcactgagcagcttcctcgataccagctccgactgccgggatatattccttcggaatgttaccgccgacaacagtggattcaaacttgaacagttcttcaccattggcatccattggctcaaagtgtactttacagtgtccgtactgtccacgtccaccagactgttttgcatatttgctgtccacatccacttcttttgtgaaggactctttgtatgcaacctgtggagcacctacattagcttctactttaaactcacggagcagacggtctacgataatctccaggtgaagctcacccattccggagatgatggtctgtcctgtctcttcatctgtatgagctctgaaagtcggatcttcttctgcaagttttgcaagagcttctgacatcttgccctggctcgcttttgtcttaggctcgatcgcaacgtcgataaccggctctgggaattccatagattccaggattactggactcttctcatcacagatcgtatcacctgttgctgtgaacttaaatccaacagccgcagcaatgtcacctgagtatactttatctaactcttcacgcttgttggcatgcatctgaaggatacgtccaacacgctcttttttctgttttgttgcatttaatacgtaggaacctgaattcattgttccggaataaacacggaagaaagcaagctttccaacgaatgggtctgtcatgatcttaaatgccagcgctgagaaaggttcttcatctgaagaatgtctcacgacttcatttccgtcttcatccacacccttgattgcctcgatatctgtcggtgcaggcatgaactcaagaactgcgtccagtaacttctgaacacccttgttgcggtaagcagtaccacagcagatcggaaccgcactacattcacatgttccttttcttaatgctgcttttaatgcttctatagatggctcttccccttccaggtattccatcatcagatcgtcatctaactcacagatctgttctactaactgagtgtgatacatctctgcatcatctttcatatcttcagggatatctgtgattgaaatatcttcacccttgtcatcgttgtagatgtaggctttcatttcaaacaggtcaatgataccctggaagtcatcttctttgccgattggcagctgaatcataactgcattggcaccaagacggtctttgatctgatctacggaaccgtagaagtctgcacctaagatgtccatcttgttgatgaatgccatccttggtacattgtaggtatctgcctgacgccatacgttctcagactgtggctctaccccaccctttgcatcaaatacaccgatcgcaccgtcaagtacacgcagtgaacgctctacttctacagtgaagtcaacgtgtcccggtgtatcaatgatgttgatacggtgttctaatgctccgtcttttggtttgcagttttcctggagagtccagtgacatgtagtcgctgcagaagtgatcgtgattcctctctcctgttcctgctccatccagtccatggtagcagtaccttcatgagtatcaccgatcttataatttacaccagtataatagaggatacgctctgtcaaagtggttttcccagcatcgatatgagccatgattccaatatttctggttctctctaatggatattctcttccagccaagatcttttcctcctattgtttttcggataaagcggtaggccccgcacaccagattagaatctgtagtgtgcgaatgctttgtttgcttctgccattttgtgcatgtcttcttttttctttacagatgctccagtgttgttggacgcatcaaagatttcgtttgcaagcctttcttccattgtcttttctcctcttttacgagagtataaagtcaaccaacggagtgcaagggcctgtcttctgtccggacgcacatcgatcggcacctggtaggtagctccaccgatacgtctagcctttacttccagcacaggcataatgttgttcattgcctcttcaaatacttcaagggcaggctttccagctttttcttcaatacggttaaatgcaccgtatacgatcttctgggcaactccttttttaccgtctaacatgatgttgttgatcaatttggtcacaactttgttattgtaaataggatccgccaaaacatctcttttcgcaatatgtcctttacgtggcacgtttcttccctccttaataattgccaacggcagaaattttataccgccggccttaattcatcggtactcattcatccttgcgcagctaccggctttccgccggccttcaagcgctcaatgcctgatcgtgccagaatttatatctatctcctgtactacagggaaaacattcatttccggcacaactatacaaggtagcgtaagacttacgctgctttgtaccaatttagtttcgtttgattatttcttcggtctcttagctccgtatttggaacgagcctgcattctgtttgcaacacctgctgtatcaagtgttccacgaacgatatggtaacgagtacctggtaagtccttaacacgaccaccacgaatcagaacaacactatgttcctgtaagttatgtccctcacctgggatatagcttgttacttcgataccgttagaaagacgtactctggcaatcttacgaagagcagagttaggctttttaggagtcgcagttttaacagctgtacaaacccctctcttctgaggagagctggtgtttacagatttcttctttaaagagttaaaacttttctgaagagctggtgctgtagacttcttagtagatgtctttctcccttttctaactaattggttaaaagttggcattaattttcacctccatgcatgttttctgctgtagttacttatgatctgttgttgcacatagatatctacgcgcattttttaattataaatgtgcaaaaatcgtttgtcaaggggatttccgaacattttataccacaaaccccgcccactgggaaaatccaggggcgggatctgttaaaaccctactcgaaatcgatttcgtcttcaagtgtcagttcttcttcttctgtgttgatcttaacattgcggtaccgtttcattccggttcctgcagggatcagttttccgaggataacattttcctttaatcctaccagcggatcgacctttcctttgatggccgcgtcggtgaggactttggttgtctcctggaaggatgctgcggataagaaggagtctgtggcaagagatgccttggtgataccaaggatgatctgttccgcctttgcagtctctaagtttctttcttccagctccctgtttgtcttttcaaattccagtacgtcgatcatggcacctggcagatactcgctgtcgccgccttcttcgatgcggacctttttaagcatctggcgcacgatgacctcgacgtgcttgtcgttgatatctacaccctgcagacggtatactctctgcacttcacggatcatatagtcctgaacggcgcggatacccttgatctttaagatatcatgcgggttgacggaaccttctgtcagctcgtctccggcttccacttcctggccttccatgactttcagtctggaaccgtaaggaatcagatacgccttcatatctccggtctctttgttggtgatgacaacttcacgtttcttcttcgtatccttgatctgcacttttcctgcaaactcagagatgatcgcaagacccttcggctttcttgcctcgaaaagctcttcgatacgaggaagaccctgtgtgatatcgtcaccggcaactcctccggcatggaacgtacgcatggtcagctgtgtaccaggctcaccgatggactgggcagcaatgattccgactgcttctcccacctgtacggcctgaccggtcgccatgttggagccgtaacacttggcacagcatcccacctgggactgacaggtcagcatagttctgatcttaaccttagtaagtccggcatcaatgacggtctttgctcttctcggtgtgatcatgtggtttgcctttacaagcacctctcctgtctcaggatgtttgatctcctcagcagcgtaacgtcctgtgatacggtcctgaagactttcaatgacttcctgtccgtccataaacgcttccacgtacatacccggaatctgtccgtccggatccagtccgcagtctgcttctctgatgatcagatcctgggacacgtctacgagacgtctcgtcaggtatcctgaatcggcagttctaagagccgtatcggaaagtccctttctcgcaccgtgggcggagataaagtactccaatacgtccagaccttcacggaagtttgacttgatcggcagttcgatggtacgtcctgacgtatcggccattagtccacgcattcctgccagctgcttgatctgctggttggaaccacgggctccggaatcggccatcatgaagatgttattgtatttatctaatcctgtaatcagcttgtcggtcagaacatcatcggcatcaaaccatgtcttgacaaccgccttgtaacgttcttcctcagtcatcagtccacgtttgaactgattgttaataaactctgactgatcctgtgcttttgccaggatttctttcttttcttccggcactgtcatgtcggagatggaaactgtcagggcaccccttgtggagtacttataaccgagtgccttgatatcatccagcacttccgcggtcttggtagcaccgtggatgttgatacatttgtcaagaatctgttttaactgtttctttcctacatggaaatcaatctccagattcagggcgttttccgggtcagagcggtctacaaatcccaggtcctgcatgatgatctcgttgaataagatccttcccagagtacattccacgactttagagattttatttccgttcttatcgacctttgtacgccttacattgatccttgcgtgcagtgtgatcgctttattctcgtaggcaagaaatgcctcattttctgacttaaagtacttgccttcacccttatctccctctttttccagagtcagatagtagattcccaggaccatatcctgagaaggaacggctaccggacctccgtcggaaggtttcagcaggttgttcggtgacaataaaaggaaacggcactctgcctgagcttccacagaaagcggaagatggacagccatctggtcaccgtcaaagtcggcgttgtaagcagtacataccaatggatgcagcttgatggccttaccttctacaaggatcggctcaaacgcctggataccaagtctatgcagagtcggtgcacggttcagcataaccggatgttccttgatgacatcctccagcacatcccacacttccggctggagtttttccaccatcttcttggcagactttatattatgggaaagtttcctttccaccagttctttcattacaaatggcttaaacaattcgattgccatctcttttggcagaccgcactggtaaatcttcagttccggcccgacaacgataacagaacgtcctgagtagtcaacacgttttccaagcaggttctgacggaaacgtccctgtttacctttcagcatatcagaaagggatttcaatgcacggttacctggtcctgtgaccggacgtccacggcggccgttgtcgatcagagcatccaccgcttcctggagcatacgtttttcgtttcttacgataatatccggagctccaagttccagaagacgtttcagacgattgttccggttgatgatccttctgtaaagatcattcaagtcagaagttgcaaaacgtcctccgtccagctgtaccattggacggatatcaggaggaatgaccggaacaacgtccaggatcatccattccgggttgttttcagagtttaagaaggcttccacgacttccaggcgttttacgatccttgcccttttctgtcctgtagctgtcttaaattcgtctttcagggattttgcctctgccggaagatcaatggcttccagcagttccttgatggattcagcacccatccccacacggaaggaagttccgtatttgtcgtaggcatccctgtattctttttctgtcagtacctgtttgtaagccaggtctgtctcccctgcatccagaacgatgtagcaggcgaaatacaatactttttcaaggctccttggagaaatatccaggatcagtcccatacggcttggaattcctttgaaataccaaatgtgggagaccggagccgccagttcgatgtgtcccatacgttcacggcgtacgttggcttttgttacctctacgccgcatcggtcacagacaacacctttatatctgatttttttatatttaccacaatgacattcccagtccttgctcggcccgaagatcttctcacagaaaagtccgtctttttcaggcttcaaggtacgatagttgatggtttcaggtttttttacttctcccctggaccactcacggatcttttccggggaagccaacccgatcttaattgcatcaaaggcaattttatgatttgcatattcgttgcttgatcctatcattaaggttgctccttccttctaactgcactcctatgaaatagtagtgtcttcgccatcttcaaagttcccctctttaaatcctaaagctcccagggaatcttcgctttcttcataattattaaatacgctgtccccttcgatcatcggcttcaggtcctgattgttttcagccaggtccacattttccttgatctctacttcctgcgcattttcatcgagtaccttgacgtctaacgccagggactggaactctttcaacagtaccttgaaggattccggaatacccggctcagggatattatcacctttgatgattgcctcgtatgtcttcactcgtccgatgacgtcatcggatttaacggtcaggatctcctgaagtgtataggatgccccataagcctccagagcccaaacctccatctctccgaaacgctgtcctccgaactgggctttacctcccagcggctgctgtgtaacaagagagtacggacctgtggaacgcgcgtgaatcttatcgtcaaccagatgatggagcttcagataatgcatgaatccgatggtaaccggactgtcaaactcttcgccggtacgtccgtctcttaatcttacttttccggtactgtcgatcggcacaccttcccaatcttttctgtgatccttatttgccttaaggtaatctatcacgcttgcgtcaacgcgttctgtccatttcgcttcgaaatcttcccagctggtattggcaaagtcgttagccatttccagtgtcgtcgcaatatcattctcatcggccccgttaaataccggagtcgcaacattaaatcctaatactttagccgcaagggataagtggatctccagcacctgcccaatgttcatacgtgacggcacacccaatgggttcagcacgatgtccagcggacgtccgttcggaagatacggcatatcttccaccggaagaatacgtgaaattacacccttgttaccgtgacgtccggccatcttatctcccacagagatctttctcttctgtgcaatgtagacgcggactgttttatttactccaggaggcagttcgtctccattttctcttgtaaagatctttgtatccataacgacaccgtaagctccgtgaggaactcttaaggaggtgtctctgacttctcttgccttctcaccgaagatggcacggagcagacgctcttctgctgtcagctctgtctctccctttggagttacttttccaaccaggatatctcctgcgcgcacttccgctccaatgcggatgataccgttctcatccaggtcttttaacacatcctcactaagacctgctagatctcttgtaatctcttcttgtccaagtttggtatcacgggcctctgcctcgtactcttcaatatgaacagaagtgtacacatcttcctgaaccagacgctcgcttaataggactgcatcctcatagttgtaaccttcccaggtcataaatccgatcagagggtttttaccgagagccatctctccgctcttagtggaggcaccgtctgccaggatgtcatcctttttgacgtgatccccttcaaagacgatcggacgctgattcatacagttcccctggttgctccttgcaaacttgatgacattgtagatatccttgccgccgtcggagtctctgcggactacgatcctggtgctggtagacttctctaccactccgtcattctttgcaacaatacaaacaccagagtcaaaagctgccttagattccatacctgttcctaccaccggcgcttctgtggaaagcagcggcacagcctgacgctgcatgttggaccccatgagggcacggttcgcatcgtcattttccaggaacgggatcatagaggtagctacagaaaataccatcttaggcgatacatccatcagatccaggtttgctttatcaaattctgaagtatcttcacggaaacgcccggttacatgggtgtggacgaaatgtccatcctcatcgagaggttcattggcctgtgccacgacgaagttatcctcttcatcagcagtaagatagacaacctcatcggtcgcaaccggattttccggatctgttttatccaatacacggtatggagcttcgataaatccatactcgttgatccttgcataggtagctaaggagttgatcagaccgatgttcggaccttccggggtctcgattggacacattcttccgtaatgggaataatgtacatcccggacctcgaatccggcacggtctcttgacaatccaccaggtcccaatgcagacaggcggcgcttatgcgtcagctcagacagtggattgttgtgatccatgaactgggagagctgggaacttccgaagaattccttcactgccgcagtcactggtttgatgttgatcagagactgaggtgtgatcgtctcaatatcctgggtcgtcatcctctcacgcacaactctttccagacgggaaagtccgatccggtactggttctgcaaaagttctccgaccgctctgatcctacggtttcctaagtggtcaatgtcatcatggtttccgatttcatactcaagatgcatattgtaattaatagaagctaaaatatcttcctttgtaatatgctttggaatcagatcatggatattctttttaattgcattctttaattcgtcgccgcttaaaccttctgccaggatcttctccagcacagggtaaaaaacgttctcatggatgccaagttcttccgggtcgaaatctacatattcgtccatgtttacggtcatattagatagtactttggtattgccgaattcggtctggatcaatacactctgcactgcggcattctggatctggtctgccagttccagtgtgacttccgtccctgcttccgcaagaatctctcctgtggaggtgtcaatgacatcttccgccagcatatgtcccgtgatacggtttctgaacgccagcttcttattgaacttatagcgtcctactttggcaaggtcataacgtctcggatcaaagaacatgctgttgatcaggctctctgcgctgtccacagacaaaggctcacccggacggatctttttatataactctaatagaccatcttcatagttatcagatggatctttttccatacttgcaaggatcttcggttcttctccaaataattccttgatttctgcattggtcccgataccaagagcacggatcaatacggtgatcggcaccttcctagtacggtccacacgcacattaaagacgtcgttggagtctgtctcgtactcgagccaagctccacgatttggtataactgtagcagagtacagtttcttaccgatcttatcatgggcaatcccatagtagataccaggagaacggaccagctggctgacaataacacgctcagctccgttgatcacgaaagttcccgtgtcagtcatcaaaggtaaatcgcccataaaaatgtcatgctgtttgatttcatccgtttccttattatgaagtcttactttcaccttcatcggagcggcatatgtggcatccctctccttacactcttcaatggaatatttaatatcatctctgcacagcttgaaatcgatgaattccaggctgagctgatcgctgtaatccccaatcggagaaatgtcctcaaatacctctttgagtccttcccccaggaaccagttgtaagagtccttttggatttcaataaggttcggtacttccaagacgtcatcttgtctcgcataactcatccttatgctcgtacccgatttcattggttgaattctgtttttttccatggacgtgttcacctcttgatttctacatggtttatatactacttattgtgcgaatctctcacaatttaaataacgaaaaaaaggcttggctatgggcatacaatcccatactaaagcatcgcctaataataccacagtgtccatcgcatgtcaagcgttaatttggacagacgcaaaaagaatcggactgacagagtcagccgattctttcatgaagttttcttacattagatattgaacaaagaactattttaaagttacttttgctccttcgccttctaacttagctttgatgtcttctgcttctgctttagatgcagcttctttgattactttaggagctccgtcaactaattctttcgcttcttttaatcctaaaccagttacttcacggacaactttgatgactttaaccttagctccgccgatttctgtaagctctacatcgaactcatctttttcttcagctgctgcaccgtctgctgctccgcctgctgctacaacaacacctgctgctgcagatacaccgaattcttcttcgcatgcttttactaattcatttaattctaatactgataaacctttaataacttcaataatttcctgagttgtcatttttatttcctcctgataattaatttaatgtaaaccgctgattattcagccgcttctgttgcttcttctgccggagcttctccgtctttctctgcgatctgtttaataacacgagcaaagtttgtaataggagactggatgcttccgaggaattttgcaagtaattcgtctcttgacgggatgcttgcgataacctgtacgccgtctttgtcgtagaaagttccttctacaactgcagatttcaggttgaatacttcgatcttctttgcgtattttgccaggatccttgccggtgctgttgcgtctgttttagaaacagcgattgcagtcggtccggtaagatcagcagataacggttcgaattccgtatcttttaccgcaaaacgaatcattgtattcttgtatactttgtagtctacacctgcttctcttaattccttacgcattgctgtatcttcttctacagagataccgcggtaagaaactaaaactgctgactgtgcatctgtaagcaattctttgatttcgttaacgataggttgttttaattctacttttgccatgatgaaatggtgcacctccttgatttattttagtgtaccgccgcgtggaatctaaatataagaaaagccctttgtccgcaaagacaaagggcacaattagcttttgactaatcatcatcctcggcaggtagtttacgttatgccttgcggcacctgctgtcttcggcagtgatactgtagtaatatatcatatggtaccgaaaacgtcaactagtttttttaaatttacgggagcggctccatctcctcagcctcaccggtaaataaatccaacaaatcgtgattccgtcctatattcgtcacttcaaaattgctgatgcaaagacggagccatgggaattccgctgacattgtacgaatcaaatcatacacatataaatctgttgttttaaatgtagtatgatatcctgaatactggacatgggaaaacttctctttttgaaaaaaattacgaattaggtgatatgcattttgaggactctgcctggagtagttctcttccaaagccctggtacttaaatcaaaataaactgccttgtaaaactttttctcacgatctgacatcatgcaacacttattctccttgtatagtggtacagcacatcctccacagaataatcttcttcattcagcccatcgtcactattataccatactcacttaataacatagtccatgaaccaacccttttctttcagcgaagttatgacagctccaaaggcaccatagtctcttgcatgtcctcttccgtaaaaaaccaatgtcccatctttttccttattcataggaatatcatacttaaaaaaactcttttcaagagtttgataaatactgattacatcatatttatgctctgacttaatttttgcttcatctagttttatctctaactttaacatggcgccctcctaatttttttattttattatatctcctccgattcaacttgtcaatattttacatttgtctttggtatccaacgatgtcctcttctccttctgagttcctgacctcaagctttgcgccttccaccgatggttccttccacatgaaagccacttgatgtattcccagtcaggaggcgtgatcttaccccattttagaaagatcatcaaaaaaaattgcccgggagacaatcaatatttcccgggcagatccatcttatttatattcttttaattctttttcattcatgataatggtatcggaatcaacagtctttccatataccggaagcagtgtcttcttataatccttctcgaagaatccttcttttgtaagtttcgtgatctcttcgtccagccatttcttcagatcatcatttccttttttgacagccggcgcgataaagtcatgttctcccagagatttaatccctgtggtgaatcctttgttttctcttgcccatgcataaacaagcgtattgtcatgtgccagcgcggctcctctgccgtcctttaacgcgttaaaagcttctgtgttctggtcatattttaaaagctcaatgtcaggatatttctgggtgaaatatgtctctgccgttgtccctttgtttacgattagcttctttccttttaactgtttgacgtccgtgatcacttttccgtttggtgataccacaccgagagccaccttcatatatggaagagcataatctacgacttcttttctctcgtcagtgacagtaaagttggcgaggatcacatccactttgttactctggaggaattccacacggcttgccgcctctaccagcacaaattccactttgttttcatcgccgaataaatcctttgacagacggcgggccagcatcacatcatacccctggttctttccgtttttatctacataaccaaatggcggtttatcgctgaatacaccaaccttgatctttccgttcttcttaatctgttccacggaagactggttgtcgctttcgtcagactttttacttccgcatcctgtcatcaggccgatagccatgcttaggactgccagtaccactaaaatcttgctaaattttttcatcttttttcatctcctcaaaattaaacatgtttaaaaacttctgtgcccgttccgtctgcggatgttcaaaaaactccttcggggtgttctgttccacaatacggccctcatcgatgaagatcacacggtccgccacagcctttgcaaactgcatctcatgggtcacgatagccatggtcataccctgctttgcaagctccagcataacatccagaacctctcttaccatttccggatccagagcggctgtcacctcatcaaacagcatgatctcaggattcatacagagagatcttacgatggcaactctctgcttctgtcctcctgacagctgtctcggataagaatcctttttctcttccagtcccactctttttaacaaggaaacggccatctctctcacttccttgggatctctcttctgagcctttaccggccccagcagaatattatccaaaatggtcatgtgcgggaaaaggtcatagctttggaataccatgccgatcttctggcggatcaaatgccacggcactttcccatccgaaaggttctgtccgtccaggctgatctccccgccctggaattcctccaggccgttgatacatcgaagcagggtgctcttcccgcacccggaagggcctaagatgacaactacctctcccttatttatatcaaaagagatatcttttaatacctctgtctccccaaatgatttttttaaatgactgattttcaataactgattacccatttgccaactcctaactttgccattttgcttccagcctctttgctacgatcgaaatcgggtaacagaggatgaagtataagaaaaatataaatccatagacccagagcggtgctgtgggggtgttcaggattccgccctcgatgatctgctgtccgactttcagcacttctaccacgccgatgatcactacaagggatgtagtcttcaccattctggtggcaagattaatcgcacccggaagcactctcctgaccgtctgcgggactaaaatatagcggtaaatctgaagcttcgtaagtcccagtgacatgccgctctctgtctggtgcttcggcatagaagttacggctccccgaacgatatctcccatctccgccgtgccccacatggtgaataccacaatggagataaattctccttccagatgaatgccaagcgctcttgttaatccgaaataaaacaaaaacagccatactaagatcggtatgatcctgatcgcctccagataaagcctgcacactgccttaacgataaaattcctggaagtcatgatgatcccgaagatcactccgaaaaccagagacaggaccaccgcgatcagggcaatcttaactgtcacggccagacctgacatgagacggaccatgtttttcccttcaaataaaatattaattcccgaagccagcatagcgagccttcctttctaacaaactaaaaatcacagatatcggaagtaagatgatcaaataagcgacgaccagcataaacaacgcttcatttgttttatagtacattccgatcaaatccttggccacaaacattaagtctgccagtgcaatggcactgaacacagaggtctccttcaaaagaaagatcacattggcccccaccgacggcatggcgatagccaaagcctgcggcaggataatataacgcatcagctgaaacttggtaaggccaatgctcagacctgattcctcctgaatcttattgaccgcttccagtcctccccggaaagcttcggacatgtagctggctcccaaaaaggtcagtcctatgacggcaatgataaaagcattgagcttgatcccgatcttcggcagaccgtagtagagaaaaaacagctgaatcaacagaggcgtatttctggaaagctctatataaatccctacaatcctgtttaacacaggaactctataatagcgaaccatggaacataagaatccgatcaccactgacaaaacgactcccagagccccgatccccaatgtcagttttgttgcctctatatagagaggtatgtttcgttctataaataaccaatccatttcttgccccttctttatttcatacttttctagtatgtaatatatgaaatagtataaactccatcttaagccttgtcaatacaagacatctgaaattaatcgtacatttttctatcaaaaaagtcaacttttgtattcacttcttcactctagtttatgccctgacccaaaagaaagttctgtctacataaaatgaaatcaaggaatataacaaaagataaggagacagacacgtctgcctcctctggtctatctctgtccaactttattgtcatttccacagctcactgaaaggctgctctacgtttgttacttttatattgtggcttccgttgcctaccgcagtgaattttctctccgcataaaccggcatacagagggcctgttccatgattttttcgtccaactcccggcagattccgcccgcttctttcagatctccggcttttttaagcttactctcatatgctgatattttttcatcctggaaattcctctcgtccagaaatccgcccactgaagtaagtccaggtactgccgtgttgtgataatacagatcatattctgacgtatctgtggtctggaccttgattccaaccgccttcatatccttggaaaactgttttacaaatagatccgcatataaaatcccgtcagcttttaatgtcagagacagttcttttccttctttctcaaagattccttttttattttttttatatcctgcacgctcaagggtttttaccgcatcctctttagaataaggatatgcctctttttctctccccgcaagaaagcttccttctttaaaattggagaaggactgtgaagcactgtcgcctgcagattcttttacgaacgtttccttctgaaatgcataacaaaccgcctggcgcacctctttcttattgacagcagactttttaccctgatggaaatcaaggaccgtctgaatgtcgctgcttccataataaaggctgatgacccctgatttcttcaggctggcaatcaagcttttgtttgcctgaaactgtgcgatatctgcccttccttttgtgagcatttcttctatgttattgctgttgatatttttaaccgttaattttttttgctgtgcttctccatcatagaactctggattggccttaagctcaatcggcaggtttgccggctggcccttgagtctgtatgcaccagtatacagatacttatttttgctccggtcgctcacttcgccgatgcctcctgtaaacagatacatgttggccggatctgcctcagtgaacttaaagatcaaggttgtatcatcctcaacccggatcccttccaaatcctctgcctgagtcagttttccgctgtcgtagcctttcagccgtgcaaagcagtctttgtaggcaaaagatgatcttccgtcgcccaaaagcagtagatctttttttactttgtctgctgtgagctttgagccgtcactgtactttaagccgctttttaatttcacagtatattccttgtgatcagaggaaacgtcgacgctgtctgccaggacatattctgttgtgccgtcggcattgatcctgatcagcggtgaaaataaaagttctgaaagagccttctcccctgagtactcagcaaaggccgggtgcagaccgccctgatagttttgaatcccaatgaccatttcgctgctttttttgtccgggagctttttttctgctttatagagcacctgtgcattattccctccccggctaagtccaaaatacatagctatgcccaggatcaccgcagcggcggctgccacagcagtccgattctttttattttttaaaaactcttttgccttctccaatgttctccctcctgttgtctggataaccgcaaaaacatccatcacaaacttaagaaccgcctatgatggatgttttctgttatacctcttcgtcctttcttttctttctgtacacaacgaccgctgtcacagctgatgccgcaatgagaataaagaaaatataaagttttctgctgtcaccggtcctaagaacacggcgtacccggattgggcgtttcggtctcttttgggcttttggagtctgatcctttgttttgttgtagtaaggttcttcttccttttcataatagaacccaaagtcaatgctctcgtcgtctctgaccgtattcaggtcaacagcctcaaacatcctgtctgcatcctcttcaagccccagcttctcagcttcctctgcgttcagtttcagcatccttgtgctcacaaaatcaaattctttcgctcccacaagacctgtgatcgtctcctgtccggacggctgtccgttttcatctacataccacccgtcactgtccagttccgtatccttccctgcattccttttggtgaggaatgcttcgttcggcgtctcagcttcaactttataacgataaggcttcagatagtcttttgagcctggattcaggtctgtcaccggaacagtaaacttataatgtccgtttttgtctgtcttgatgctgctcgtaccccgcaggtccttcactgtctgccatgtatcaccctctgcgtcatagcggtaaaggttcatcttgacattcttgatgcccctctcgccttcatcctgaataccattctggttttcatcattccatacggtgtctcccagattcacacgattttcgtatttaatgataccgcagtccacggtcttttcgtcccgggcagtgatataatcataaccgttgccgtaagcatcttctctttccagcgggtttaccagcaggaagctgttggatatagcatggagacggtcttcctcgtcaaacagaccgaagtcgctgtcgatctccttgttctttccgtttcctgccttcaggagtgtcaaatcctcatcattatttttctttgtccgtatccggtatttttccggagcatccaattccttattgtagatatccagattcttaaaccggaagacacctttgctgtctgtcttagcagatgccaccgtttcgtaggtgtcgtcctccagcatgactggttcctgatagctgctggtgcctgcctggatacttccatcccttcctttctttctgctctttcctgcatccggatcctggctctcgtcatttcctgtcgttcctccgtccggtgcgggttcttcttccttaggttccactttgtgctccagccatacggtgcgccctgctacaggtttatggtgggcggcttgcagtccgtctttatcctctgtgtcgttccagatcagcccttcaatctctcctttgtcataaggaagaagaccaatatcatagtcccggtcaaaaacagcgttcagtgtatcatagtacttttggttgtaggaaatcacggagtttttgttggcgtctgtgatgtctgatttcttaatctcctccgccaggataatataaggcaccttctgctccttgacatatccgtcagaatacaaattactgtccttggttttatcttttccctgggccgctttcgtataaatatactgctctttcatttcaggaacaaccagccggtaccccatgagacaatccacatccggtccgctgtctgctggaaccgccgtggaaaccggaaggttagagaaataataagtaccctcctctgtagattcggtctctctatcatatttctcaattctcacccattttttaagcgcagggtcataataacttgcctccaatttaatcttgatgccctccagcggtttttcattctcatcctgaatgccgtttctgtttgcatcgtcccagacatagtctccgatatatccggcttttgcaagtaccagtccaaagttgattccttcggaaactgcataccgcttgccatcactgtcgtagaccggatgtccggtagtggagtcccttggaatctctgccttgaagttctctgtcttggcaatgtttttgcttccggaagctgtcatagttccgtcgttgtcatttttgtacttcagaggattcttggtgagccgtaccggggaagtcttcatcagctggccgtccacagtcaattcgtcaatggtaaaatagtactctttgttcggccaaagcatatcaaactggtaaaccccgtctgcattcgtctgcgctgtcaaatcttttccatccattccaacggcagtctttgtactgcccttttcatgggctgtcactttcaccccttccagcagtttttcaccgggatcgatctttccgttaaaatcagtatcttcatgattggctccgtcatcatcgatcagatccttccagacaattcctttatagcgcaccggttttgtcacaccgatatccgcatccactgcctgcttatcatatgccttgacagccgcctcagaggacaggtcaatggctttcacatcaaagctgtctgtagtatacgtctctgctgtgagaccgccgtctcctttatgcccggtggtaacttttgtgtttgtctttgtgatcggagttgaaagctgataatcatcatattggttcggcatggtaaatctgagcttgtattttcctggcttcaggtttgcaatgatgtaataaccctgattgccccaataatcgcttctggtcacggttgaatacggctgtttctttgtagtcacaggtccgccgtaaatatcattcttgacatcaccggtggattcatccatgacaaagtcctggccgtttttattgatcaccgcatctccgtccacattacatgggtttccactcgccgtgagcagttctacttttactccgtttattcccggatcatctgcctttccgtctccgttcaggtccgtagtccacttgctcggcagcattcttccgttttctgcctctttatactgtgcttcatcctgcttaccatttccgtttaagtcattccatacatagtctcctacatatccccgcccggtcggtgcctgaaggactacaccggatctggcggaatcaacaggggcgtctctttttgcccagaacgcgaaggtattccatcccacataagggtcagaatcgtttccgtttttggcaggatctgcattcccgcgcataaacggcaggtttaacggcgcttccatatcatatttcagcacatagctggtggaaggcccgaagtcagccgtctggttcgtaaaacgcaccataaacatcttgacacccttgcagatctcttccatgttgtctggatttgcactgagcagatcctgcacgttcacaaagtgctcgttcagcttatctttgtcatcggcaatggcctgatagtattccttcgtactacgctcgttgacgtccggcatattcttcatgtcatacagggaatagcttccatccccattctttttcactggacccacaaagacttcatatttacttttatctagttgggcggttccgcccgtatcagatttctcaatccgaaaactctttaaatcaatccatccgttccactgggattcccttgtaagggatgtataagtcccatctgcgtttttgcttcccgtgatagctttatcaccgtcatacggcagcacatcaaagaaaatcggaacagaatagttggatgttgtatctgaattggtcaggatatctgagaaggtatattttcctccctcctgtaccggcagcggtttcgtattgagcatataagaatcgtccacttccgtgacgaccttctttcctctggtcagagtgctgaacgcctcaaacgcaatattgttgcttgagatcgccaggtttttgtccgtcgtgttgctgtcattgtttacatcggagacatcgaccctcagggatgcctgctcgtcatcatcctcatctgtaatgaaaaaccggaaagaaccatccttcgttccatataccttcgtggtcatgtcttcctgcggtactccgatatccggttcccgtatttcgtagatatagtcgatcacgattttgtctcccggtgccaggtcattgtcaaacctccaggtcaccaggtttctgtctctgctcgtatccactgccttccggtaaaattccggtgttcccgcctttaacttcagatcctgtgtatgcggcggctgcgtctcatcctctgcattaacgattctccaggtccagtaaaacctgttctttgtctctgcatttttggcagaataatccgggttcaaaggacagtctttgtcactttccacctgctcatacggcacataatcaaacttcatctcgtcgatattggcgatgaacggaagtcccaccgcaagctcaggcctcgacatgttgtcttccttagatttttccggatcgcccgacggcagtttcatcatggtgtcactggcattaataagctgcaccgtctgcttcagcttagaactgttcttcaggttgatcgcgatgtttttatcccactcataagagatattcttatctgcgtccacatgctttttcagatactgaagcccctgcttcaagtccatgcttgggttttgtgaagatatctcaacccctgcccggtcatccttcaccgtaaggcctgcatactgggtatcactgtacttgccccatccgctggcaaagaagttcgggaacttgctgatctccgtctgctcttccaaaccgatctgtaccgcgatctgcaaggcatttttgttaacgctgtcggtaaaggtatcggcgtgcatcttgtcagttttatatccattgtctgcagctttcttcttctccaccacagatacatcttccttgtccgccgtactgtcatctgcgtccacatccagccggaatccctgtggcaccggatagtgtaccgggtcatcagaggcaacgatccatctcatctcgtcaatggcgcccttctcagaatatttctttaagttaccggtcagttcaatgactttgttttcattaatctttgctccgtccggattcaggcggacccatttcatacttttatcggtttcgtctgtcacattagaacttccgctgtcgatatccagtacgtctacatacactctcaaatgctctttcagtttgtcgatatctacattgcacttggtgtcctgaggaatttcccactttccggtctgtactcgttttacggagacgccgatctttggatctgacgcttccgccggcccatccctcattgtgttcggcgcccggttcggaatcttatactgaacaataaattgtgccagatttcctttatgcactgtcgcctcatctaccaaaagggtaaagacatcctttgtcttatacagcgcgtcagaagaacggatgtcatgtgtgatgtcgtccttctggtaaattcttctcggatccttcgtatcggtcctcactgagatctctggtttcgtgatcctgataccagcggctttcgccatgctgtaccgctcatcatataccctgtcgtaatcgtaatcattaccctcactgtcttttacctggtttgtgtaggcaacggtctccaccggacgttctttaaagtttccgccaactatgaaatctcggtccatatggtggagatccaggtagctgggctcagaattatactgccagtaatccggatccttgaggatatcttccggttccggaagctcggagatcctggatctgagcactaaggagaagtcttttcctgtcctcagcgcgcctgccggaagttttcctttgtgtatgttctctgaagtcacatccgcttcctgtccgggagtgatattggccagcacttcctgatggtcataatctccgttttggtccttaaccttcttaacttccaactgaaccttccagccatggtttttggccggatcactgctttcaatgtctgactggcttaaggtctgcttattgccgttctggtccgtatattcaatataataactctcaatcttgctgtcatcgtcataaatcaatgccttcggcagtgtatggttgatagtaaagacagaatgagtcacatctcctgtagtcgcataatctttcagtgtctgaccgctgtctctatatgccggatggttttctgtctttaaacggtaccacagattatccccgtaagctaactgcaaaggtgccagcttgttggaattccccgtattattatccggctcggcagtgtaggaacttcccgtcctgctgccggatacccctgccgtcaggctgagtctcggatttttagaatacagctttgcggtattcatgactccgtgatcctggagaacggaaccgtcagcttcgtccccatattcctttttgccgtcgtaattcaagtctgtatacttaccgtccccgtttcctgtctgccagaagaacagggaatctgccagtcccgtatcctgaaggttgatcttatccccctcaaaataagacgtcatacggccgatagctctctggcccatcgccttattgtcataataggtctttccggtacggtatgtgctggccgcataatcagggctgaccgcatccaatctcggatcctggttataataaccctgattggtgtcaacacccacagcatagccgctgttttccccgccgatctgttcatccgtcagataacggaaaaggttgtgctggctgcccatatagaccctggtgctgtcccagtccttcgtcttatccgctccattcggccagttgcccgcatagtcagcggcaaccacgttgatctttatattccttgaccgacctgaaaggagtctcacatcttccgtagatgtgcccgccttcggtacaaacttgattacataccgttttgcctccgttccatcatcgtccacatccatatacctgatctccgtgtcaaatttggatttcaagtctgccggcaggtccggatctgtgtcggcggccagcctgcccccggaggaccagaccttctgctccatctcccagtcaaggttctgggcagccgtgccgtcctgtctgacatggattacattgccgtcctcatccaacggctggaccccatacggaagaacaaccgtcactgtcggtttaaacaaggttccccttgccccgccgttagtcgtatagttgtaatttcttttgctgtctgcgccgcttccgcttccgtggttataatccgccagtatatattcattctccaggcggatattcagctgtttgacctctgtctctgcctgagtataccactggtctgccgtcaatatatcatttgaatccctcttgccgtactcggcccagaaacgcaccacaggtttcctttgttttgcccgggtaccggttaccgcatacttggtgttgtcagcacttccatcatttgacccgattgagaatcccacgtcttttctctccactgcctgggaatatgtatttctaccctttaaatacagcggccatggggacaacagattatagtaagcgtctgtattgcaggtgctgcagtaccacaccccgctttccgggtcattgcactggatcgtaccgctcttatttgcttcagacatatccatgctgtcattcttatcgtaaatctgatggtacatggtgtttggaacgtcactgtccttagagtccaggtccacaggccgtacataaagcctgtcgtaccacatctcatttaagttttcatttgttacctcagacttaaattctacagacattaggtaatgctgctgcttagaagcgtccagggttcctctattccagaacctggtaagcttttcagggactgtaatccggatcacccaggactttgcgttggcatctgctgagttgtaggtttttgcagagtatgaatcgttgtggacaggatctgcccattcttttggagccagtgccccgatatccgtgtctcccggctgctggagaatcttaatgttctcctcaggcactgtaactttcgtgccgtctttcatccgcgcatcaacctcaagtctgccgtccttgagcactggttttgtacctctcggcatcacataggtaaactctgcaccgtctgtatcccagtctccataattaaatgcgtacagttttgttgtatacttttcttcggcttccaatgccgcagtctgctggtcgtagctggggacattgtgataatgtccgcctcccccggagtaattgatgtctgcctgatcatagtaggtattatctgtctgtatatcactgcttccggtgatccatgctttctgcagatgcagtgcatgttctgcccagatcgtattgtggtacccatcgtccatgacgtttttccacttatccatatttgcggaacctgttccggaaacaattcttcccgtcgtcaagtacctgtagtaggcactctcagttcctccccctccggtactattccggtaggagatggaggccgcctctttggaaggatccgtcacagacatactggtataacacatctgcctggatgatgaattgatgtcgtagtcaaaaaatctgccgccgtcaccagtaatctgtcccggaatataggcataggaatcattcaggaattctcccgcatcaatgcccttacccggtgttccgctgactccgaagtcatgaatcagattatccatgtccatagtctttgattttgtggcgtccgcattcggcgtaggaccgtcagcgtactctccgtagcgtggaagataagcattttcttttgtgtcactccaggttgccataggcagtccgtcttttcttgcttttgtcttatagacaatctcgatccgctcacctctggaaagttcctgggatccaaagtcatacttataaactttaaagtgaatctttttcgctggattggtggcagtatccgtcggttttctgtctgttgcagacgtcaccttctggaattcctggcttcctccgatatccagatcctccatgtcagaaaccgtgactgctggtttttgatagtcagagtcctgctttagactgccgtctttattataccaaagaactgtgacatcggccggatccggggcatctacatattccggtatcttgtcatagagtaccggatgttccagggctccccgccttgaactgtcttctgtccacttgttccacgccgtaagtttataccaaaaggtttcattcggacggtatgccgctttattcttgctgttattctcggcatagaccgccttggcatcgccctctttgtcaaatgcctgaacatcggcgagcatgtttggaagcagacgatatacagtaaatgtatggtctgtgcctgccagcagatgtgcctccatcttatcgtcatcagacactttataatgctcatgtccataatcaatatccaggataccgctcatagtgctgttatttttgttgattgcggatgtcccgttttcatctatatagttggctgtaccgtgaagcaccacatttggcattttatatacattgctgccttctgccgctgggatatcctcatagacccagcggatctgttttacttttttcatattgccggcatccgtcttaaaggcatcgtccatggctttccagtctgtgtccccgtcggatttaaagtaaaaaacagcgtcatgctggactccgtttaccgtatatttggcttccggccaatctttcagataaaagttctgttcatctttcaccgtccggtttgaaaggtctatgctgattccagtctctttcagttcatgcatggtcgcattctttatatctgacactgtcagatcaacatccatctgatcattgacccaagtcgtaccgccttccgtggaggaaggatttgagtattttatagtaggagacccggcgtccataaaggacacactgctgacaagctcgcctgcaggaactgtaacgccattaaaagacagatccacagcggagctgttttccgcacagtgttttttcatcaccgcacttccgaatgcgtcactgcaccaggaagaataagatgtggctgagtttgtatctctgttaacaaaatagtaaggataataatggtttctctggcctccccctgcatatacactcgtctggacactcttgccctcaaacgctccagagaattcatctttagcctccagcaccacggtcactgtatagtctttgcccagcttcaggtactggtcaccatgttccgtgtccgtttggatcacaagactccggtatgtgtttttagagtccggtgcctcaagagttccgtttgctgctggggttctagcggacacagaactgctgctctcaagaagctctcccttcagatccccgatcccggaggatgtattttttgtatatttccatcccacgatcttcatgcccaccggtgcagttacccggacagacggattcttaaacggagtattactttcactgccgtcggtttccttgtcagatttattggataccttcacttgatattcgattctgtccccggggatgatatgatcctggtctaccttttgttttgtcccgttcttttcatcatatgccggtgactttgtggcatcgtcctcccgtttttgtgtcaaatccacatgggatactctgttatacactgtctcggttgctgtcggagctgcagttacggtgctcagctgatagccgaatgttgaagactctgcttcaaatccagtgatcttattctgaatgccgcttgtatagaaatagtcatgggtgccgcttccgcccactgtcggtatagaattctcattccacacatcattggcaatgtcgtctttggtccggtcagcgaagataccgtcaaacgcaagatcatccagggcctgtttcggcctcaggaagttatcatagtgttccgcattcgtctctttcgcttcaatcttaattgtaaaactctggatataacattttgtaaattctgtaccacttatagtataggtggatgtttttaaggcatcatcccccacaaacagcttggagacatctaaaacgtaatagtcagttccgttaatggtcttctggctgaacttgtcttttacatccacccctttatcagtaccggaatgggttccgtcattgatcttgaactgagtcacatgccacttgtcagagtcaaagacagatttcgggatcttgaccgtctgaagccggaatcgggtgtccagattctggtcgaatgtaaatccgctgatatctgcgtcccttgactcagagtttgcgggatcatttcctccatcgtctgtaccggcgttttccagatgtatggtgaacgctgacgcctccggtttcatctcaggctgaccatccgtatttttagaggcctgataatcccatccttttgtctggtctgcagtcagtttatatcccggctttaacggtattcttctggccagcagggttcctgtctctgtcactccgttgacaattgtaccggagggatcgtaattcttaaaggtattcgtgtttaccgtattgactcccgcattgttgccgtcacctttcagcgcgaggatctgcccgtagatattgatcagcggttcgttcttgtcatcaaagattgtttcctttttaaccccgtcgatctctgtcttagtaaagtcaccgtctcctgcgatgtctttcacctgcagcctgacttttgacagatactgccctgtcttcaggacaatatccactccgtccacagcctggcttacattgtcttccccttcatagaatactctgatctctttgtgatccgctttatctgagttcttaaaatcactggcattccttttgataacagttccgtcagaaagcgtcagaaggatctctccgtcaacccggtccaaaagctttgtcttcatctgcacagaagtgctcttaaagcctttgaactctccattactgtccttagtgaccggcggcagagaatcttccagcaccgcattatcaatgtacgggatatagccattccagtttgctccgtaatatcctgctttatacctgtaaaaggacatactgtagcatccagtagctccataaggataggactccttcttgtctgtctccggatggagattgacacccttcagtgaatacatctttgcgtcgtcatagaccacgataggcactgaagatttcatgtgtcttgccgtatattcataggtaccgctgtgatatccgttgatgttataggtgtaataatagtttttaaaagaccagtcggaccgataaccgttgtttttggtagtgtcagtatcttccgtcctgaccgcagtcgtggtgccatcgggtctttttgcgccgccgatggacatctgtgtatccgccgttgcattatagctgcccagcttataataccttcccacaaattcaaaggtattctgggtatttacattgtcctggttataccaggttccgtaatccggtgatttggcagttttcgtaccattcttttcttcgaactcttcctgattgatggaaaatgaaatctctgctttttttaccgcagtatttccatttgccgtcattttcggatcccgatagtaatttccctctttgtcagattgatagttgggctgtccgtccaacagattaatcctccagtaaccatcacttccattccagctcttggcattctgatttgcctcccagactgccttcgggtcctggatcgtatactccgatccgtctgcccgggtgatcttgatctcgttgatatagtccttcaccctgggatccaccttaaggtagtaggtctcaaatccctcagccggcagattgaccgtcatcttcagatctgccggagtattgtaggcatagttctgaatgttatatctggagtatgtagaatcgatgttctgctcctgcgtattatgcctttctggagggccgcttttcgtatcctgcagatactggcggaagtccactccaatgcttcccaatgccttatatcctatctcaaagctggagtcatcgctgtaattcgaggtagaacgcttatgctctgaaggttcggcaccattattatatctggtggtcttgttgtccggcgttacaaaataggcatctaccgctgtgtcaaaatacatcggactgataagcagtcttgccgcatcctgattgctcaggtcataggatttctctgttgtataaagcctgcttgtgatcactgctgccgcctggttaattttgcgcatctgaatgtccgataaccctgtcacctcgattgcctgtgacgcagcaggtgccttcccccccttcatggttcccccagacacctttatgtctttgaggatacccagatctgtgatattttccttggggaatgtccagcctttctctcctttcgcaaaaacattggagggctgatccttttgctgaaataccttggtatctttgtcgtagataaacgtcctgctccctttggagcccgtaaccgtgatctctttaacgtcagcagcttccagaagtttttctttcaccaggatcgattctgcatagaaaccttttccttcttcctgggaaatctggtttcccgcattcagttccgtaaaattgatggcggtatcaaatgccggagcatcattggcagcactgtttccaaaccaaaaagcgaaagtcgcttttttttcatacgggatagcaagacccatgatgtttccgtccaccatactgctgttattttctgaattaacctccgccttatcatagtaagggttcagatggacattgacctccggtttcgggttattcaccgtcatggacatactggctgtcttggcagggttgttcatgttcagcgggtccttgcaggaccattctccacggaaggatgaggttccgtaaaaatccgccgtgcctcccaccgtgatatccagtttatctgtgttctccattccgttaaacggttcaaatacgatccgcacatacttaagcccattggtcacagaattcttccacagacttttcggaatcgtgataaaccctgatgcaggtgcaggaatctgctcctttgacaggacaaaatcaggttcctttgctgaacctgcatatgtgttattggcaatatcatagaactcaatctttgagattgaaccaaacttctttatatcggtgatggtgatctcatccgccagaaatcctacggttttgccgtccactaaattggccgggagagtcatgaggaattcccctggattcatctcggaatgagacttatttccgatatggaaaactgcctttgctccgtcttcattatacggcacagtgatagaacccagcttagaggcctctgtgctggttggttcattgtagacatttcctgtgatctcagggttcacaccttcaatggtgatggttccgctgccagtctttgtcacagtgctggaagaagaccccggataattggttgaaactgttccgttggctgtcagtgatccgtaatccttcagggttcccatcaccttcatataggtctgggcatccaattctttacctctctcgatcttcttattgcctgcaaagaaatcatattcaatgcggatgcttttcagattgtccagatcccctttccaaaaggatctgtcaaaagtcacattcccgtcactgtccgcatacccctgaaccagcgtttttaatgagattttcttcgtctggttattgatgtctgtgaggatcagggtgccggacgggtatttctggtcatcctcactggccccaatggaagtgttaatcatggcatccaagagttcttttttcaataatacatgttccgtcacatatcctctgtcattggccgcacccggaacattcatctggatataacccggcgcgataggcccttttgactgagttccagctctcaaaatataaccatccattccctgacggtcatactttccataaacggtctggttatatggggaccggctgcttcctccctctgtgaccgtcgtcccgctctctccatccttcttttctgaatggaccgcagtcactaccgtgtcaatctcaggaggagtcaacaccatgtctgcctgaactttatacggctcctgctctttgatgacccagtcgcccttgctgtctccgtcgcttactttataatatttgtaatcaaactgaagttctgctttattctgaatcgtgacattgttggttggataaccgctgatcacaatcttcccaggcagaactgtatgtgcattaattttttctgtcagattgattcggacccttccggtggcattattcggcagccttccttttactccctcaaagccccagcgcacatgatcttccatctttttttcagtcactgcctgcgaaaaatccacccactctttttcaccggtattctggttggtgatctcatactgaaatggatgttctttggcaagaaaagcatcttttccttccgctgcatccttcaccggaacttcataaaacaggccgtccagaaggtaatggcttgggatagtatccgtcactctcggggaaaacagaggaatatttcctttgttttctaacccttctatgtagaactcagacaggctgtttacataaacctgtttattgtaaggagcctcagattctgctgtcttttttgcagcataatccggctgcggtttggtgaatgtagccgtggcattggtggtcttagaccagtatatctccggctttccaaaaataatcgtggataccagttttgtctgaagctcattgaccgtactgtttcccttaaactggatgttgtttgtaaatggaagcctaaccagaaatttcgcctgatgatgcagttttttgtccggatgggcttctgcgtaatttttagcgtggatctcttcctcatggattaccgcgatctgaccgtttcccgtataggaatagggaacgggatctcccagctttccctctttgatctcatcctctgtcagatccgttacatcatagacgaggacacccccttcgtcctccttgcctatgaactctgtgttcttccatgtatttggattattgggttctttattttctgtgaccttcccgtctttgtagatccattttgcgatatctctcgtaaagatgccatctactccaccgtcagaagaacagaatggcacctcaaacatcaggttcatcttatcaaaggatacatccttgggaccattgctgtcagatgcctctgaggtattctttaccgttacataatgatccgcataattgtactctttccaagccggaacagccggtgaatcttcaaagatggtttcccatgaaagatttgtatttacaaagactttaatggcattctcatctacccccggagacttccattcatccgcgatcttgttgccgtttttatcataatattcattataggaagaacttccggtgaccttgccctgtgtcttttccggcacatccccaaaaaatttcactttgatgcggaaggtgagagactccccgcccttcatgtcattgctggctacaaatacgatctttcctttgtaaaccgtatcctggtcaaaagcttttccgtcctctgtctgccagctgtctgcctctatgacattggcctgcatccccagctttacatcctccgggttgacattttcatcgtatacctgaaggtttccttcactgtcatagaaaaatgaaggcagcgcgactgtgactttcgtgcctttggcataaccagaagacgtacccacaacgtcaacctggcccgtcagttcctctgacgcgccgtttttgagcatcgttacattagtgcccggctcctgatggcaggaaaaactgacctgcagccccggcacttcatctgcctttacatttttgataagtgttgaaaaatttggactctgaatcaccattaatagtgacagaatcatagaaatgacctgcttaattcgttttttcataatcccgttccccctacggactttatgccccttttttatttttatttagaaatgcaaagaaaacctgtgacctttccttcacagattgcatataaaatgtttgaattcttcttgattgtagtattatcattgataaatgtcaattaataagtcaatattttgtcaaaaagataacaaatcaactctagtcttgttcatattgcacaataaactctcgtaactttttttacatatttttgtttagactttattttatatgagcaaaaaagccattaatcagaaattctaacctgattaatggcttttttaaattttgtatataattcctattatccttgtatgatattaatcatagatcaaaacagaaatgtgtcaattaacccgtcccatttctgatctttttctgatatgatcaagtttgttccgtcctgtaacggccatttgataccgatctcaggatcatcccacttaattccaccctcatctccaggatgataaaagtctgtacacttatagcagaactccgcctcctcagaaagcaccaagaaaccatgggcaaatccttccggaatataaaactgttttttgttctctgctgagagttctactccaaaccatctcccatacgttttggaatctttccgcaagtcaactgccacatcaaacacttttccccgaacaacccgcaccagttttccctggggatactgtttctgaaaatgaaggccccgaaggactcccttaaccgacatggattggttatcctggacgaagttcatcttgagtcccgcctcttcaaaatccctctgattatatgtctccatgaaatatccacgttcatccgggaataccgccggctctataatatacagcccctctatctcacagtctgtcactttgatctttcccatttgttcctcctagtactgaatttcttttaaatatcttgccagggcatcctgccaggaaggaagccgctcaaacccgttctctgtcagtttgtctttgctcatccggctgttctccggcctttttgcctttgccggatattcctcactgcccacgggatccacctggatctcaatgcctgcctgcctaaagatctcgcaggcaaactcataccaggtgcacagcccttcatttgtggcatgataccttccatatttgtctgtctcaatcatatccacaagaagccttgccaggtcatatgtgtaggttggggaccctgtctggtcattgaccactgtgagcctgtcatggttttgggccagattcagcatggtcttgataaagttctttccattcactccgaatacccaggcaatccgtacaataaaatatttacccaggttttcttcaatggcaagctcgccttcgtactttgtctgtccgtatacattcagagggtgtctttcgtcatccggctcccacggcctatctccctgcccgtcaaatacatagtccgtgctgatatacatcattttaagatccagcctgcggcatacctccgctatatttcttgtcccgtctgcgttgatcttcctgcatacttcaatatcatcttccgccgcatctaccgcagtgtaagcggcacagtggataacggcctccacctgtgcgtccgtgatgacctgatttactttatcggcatctgtgatgtccatctcctgtacatccacgccgactgcatcatggtttctcttgtttaactcatccatgacatcatgtcccagctgcccggctgctcctgtcactaaaaccctcatactctactcctgttctaacctttgtccatactggttctcaaaatagtttgcatattcgccggacaaaatattctgccaccattctttgtgatccaaataccactcgatcgtctgtttgatccctgtatcaaatgtatacttgggcttccagccaagttctgtctctatcttagacgggtctatggcatagcgcatgtcatggcccgggcggtccgtcacaaacttaatcaagctttccggcttatcaagcgcttttaaaatcgtctgcacaacctccagatttgttctctcgttgtggccgcccacattgtacacttcccctggtcttcctttgtggaggatcagatcaatggcttcgcaatggtcagtcacatgcagccagtctcttacattttctccttttccatagaccggaagttcttcatcggccaatgccctgcttatgataagagggatcagtttttctggaaaatgataaggaccatagttgttggaacatctggaaatggtcactggaaggccgtaagtccggtaatatgccaggacaaacagatcagcgctggctttggaactgctgtatggactggatgtatggagaggtgtctcttccgtaaaaaacagatccgggcggtccagggggagatccccgtacacttcgtcagtggatacctgatgataccgttttactccgtattttttggaggcatccaagagcactctggttcccatcacattggtcgtcacaaaaatccctggatcagtgatggaacgatccacatggctctccgcggcaaaattcaccaccatgtcaaacttctccttctcaaaaagctccatgataaacggctcatccgctatatcgcctttgacaaacttataattaggcttgtcctctacaggctttaatgtctccaagttgcctgcataggtaagcagatccaggtttacgatgtcatagtccggatatttattcaccatatggtgtacaaaattccctccgataaatccggccccgccggtcactaaaatcttcatatgtcttctcccgccttacttgtcaatatactttccatccactacgtccagcagatactgtccgtactggtttttctttaaaggttcaatatcttttaacagctggtcttttgtgatccagtgctgtaaatatgcgatctcctcagggcacgcaatcttcctgtgctgatgagtctccactgtttttacgaaattcgttgcttccaccagggactcatgggtccctgtatccagccatgtaaatccctgtcccagcagagtcacttccagctcaccgttttcaaggtaaatcttatttaagtctgtgatctccagctcgcctctgtcagatggggcaagctttttggcgtattccacgacccggttgtcataaaaatacagccctgtcacacagtaattggattttggatgttctggcttttcttcaatggagatagcctttccgtcagaatcaaactctacgatgccaaaccgctccgggtcatccacataataaccgaatactgtagcccccatctgtttattcgcggcggctttgagcctttttgtcagcccgtgtccgtggaagatgttgtctcccagcaccattgcaacattatcattcccgataaagtcctctcctatgataaacgcctgggcaagaccgtccggtgacggctgtaccgcataagccagttcaatcccaaattgatgaccatcacccaaaagcgcctcaaatctcggtgtatcttctggtgtggagatgatcaggatctccctgatccccgcattcatcagcacagacagaggatagtagatcatcggcttatcatagatcggaagcagctgtttcgacgtaacccttgtgagcggatacaatctggtccccgatcctcccgctagaataattcctttcatattcagataccctttcttttaattccgttatcagttaatagtatcataatgggtgacgtaacgtaatggtcaagaaattattacacttctaatttgtgataatttaaatttcatccttttaagttaattattgtaactaaaaacaaaacatgatattatatttgtacggagcaatctgtgtacagaggtggcagcctcccagttcataagaagaagggaggtggtgctgatgactacatatgaggccttatctttgatgctggcatttggtatgttcatcatagcgctgcttgcctatatagataggaacaacaagcgcaaataaataagcctacctttgtacttagccagtcaaggtaggcttatttccaactttaaaggctaaccatctatgtggatggattgctccttatttatttttagtatacctcatcgtgcgcagcacgtcaacccggagggtatgaaatacggtgtgccctgtgggtataccttatcgtgtacagcacgtcaacctgaagactataaaatgcagagccccttttagtcttacaggtcatgattagaacctctttaatatcataattttctcatttttcatatgttctttttggatcgatgatctttaactattttttctgcaaattaagaccccagcctgttttgtgatcttcacctgcccctgttctctgatcttctttttgataaactccttaaattctgtttttctgccattcagtctctcattctggttgccatggcaggataagatatagtccaaaagcggctctgcctcagtgatgattaaactatcctcatactcttttttttctacagacgaaaaatattttttcaggatgccgctgccattctcaagtccaaatctatcgtataaactgacctcagaaagtgtgatcgttggatcaaattcatggactaattctgtcacttccttcatatgctgtttcccgtaggtactgcagtagacaattccttcttctcttaacacccgttttatttcagtcagcgcaaggtcaagatcatttacatagaataacacatgattcgcgaccacccggtcaaaactctggtttggatatggaatcttgccgcagtcaaaactttgaaataaaagctctggtcctgtcacgccatccagctgtttttttgcgtccagaagcatcccctctgaaatatccgataaaacaacctttacatgagagagctcttgtatctgtttatttttccatatctgtccgtttccgcatcctatttcaagcactgatttaacattttgaaaatcaatcagagaaaaaagccacggaaaccacccctgggaatttacggagtaccggtcatgcaaactgatgcggatatccaggttggtagaattctgatactgctccaccagaaccctctccatacttgtcatatggatcagattaagaatctcgttccagtccacctgatttgtctcctcaatgacctttgttgttttcagaagcgcttcctccacagatctcagatgctctgcttttttgtggagcagatccgcctgcatccgaagggaattggtaatgttcaaagtatcgtcattgatggtcatgtttttaatctcttccagtgaaaatccaaggtacttaagcgacaagactttctgaagcctcagaaaatcctgatccgtatacatccggtaacctttttcatttctggagctgggctttaagattccctttttgtcataataccggatcgtccggatcgttactttggctttctttgcaaactcccccgtggtataaaaacgctccatgagctcctccatttctctgcctttcttgagttcattataagggatattaattttctccacaaggctttacaaagaacagaaaaccctcacagaaacttttatttcagtatctgtgagggcttttacaaaatagaaaaaagtcagctcctgagttttgattattttatatttagttcttttttcagctggtcgatcatttccccatactgttcttctgtgaggaatttgggttcatcatttccgatagcaaaggaaccgccgaactcaaatcccccttcatattttggaaccagatggaaatgcaggtggggcagcttgtccccataagcaccgtaattgatctttgtgcatccccagagttttttaatggccttcgccgcagctgccacgtcatctatgtaattatgtctctgcttcggctcaaggtcaaacagttcacttttatgttccggcactgctaccacacagcgtcctaaatgcgcctggtccttgaacagatataaaataccttccttcatctgccccacttcgatcatcagatcctttcttccctcatggtctgaatcacaataaaaacaacctttttcttttaccgccataacgttctccttttgattataaattgataatattatggttatattatattacttatacaaatataattccaccactttgtcataattttataaaatatatgaaagctatatagcggtcctgtcgttttcaagtgcgcaaatgttccctgacattcagcggattcaggcctgtgctgtctcttttaaatagtcctcaatcataaacatattcattgtgtctgtcactttcttccggtttgtcttccacacagagaagtaaatctcatccagagtaaacaaatccattttgcccaaaagctgagaggtgtcggctttcaagctaaacgcatattccagttcttttttcacggttccatcttcatttttccctccagtgcggtaataaagaaacgcctgctgcacatagatcctgatactcataggatcaaaaccactctttgctttttccggatcactcatgccttcaacggttcctttaagttcactttccattttggccacctctggatccccgtctttagcacccattaatttctttacctcatccaccatctctttcacggtcattccttcctgacctgctgaatctgtcggcgctaaaagcagcatcatcacgtctccgtctttttcaagagctgccacaaaatgattctttaacaatgtaaatttcactcctgcattgatcctcaccggaatcgcagcacttgtacctgtcagttctgtggaaaccgccccatctggattcggaacaacctccgtttttggatctttcgtatctgccataatgtttctcctttccttatgataaatttttaaacttctctaattcgtccagaatatcctgagacagtgccggttccggctttgtcatactgttctgcatggcaaaatcgcctacataaaaaccgttggccaggaacccttctcccttctcaagttccaaagaatatacccggtcataataaggctcatcataaatttcatccaccttacagtactttccctccacgaaaatctggtctgactctgaaacctgtcttgcctgtttccatccgtctttcgtcatcaccggatgatccattgtcatcttgatagtcttttctcctgccttgataaacttaagaatatcttcgtttcccgtataaatattaaccaccttttcgtatgtgccgtctgctgaggcaatatagtccccgctttttacatcacatactggaatctttcctttattcctggtctgtatccgggccgtcttctcaagacacccccacagcagatgcatgcagggaatctccacaacatttccaccctcatattttttaggattcagctggctgtctatttccaaagaataggtgttgccgtccgtacaggtaaattcgacgtccagagacagataaaaatcatcgttcccctctactccgccctcttcaattgcatttttccaatgctgaggaaagatcaggacataaccgctggaggtctgctcatttaccgttggatattgtaacggcttattcctccctactctttgattcatggttctgtcatcccactgggatgccggtagcagcttaatctgttcaaaattattaaacctgacgatggagtgagctgcactgtagatataaacctcacccttcacattaggattcgatgcgaccaccatgccagactccagctcaaactgcatggcaatcggcagatacacacagaaatttccgtttatcctgtcaggttcctcataaaaataatcagcactgccgctcgcatcccatctaaaataaacaatattaatcttaggtctcccatttttactgactggatggaggatttttcctttccctatgatgtcgatacccacagtttccactgcattctggcgaagtgatcctatttttatcaaatgctcccgccactggggtattctcatcatataattgacgtctgctctgatacctttgatctcactttgttctatccgaatttcttcatcaataatcagaaagctgcactgctccaccgtataagagaacttccacgacttcccctgtccgtttcgtatgtccaattctgcaatcatatactggggatgccctgatctatggattcttcccttcacccttaatgtttttgttttaggctgataatagagttttaatttttcatactcctcccagcctcctggattggcttcctgtctggatgcactttttagaatttttgtttttgcagccagtttttgagccgcctccatatcctgatataaggcaggaaattccttcttaaatttctgttctcctccgaacatgctttcaatgatttctttttctttactgttaaaaagctctgtctgtgttccctgcataacatgcctcctcacttgacttcaaacggataaatgtctgcaaaatcaatctgccctttgtctcctgcgttgcaccggatagaaagtcttacaatctcttcccctgtccttgtaaaagaggcatgtccggtggcacttttatcaaaagctccctgatgatccgatgcctcaatgattacatcgttaccgtcattatttacaactctccaggaaagttcatactgagactcgttcccgttttgcatcatcacatacttaagtctctgaagctccagtacatctcttgttccggctttcactgacttttctttttcttgtatttcctgacttccggttaaaatatgatatcggtaaacaccatattgattacgcagcactttacagtacttactgccctcaatccttccaatgccgtgatccatatatccaaacccggtttttgtcagatcaaatgtaaattcacttgttgttcccggcgacacaattccagatggggaaaccaaaactccatttaactcctctcctccactgacgtttgctacaatctccttctgtacactgtctctgtcttttaccgccctaagaatcagcgtcatagtttcataaatatatacttccaattcaccctttccaccgaccttccagttgtaaggatagatcaggcaaaagtcacagttcggacaatcccattgaagctttaaaagttctcccgctgccgcctcataggtacccccggcctccgttccattgattttaaatgactgaatctccatggcatccccctttcatcaaatggtgatcgtataatctttggctgtttcgtcccgaaacggctccacatacatggtcaccagaatattttctcctgctcttgacggctctgttcccgtcaggatctgctgccagctccccgtcgttcccaggttttcacctcctttaatatcataaagctcattgcgttcccggtcctgatagacaatccggacagacttggccacattttctgtctgcagctcatagagttcccaggatacatccaggatctgaaagtttttataaaatgtaatggttttctgaaaatgcaccacatcggtgctttgctctttggtaccgtagtacagcgcactttccaccgaagtgttttttccctctgcagtcagaacaatagcctttccctctgtataatttttaagttccgctgacccgctggcaaattgagttgggacgttgtttatttttatattttttccgcagtggacatcccagataagcttttcatctttatagttgactgcgaacttcccaagaaacagcggggttacctgaatcgttgtttccctgctgtcctgctggtccccgttaaacgctttcagcacatattttgcagactttgtaaccatgaccatttcactggtctgagacttattgagttccttttcttttccgtcagagtataacaccagcttttccgcattctcggcaaaccagttgagtctcacctgttctccttcccatgcggaccccgattccggataaaaatccaggattcgtacagaatggttctgttccttcacaatctccagggcacctttcctggcatccccatcgtaatctgtcacaagaaactgaacggtacacgcaccctccttggcggttgtgaccacattttccatatcaagatccacaataatgtgatctttcatttcccagaccatcgatggcagcagcctacagtgataaaaactctcactgtccgtctcgtcgatgtacatataccatctgtgaggttctatatccgccgatttttcttttcttctcttttttaaatccaaatacttttcctttgagagtttcactactgaccagtcatctaccttaaactctatttcatccagattctgccgctctgcaaaatctgtttcttctgatccggcaggaaatataagctcaatttcctcaatgtcaggcttctcatccatatcataggttaccttcatctccaactgattttttacagcagaagcctggctgtcagaaaccgtcagctttttatctcccacattttcaaatgtaaagttcccgtccaatctctgtcactcctttcttgttgtgccggctccaagtaaaagccagccttccatgatctgtttccattcctcttcctgatctgtctccatccacggaggcttaatatccctttccgcctttttttctccaggtctctcgaaggatagaaaactccattccttttccatggctttcggtagaaacatttgaagctggctttctggggttaaaaacggtccataatataacgtaagaaacatatttttcatggctttttctgtccatgtatctaaaagcttcatttcttttacaggaagcagccccgtagtcaaactaattttccccgccggatgaaataaaacagtaatactaactggcggcgtttcttttgccgttttcatagacagagttgtcttatcatctatatacggcacgtctgcatctctctttaatctcctctgacatctgtggaatacccggtaaccatctccgtctccatgcacataaaaaccgacggttccgtctgtctgagacactttgtctccgatgcgcagcggtacttccagctgctgaaacagggattcctttttttcgccgcccgtgtaatacatgggttttggaccatcccctttcatatccaattttatctgaatccccgccagggccagaggcctgcccagatatgccaaaacctcctcctgtgcagtgctccctcctgacctgctggtccacatgctctcatccagagatttcaaaaattcatataaagtttccgggttctttttgcaggcatccagaagtccttttgtaaaacccctcaagcctgtccccatctgacgaaggagcacctcttccttctttgtctcaccgggaggatttctcagggagactttatatctgccgctttcgtccatactggcagtattttgtatgctgcaggccatggttccatcgggatgatagatatgaagacaggactccagaaggttggcccatatccatccataaaccggagacacctcgtcctcaatccctgactcctccatattccaccggctttggactctcataggtgctataattctcggtctcaataaaaatctggaagtaagcaattcctttttcatgcggagactttccgggacaatcacgtcccctaagtcatatttcagcactcttccaaagctgtcgaccacacggacccggtcgatctgtgccaatcctgcccggatgggataaaacgcctcttccggttctctctgatttatggtttcctggtttatatcctcatagagatccagtcccgccgatacacaggctgcaatggcagtgagttccgggtccaggtttttattcatccacggagccacgaccgtgctgtcccgccttgtaatcagcttgtcatgaaaaccctccagggtctgggacaaaatgttcattccggcaagttttccggcgatatcctcatacttttcatcagacagaaaccgcccaaacattttggataagtaatcaggcccataaggcgataaaatacttcttcccatcacaacttcaaaaaaatcatgtcctatctccggacctgtataatcatagtccagttcccgaaggctccagtttttcatagaagtatttcccgtctttatgtccgggtcaggataatatttcatactccactcaagaatcagcggattccaggaaggctcccagacataatttcctataggactcggcatcctgccgccttttaaattttcttcgcaggaaaggcatttctccatctccacaaccacatgggataatattcttgcgtcttctttctttccataatggcaaagcagagaatgagccgtatagaatctacacccttcagcaatcagcataccttcctccacaagttcttccaagacctgttctttaaactgtgtggtcccggtcagaagctcttttcctgaaatccgaatctcttcttcctccgtaacccctggaatcttcatctgcgcctgtcggatgatctgttttctggtccgttccggaatctttccatctactttatagttttccaggcgcttgtaaatgctgctctgatcggctccctccaggagaaatgtcagatctttcggctgccaatacctttctccggctgtctcaagcagagattcgtccttctttaacagactctcaagtcttctcgtcatctcttgttcccggccggcttctttctgtctttctatctttaaaacttcgattttttcgattctgacaaagatccctttttttgcactctcaagaaaatcacggctcatggcatatttgcgccaaagcagatagacttccctgcacttttcctttctttgctcctcatattcctgctgacgttgtctacactctgagatctcctccatcagcacctgccgctcccgtaaaaatgcatcctcttttgcctggatctttactccttttggagaggacaccggccggaactggaactgtttgatcttcttttctccctccagagcaccgtccagcttttcccattcagacagagtgccaaaaaacaaatgctccagtaccttttccatctccggctgtttcagataataaccacagagcgctgccgccgcttcctccagagaatttcccaccgctgcatttggcatattggtaccgctcggtattcctgtttcatattggccatgaatccccgtccatctgatttgcgtgacgatcccatggcacaccgtatggtctgcgggattctcattttccaaccatccggagactatgtaggtgagtctggcaaaatcctttgtgccttctctgatttcaatgtccgagagatcgtcataacagccaaggacattcttacactctggataatatcctgtgaaataaggtttccctgtactgactgccgacaaatgtggaaaatgttctcccggggatgagatcaccccgtcgtactctctcactcttcctaaaaagcggtatggaatctttgggtcatcataagcgacagcggaatattgggatccattcatcggagacatggaaagaaagtcgctctctaagatccagtttcttcttgtaagaaccggttcgctcccttctctttccaatacagagatcctggtcaccgtccaccggttcggaaagtccggataaactatctcccccccttcttcccgctggcttccatgggtaaactcctcaggaagaataaaatgcagatggacccccggaacttcctggcttttcatgccggtaaagggctggctctccaggccgtttcccgcaggcatggacctcagagtgttatagttttcattgatatttgccatgggaacagctttttttgtgccaaatagagcagcttccacatggatcggaaacagccggatctcgctaagatcatctgaaattctcacttacaggcccccttccaccgcttttgattctcccatccggaagactccggtctgtgcgttctgaatcatctccagtgcaaattctgccgatgtcatctgtggaagttccgccgtcttctttaaattcgcggctgaggcttttacatcaatcactctgtcttcttttgatttccagacaaggtctgcctgtttttttataagcctgccctcattcatatcccggactgattttttgaggacacctccctccgtcaaaaagccaaagtgaagcccctctggcggctgagcaatttcaagccgtttaatctcccctttaaaaattcccaaaagaaggtgtcggcccagggtttcaatgcgaagtgcttccagaggactgcctccctctctctcgtcatatgcccggaattcaagtcctctgaaattctccaccagcacagagttcagcaaaaatccgctgatcacttccggtatttccccgccggtatctgaaacctcttttccctggaggccaaggcgcacctgtccattttcttttaaagcccggcggtagatttccacgatcatttctgtgtcgtgggaatagtcaatggaggcattccttcccacactgcagatgccgtccagcagggccagcacccagttgtggtccacctgaaaaaaattcagactgtccggtttctgcatatccggaaccgggaacagataagctgcaggtacatgataaaataaactggcttctttcagcagttccagcacggtttccggaaatgttcctgtagtcagtgcttcaaagtaatctgaacggtcattgttttcccggatccacctttccatcattctcatccccttcctccggcttaagctccatcgctgcctggatacatgcattttcaagctgttcccttacatccttcccctcggccggaatccgctcaagaagctgctcctgctgtaaattcctggccgcctcagtacagttgttaagcctccacgagaccagatcccggcacacagacaaatgattcatagaaaccattcgtcctaactgccaggcgcaggcataacttacatccatcattccgcagtccggatcataaaagtaaaactcatccgaaaagatccggtatcttggcttcatctgcagttctccgtaggggatccacggcccgcggtaccaggagaccgttttgctgccgtctctcagatcgtgattcaaaggacaataaccccgtcttaagatgtccgcaagttcttccggctttccttttgcattcacctcttttttcaagacacctggcaccagctttttgatggctgctctgaaatcatatggcttttttgtcactgaaaactcccaggtatacagacaaatcaaacggacaaactttgcatgttccgggattgcgaggccttcgtattctctgagggagaccacatatgccgtatgagttatcttttccgctttttcctctggctctttcgggtaccggttggatacaagacaggaaaacgttccgtctttgaccagaggatctgtgaccttatcgtctaactttacctgccttacatgggtaaggagttttctctcttctgaatctgtgcacagcttaaggtgtaaatcccgtgggatatccacaacctcacaggtttcatccccggattccgagtcactgggctgtagaccaagttccccggaaacaaacgtttcagaatcttttgaactgcatatttctgatactttcatcgtccgttttgacacaccctcattctctgtacagagaaaaagcgccagccccggacttccatcattgcatgcatattcccacggcagtgttccccggttaaagacaatgtggggaaggcagtttaagaattctccttcacttcccgcagccggatggacagaatacacctcccctgggtccatacaaaatcgtttgcccgtggcagtcagatataacgtctctctgcttttcttctcactgccgttttccatgatttttgtatttaattctatatccagttcataaaatccactggtaagctcgggcaggtcattgtctgcaaatctcatgttcacgtccatagccggcctccttctttcttgtgttccctgcagcctgtttttcttttctccacaggcgccaaaagaagctcttgtaagtgttctgcaaaatgctccgtctgtatctggccttctgtcctcaccccatattcactcaattccaaaagccaggttttcctcttatgatttctgaccatcgtttccgccatatcatcaccttcaaagtctttttctccgatagaatttacaggttcccatacatagtggacagggcactcatacctttcattttccaaaagctgagacaaacggtaccacctttgttttcctcccaaatccggtggtatacaatgtcctgtcttatctcccccgcagacggatattcccatacatgcatctcttatcatatcttggttcatgtcaggtttttcaggattccataatgcccttggaacatttttatagagaggtgtttcctttatctcacattcttttttgcttccgtcagactggtatcggtaaaaatgaatctccagcagtgcatcaagacttgaaagccccatcgggtaaactcccagccccagatccttatgttcctttacacctccattcatctgtaccttatttacgggaacagccgtctcaatctctaactgaaactgcctggcactgatatagtgacaggccctccctcctatttgttttttaccgagataaccagccgcagcattcagcctggcaagcttcacggcttttccgttcttttcatttacatcagaagctgagaggtcccctgtaatgccgccgtcgaaatccggaaggaactcctgacggaacgttttccagtcaagcttgggcggctcattctggctgccctggttaaagtgaatcgtaaaggaaataataaaccatttaatatgtgctgtccctgaaaattccggcccccataaatgcagatcggctcccagttcaatcttaaaagtcttgtggataaaccaaagatccaaacggtaagaagctcccacgctcaccccaatagaaatatcatagtgaaacggtttccactggattaaaaagtcagcgaaggcgtggcaccacgctttcaatttccctatgtgatagttgagttccagctttccccctgccatcaggcagtttggcgtcagggcaaagtaagcttccccgatgagttccaggtgctcgctgatcttccagtttaatcccaccctgtccacggcgggataatgtcctctgttgaaagaaggatgataccctcctacagacagtacaaaatctcctgcatacattcccttgaaccaggagtaaaaggcaaatccccctgtgagcctggcgtcctttgaaaacagataggaatcatttgacatagccccctcaatcaacagaatcccatcgtccggcgagaacactgcccgtagattcaggcacccatagacgaccggatccgcgcttttgggcggcagtgaaatctcggatgtgcccagcagggaaatctcaaattttgttccgaattcaacgttgacgataaccacggattccaccatgccaaaggaagtaaacttaattcctgctgtgagaaaattcataccttcacacggttctatatggtcactcagggtcgtaagcgcatccgccgctcctgtccccggctttaaggtcttgctggttcctcttgcagccgccacaaaaggaaactccctcaccccggaaagctccggtatcctgatcctgcggttcagtccgaatcctgcacagagacccgtgatataaaaacacggcggtcccccaaacgcatagtcaagcatcagatagacaaaaaaggagggcttgtccgttttttccgtcaacccgtaggaacccagagctagaaaagaaaacttctcaaatgctaccgtaagttctccgttatagagccgccccggctttgccacatacaatccaccggagatcatcagcggagattttttaacggtcactgccattccctttaacccaaatcggaactcaaatttcggacccggcttgatggcaagagagagttccatgaaggtaagtgtcagaacagagagggtgatccctgcgtccagacaaacttgaatggctccatctttaaatacccctcccactcgttttacaaaacagggaccgatttttttgtttagttccatccagtggatactgcttttttcttctttggaaggaaccggcggctttggttcctcaatggcctgttcgggaggttttacctcctcgtctccaaacttatatgcaattcccgaaaatctggcttctatgaggcactgtccctgcagccctccctgtttttgataggaagcctgcatataatggaccttgatagtgtcctgctctcctaaatatttgcccatcactggcagatcatgaagcttacaggaaatttcgggatataatctaagactataaatttcttccttcatttttgcggcaaacacaagcctttgattctctgtggtactgatctccatgaagatctgcttaggcccggctttatacatcacaccagcccgcccaagttccagctcccagttaagaaattccggcagactcacagacaggctttttaccatatccgaaagactcagcttgtgatactttttattctcccagccagctccaagacaaagcccatcttccccatagacaatggacgcccggaaaggttccccggcgatctgtaccctcgtttgaagtgctgcctgaagctttgcttcctctgccacgccgtcacctccgcctgcaagattgcgccatcagcttcaaataaacaaaaagatccctcaatcattgaaggatcttctaaaaatgaatttatgtatttgtgcctgtttaaactcctgatgtcatgtatttttacgaagaccctgcagttttttacaatgcttgtgttttactatatcggggccttcgaattttttcaatcattttctgtcaataaccgatcaggataagtgaatgactgatgtcagataagatttccattctgtctctgggtaactgcccttaggactttttctttgatctccctatattttttctccggaataggaagctcaatcccttgatatatgacaagatggtaccttctgatgcttatgatatatctggaattcacaataaaactcctgtgaaactttataaacccttcacctaacttttcctccagcttggagatcgactccctggacaaaatatccctgtgcagacaatggatcacactgtccgtattttctgcctctatatatacaatttctttattccatatcacatgagtctgatcgtttttcccgcagacgatgagacgccgccgcttttgtctgagcagcctttttacatattggaatgtttcttttcctgctgaatgcggaaagtattcgtctattttctgaaactcaatcggattcgagacatgaaaatgcaacagccaagactgcctatcctctgtcttccatataaaagtgatacgctgcacggcgctgagtatctcgtcgctctcccgcgaggtggcaaccttcatccaccctgtcacgatatacagattgtcgctattgattacggtttgaaattcattctcaagaatctcacatatgggcacatcaatcttcctgatgtactcggaaacatttttccgtccgttgatgtactgtccgtccgccgcgccgatccatgtcacatctgagtgaagttttttaatgatcttttccggatcctgatgatagaaagcctccatcacttgtctggtcagttcttctgcctgattaccaactgagatcatatccagtcctccttttcgttgcgccgggtttccccgggaaatataagtccacagcctgtattctctcttttccattatatcacatttagtattggtccctgatttggcctggataaacgttacaatgtcatgataaaccaggtcgtaatggtactatttggcagctattttcagccaaaaaccttgtataattttagtaaaaggacgttttatgtccaacttctttgacacatttttttataaaaatcaacatgtattttctaccattgaattggaaacatctatttttctatatataatgattactgcacaaaagaaatctaaagaaaaggaggaaggcaatgtcattattttccgagaaactttcttactatatcaagaaatccagattgacactgctttacttatcctcagtcagcaattttgacgtcagttatatatcaaaaataaaaaaaggggaacgtctccccagaaagaaggaacatctggtttctctcatcaacgcacttcggctgtctccttctgagaaagaagatttatgggatgcttataagatttccttgattggagaggatcaatttcttcaatatcaggcagtgaaaaagtttctgtcatcaatctccggtttcaacggtgattatgccatctgcaagtttcaacatagtcctctcaccaattctgtctattatgggaaaacagatgtcaatcatattgtgaaggcggtgttagaatcggagacatccaaagaaaacggttttatccggattgttgcccagcccgactatcagtttttaatggatgttcttgtctctgtcagcctgagctgccctcaaatggagattacacagatcatctgtcttcagaccggttctgaagctgataagctagtgtataatgtggagagcctccggtccatgtatccgctgctgtcatattccgattcatactgtgccaagtattattatgatgatgttcctgctcatattaaccatatgaatgtaatgccatttttcgttttaaccagcagctataccgtatctctgtccgctgattacacccttgctgatatatcatcagatgccaatcggcaggcactgtatacttcgatttttcagcaaatgttatcttgtacggataatctcatatgcagggacaaggattgttcttttctccccaagaacccggtagaatatacttccagtgagacgcctgatttagcagttctgtcagccgttccctttcttttgcctttttattctgagagagctttgaaggaaatggttaggaaagacatctacgattttgaatccaccacggaagctgtgctaagatacgcacaagggataagaaagatcatgcaggcctcctctaaattcctttgtttctttacagaagaggggtttgaggaattccttcagagcggttatctgcccgggctttcaaaagatttatttaatcctctaagaacaggggatacgatttatgccctgaaacagttttgttccaagcaggagcttcgtcatcagactcccctgctgctgaaaccaaactgtatcaccctcagcagtaatttcaggcttttttcagatacttgttccaacgctcttgtgtttcggaccgctaaaccatttttgttagaagaacatagtcttgctgtttctatcagagactttttcaaacacgtcattgagagcgaagaggtatattccgcttcagaaacactaaaatatatccaaaagcagattctttctctggaaagacagtaaaagaccgggaaactgaacttcccggtcttttttatctatctatattttttctgtgcccttcttccgaaccagacagacacactagtccctatgacccagccgataggccaggctgcccagatccctgtggccccgaacgggacagacagtatgtaagacagagagaccctggcgatcaaatcggcaaatgtagatgccataaaacctttcatctcactcattccccggagcatgccgtcaaacacaaactttacactgaccaatgcatagaacggggcattgatcctcagaaaagagatacctgctcccatgctctttacagcctgcgcagagctcccttcaagaaacagccccatagcctggcggctgaagatcagacatgccgcagagaagaccgctgccatagctacaatgatcttaaggcccgctgccgttccctccttcgtccgctgccactttccggctcccgcattctgggccgtaaagctggacaccgcgtttccgatggttccaagcactgacaggatgaagatctgtattttaaatccccctgaataacctgctaccaccactgaaccaaaactattgatccgcccttgtacgaacagctgtccaacggatacaaaggactgctgcatgatactcggtaccgcgatccatgtcattttcctcagcaacagagggctgaacttctggtagcttggcacctggatcttggcattctttcggaatacggtcaccaccgccaggacggaagcgattccctgggcaataaaggtcgcccaggcaacccctgcgacacccatagaaaacgtggtgacaaacaacacatccaggatgatgttcagcaccgaagaaaagatcagaaagatcagcggtgtgatagaatcacccagcgcagtaaaaatggcatttgcaccgttataaagcatcaggaacaagatgcccatgatataaatcctcaaatacagagccgaatcctcaaatatatcagatggggtggacatggcactcatcatccatctgcatcctgccagccccagcactgtcagaataacactcatgatcacaattgtaatgactgccgtagaaatacagctttttactcttttatattttttggctccgaaaaagccagatatcacaacgttgactcccatgcctgttcccacggccacagcaataaaaataaccgtgatcggctgggaagcacccacagctcccagtgcacctactccgataaaccggccggccacaatgctgtccacaacactgtagacctgctggaatatcatactcaggatcattgggagtgcaaattttccgatgacctcaaaaggagtccctactgttaaatctttcatttcttcctctctttttgcacgcatggcacacaatttattacattcaaaaacccctctatcaatttagaggggtttgtcataactttaactattctatttaagcaaacttgcctgtgtcaatcttaactccaggtcccattgtagatgtgattgtcacattcttgaaatactgaccttttgctgctgacggttttgctttgataatagcatctattaacgtctggaagttgtccgctaactgttcttctgtaaaagaagctttacctactggtacatgaataatgttgttcttgtccagtctgtattcgatcttaccagctttgatatcttcgattgcttttgtcacatccatagttactgttccggctttcgggtttggcattaaacctttcggtccaaggtcacgtcctaaacgtcctacaatacccatcatatccggtgttgcaacaacaacatcaaagtcaaaccagttttctttctggatcttcgggatcagttcttctgctccgacaaattctgcccctgctgcctttgcttcttctgcttttgcatcttttgcaaatacaaggacacgaacttttttaccagtaccatgaggcagtacaactgctccacggatctgctggtcagcctgacgtccgtctacaccaagacggagatgtgcttcgattgtctcatcaaatttggcatttgctgcctgtttcactacagatactgcttcctgtacatcgtagagctttgttctgtctactaatttggcagcttctgcatatctttttccttttttcattctaaaaatacctcctgtggtcatatcgggagcaaccctcccactttctaaatattatatttaggaagttacactcgactaagcgttcaggcttcgtcttcgactcgccttcactgagtctcggtaacggctttcacactaaactcggcctgcgctggcttgccctcattaagtgttcaatgcctattcttccacttcgattcccatgcttcttgctgttcctgcaatcatgctcattgcagcttcgacagatgcagcatttaaatctttcatcttggtctcagcaatctgctgtaaatctgctttggatactgttgcgactttctttctgttcggctctccggatcctgactggatcttgcaggctttctttaataaaaccgctgccggaggagtctttgtcacaaaactgaaacttctgtcctggtatactgtgatcacaacaggaattaacaggtctccctgatctgctgtccttgcattaaattcctttgtgaactgtacgatatttacaccgtgctgaccaagtgccggtcctactggcggtgctggtgttgcctttcctgccggaatctgaagtttaatatatccttctactttctttgccataatcgttaacctcctgatgattgtggtaattacgggagatatccctcccaccttgttacgtgcagaggtcttgttatttactctgcttttttgatatctaagaaatcaatctctactgatgtggcacgtccaaacatttctacctcgatagtcactgtctgtttgtgctcattcaccgtggtaactgcacttgtcgtaccttcccaagcaccggaagtaacaacaatgatatcccctacttcaacatcaatatcaattttttccttcttaggcgtttcttcgtttgtaccgccgacactgattcccaaaggccgcatctcagccggggtcaatggaaccggtttggatccagggcctacaaagcctgtcacacctctggtattcctgacaacataccatgtgtcgtcattcatgaccatgtggatcagcacgtatcctgggaacatcttcttggaaacctgtttttttacaccattcttcagttccgttacatcctgaagaggcacccggacttctaagatctgatcttgaagcttacggttctcgatcgtcttctcaatattcgcttttactttattctcgtatccggaataggtatgaactacataccaatttgtttctgtcatatgctctccttacctttaccctactaacatctttattccatattgaagtcccaaatccagaacagcaataataataccaatgataatagcacacacgaccacaacgccggtttctttggcaatgcgttctttagaaggccagatgattcttccgaattcagatttcaattctttgaaccagctggttttgcttgatttgctggtattcttcatgttctcacttccttaaataaacgtgcattacttagtttctttgtgtaatgtgtgttttttacagaacttgcagtatttttttgtttccatacgttccggatgtgttttcttatccttcatcatatcgtaattacgctgcttacattctgtacattctaatgtgatttttgtgcgcacaacttccacctccattgtttttaaaataaggcataaaaaaaagacctcttccaacgctaaagtctagcttacacattgtagcatggaagaggccggccgtcaagccttgttttaccttatgtacagcacttttttaccttgctccagggatttttttacatcgatcacattctggtttgaactgcccctccaaagaagagctgtgtcttttaagtcctccacgaacggtccgtccaccagcacgtccacatttttcacagaatttagcatttggacatcctcccactggaatccagtatacatccatatggtcttctctgggaactttcccttgaattcaaggatcagctcttctaccgtctcccggttctctgggtgcagcggatctcctccgcttagggtgagcccgctgatgtaatccttgtcaagtgcctcaaacagctcctctttggccgcctggtcaaactccacgcctccctggatgtcccaggtcactggattatggcagtttctgcactgatgagtacagcccgccacccacaggacggccctcagaccgtctccatttaacatatcgtccttcgtaatgttatggtacctcatgtcttccctctctatgctaatatcatccacagccccgccgccgcaaacacaaggaatggcaggagacgttctgtccccagcagcgaaatgagcggctgcggtatgtaaatgtcctcaggatttgatggatccaggagtacttctgtctcctgaccctcttgaaactcttctttttctctatttctgtacagccacagcaccgaactgtattcctttccctcatatgtataagtaaatacaggattgttcatctttaaattcagataatttacatatggcttctggccggagcataccgcttttacagtgacagaatactggcgcctcttcagaaactgctttgcagccggccgaaataagatccctattcctatgatcaaaagtatgcttccaacataaaccatagcagccatcctttctacatagataccctgtcagcgatctccgccatcttggcatcattcagtcttgtatctccctttactctggaataagaaaggtagccgttcatccgatcgatcttggtcaggttcttgcttccgcagaccgggcatacttccatctccagttcttcatggccacattcatcacagtatgacagagaaagattaactccttcgtagtaccccaggtccatggcacgccttaccagtgttttaatagcatctttgttgtagctgactggatacttcacgtattggatctttccgccgttacatttctcccagaaacgtccttcaagattctgtttttcgataggtgtcagctcttctgatacatggcagtggaaggaattgctcacatactccttgtccgatacattctcaataactccatattttttcctaaactgttttacctgcagtccgcacaggttctccgccggtgtaccgtagatagcatacagatgtccgtccgcttctttaaattctgctacctgatcattgatataattaagaacctccagggcaaactccccgtcctccgcaatagactttttgttgtggagctgctgcaattcgttgagggctgtgatgccaaaggatgccgtggcagattcaagcaacggcttgatcttgtcgtggagtcccagatgcccccctaaaaatcctccttcacagtacgccagaggattggtggatgccttcatctctcccagataatcgtaagtccttatatggagttcacggatcagattcaggtaatagtccaatacctggtaaaagtccttgctctcctgctttgcctttgcatagatcatcggcagatgcaggctcacagctccaatattaaacctccccacaaagacaggctcgtccgtctcgtccaaaggtttcgctcctcccttttcgtaccaaggagataaaaatgccctgcatcccataggactgacaatctttccatatcttttgtacatatcaggtacataaccctcgcctgtaagactcagccagtccggatacatggtcttgctggaacagcggatacccgcctcgaacacatcctccagttctccgcccggtccgtgcagcttctcgtcataaagaaacacaatcttcggaaacagcaccggttttttatgtccctttttgccctggccttttcttctgacatccagcatggtgatagatgccatctttgcgaaacgtccggtcccggttcctgcggacactgtgatgaacggatagtctccccggctggaagacacactgttaaacttatactccagcccctggaatccctggcagaactctttctgcacgtcctttaaagactcctcttccgccctttcccgggaaagccccagtgattcatacttttggatccctttttcataggacttttcagcgtatggttccaggatcagttcaatattcggcacggtaaacccaccgtactgctggcttgcggcgctcaaaacgatatctccgatgacatcaaacgctacatccagtgtcttaggttcattgtaccatagattgcccatctcaaaaccgccttttaacacggcctccacgtcaaacagacagcagttcatcgtatctctcctggccgacatatcatgaatatagatatagccgtcccggcaggcctgaatctcttccgtggtcaaaaagaacttttggtacaaggatttattcagttcattaaagatcagactccttttggtggataccagggcactgtccgtgttgctgttttctttgtctccgatgtacatgatggactggctctttttgtagacgtcatctaacatctccacaaaatcctgcttatagttgcggtagtcccggtagcttttggccacatctggattcactctctcaagagctccctccactacattgtgcatctctgtgatatgtacttctgattttccaagttcatccacccttaccttgacaaacctacaaatctcctcaagttcctcatccgtaaacttaacaagtgcgcggtaggctgatttattcaccgcagtgaccactttttgtatattgaattcttcttttgttccgtcttttttaactacccgtaacatacctgctcctccctgactgttcccaaagcattgtcctgcctgcggtatatcctgcatgacgcaggagacaccgcaggcaggggctcattgctattattttcaaaacgaagtgggaaatcccactttctttaatggtcctctcaccctttgagaggcttatccactttatgcgccataggcggtttgacaaagccaaataccttctttgcgcattttgttcgttaaacattccaatggaataaaaaacacaatatctagtgttgtaaatcaattacttgtactatattgtgtgtgaatgtctccatcttatcatttcataccagacaagtcaaggctgaattgtgtcaccttctgccgtaaatcctgccaaggctcagatccttgggcttttttacttttggagaactttcaataccttttgccatgtattccccgaaggagatcggcaggttcttttcaatggaaaacagttcttttagtgtcttcctgcttttcagaaccagaacggatttggcaatatccgaatggtctaaaagttcctctatcatagtatcatccatttgtccgttggtaaatacgatcacttttaaatgtccaaaatttaatttcttaggctgggagcgttcaaacttctgattggcatcattcagggatttacctgtgtagacaatagacttagatggtacttttgtcccctggttgtcctgggccttcgtaaaatcagcacaggaataatcaatcagatagccatgttccgtcttttcaatccccatagccagcacatagctgctgtcctcgatatctccagcctccttacaccccgcaaggcccatacacatacataaggtcaggacaaggctaaggatgatcttcttcatgggcgcctcctctccgttctatccaaaacaggattaagggaataaagattcccagcagcagattcccaaacaaaaacatggaaataaaattctcccaatagcggatggccgggatcaaaattcctgaaatcaaaaacaatcctccgtaggagatccatctaccccatttctttctgcctggaaacgctttttcaaagctccagttcccataaaacagataaccgctcagcacacagaatacccctacgatccagaaagcgatcagaaaaatgtccagtcttgccatgatgcctcccggcatggccacattctgtgccattgagatgacaggaaaagaatctcttttaatcatggcaagtcccagactgcccgcagtggctgcaaaaactcctgctgacaaaagaatcattcccagaagtgtctgcttcttcatacccttttctttcatatgcccctgataaaaccagaccagctccataggatggaacaaggccagtacatagagtcctcccaccaccaggtttttcggctcaaactgccggatcaaaaacggctgtactgaaaattcggtcatactaagaaggagaataaagatgaatgggataaggataaaccaaaacaatccttccatgactctgcctctgtcgtctaaaccttctccattcattcggaatgccaaaaagattaccggcaggccgatccaatagatattcatgtaaggtagaagaaaagtccttgctaagatcagcatataaccataaaaaaatgcggcgtttacaaaaaaccttacataataaataaaagaaatcaccctgtgtttctccaggacctgttccatggtgagggatccttctgtcttttgtactatccaagggtagcacgcagctgccaaggcacccaggatcacagtataaagaccaatctggccggatgttaaaacggcggcctgaggaaggaacattcccactccgcagaacgtttccagaagaaagatcctgctgccctgttttttagagatttcaagatttgccgtccacatgatcttccctccttccctgtctcttttttgctccgtcttttgtaaaccatggcctgaagatcatactccttataggcctacgaataagatagtcttcccacgggtccgtctcttccactgtggcggaaactgtcggaaacaaatatgggattccatagctggtcaacttcattaaatgaatcgcgatggcgaggaagcccaggaaaaagccataaagcccccatatggcacaggcgatcatgatagaaaatcttaaaagacgaaagacccccgcaaagctttcattcggtatggaaaacgatgcgatcgccgtaaacgcaaccacgatcaccacaatagtgctgactatattggcgtccactgccgcctgtcccacgatcagcccgccgacgattccgatggtcccgccaagctggcccggaagccgtatccccgcctcccttaacaactcaaaggccaattcaaggagcagaacctccacgaccacagggaaaggcacgccttccctggccgatacaatggacagcataaacggtgtaggcaggatctccggatgataatttgcaattgcaatataaaatcccggcagcccaatggcaataaaggaggacaaataccgaagaatcctcgcaaatgtggccacctcccaccgattataatagtcatcactggcctgaaaaaagatatttaacgttaccggcagaacaatcacttccggtgaattgtccaccaccaggactaccctgccttccattaggccgctggcagccttatccggcctctgcgtcagctggtactggggaaaaggtgtcttcgtatcctgctccatgagctgctccagcattccgctgtcaaaaataccgtcaatgttcagctcatcgagctgctttcttatctctttgaccacttcatccctggcaagatcctcaatatacatcaaggccacatccgttttacttctcgtaccgatccgaagctgtaccaccttcatcctggtatccctgactcttctgcggatcagtgccgtgttggtccgaaggctctcattaaaactgtccttcgggccgatcatggctacttccctgtcagcctcctgcactcctcttgtgggaaaaaacttgctggatataaagatcgcctgttccatcccgtcaaaaaacaataccgtgtctcctgacaaaactgcagtgacagcctcatccatcgtagcgatcattttccggtctgcgctctctatgacccacgatgtcacagactccttcaggggctgcaacggttccttaagaagaggttccagcacattttcctgaatcatatcagcttttgcaagcccgtcggtatagatcacatacatgccggtattttttctcttccctacgttaaactttttctttacaatatcattacagtcagaaaatactgcttctagataagcaatattcagttccaaatttttggatatcctgcccttcatcttatgatctctatcatgaaatcggtccattttcacaccacctttttaaagtagtatgggcaaaaaaaagaactctatgcgtatgcacagagtccttcttaaagcttttaagctctcttttcttcttcctggatctttttgatcacagtctcttcctgattgtcaatgtggcgcttcatgatctcctgagcaccctttttgtcaccactgaacatagcatccaccagttcttcgtgctctttcatgagcaccgcatggtattccgtatccttaacatattccagccgataccggtagatctgttctcttaggttattgatgatctgtatcagccttttgttcttggtagcttcaaatacggcatcatgaaattccacgtcacagtctgcgatcctcggattgtcgcctgtggtgatggcttcccggaaattgtcaagagcggtcttgatcttctctctggaatcatcgtccagccgctccgtcgcaagtcctgccgccagttcctccagtgagcttctcacctccagtacatctcttaaatccttctccgtgatcctggccacttccgcaccctttctcggaatcatgacaaccagaccctcaagctccagcttccgtatcgcctctctgactggtgtacggctcactcccagccgattcgccagggcgatctccatcagccgttccccgggcacaaactctccggtaatgatcgcctgcctcagtgtattaaatactacatccctgagaggcagatattcattgacatttacttttaatttatcactgctcatctttcgttccctccaattatgattctctattgaccggcggcaccacataggcctgctttacatcgtcaaaggatttgagattggcaagcgctgtgcgcgccttgtcctccgaagcaaaaataccgaaaaccgtcggtccgcttccgctcataagggcattctccgccccctgctccagcagaaaacttttaatctcatcaatcacaggatgtcttgggacagttactgtctccagtacgttttccattctgccggtaatcccggacagatcctgattctctatggcagagaccataccgtcaatgtctggatgcgacgcaagtccgggtacatcaaggttctcatacacagcctttgtagagacgctgatcccaggtttcgcgatcagaatgcaacagtctggtatggcaggaagcctcgtcagcttttccccgatcccttcggccaaggcggttccgcctatgacacagtaagggacatccgctcccagactggctccgatctcacagagcccgctctctccgatcccaagatcaaacagctcattcatccccctgagagccgcggcgcagttggaactgccgcctgccataccggcagcaatcgggatcctcttctccagataggcctccaccccgcctttcagcgcatacttttcttttatcgccgcgatagcctgatacacaagattctgttcgttaaccggaagaaacttaagattggcggaaagtgtaatggaatcaccagaagtctttttaagctccagccggtcaaatagacccaccgtctgcatgatcatcctaacttcatgatacccatcatctctccgccttactacatccagccctaaatttaccttgccataagctttcagaactatcctcttcatctgtactcctcactgtcttctgccattgaagtattgtattgtatacagaacattatagtattgttcctataaaaatgcaatcctatttatcaattccagccaatttctttgacaatcaacagtttatcccctggtttgacttcctcaaccccttcattctgatcacggatatcatccaccgtagtaaaataccgttttgcaatagaccagagtgtatcgccgtccttcacaatataacccacgattcctgggatcttctgcagttcttcatagtctagtggctgctcgccgacatttaccatgatttgttcagcctttttgtggaaagagataaaatcaaacaccacgttcgctttgatctcaatctcgtcaccctcggtaggggttgcgctgatctgatccagcatcacatccagctggtaatcatcatctttcatcagtccttttgcctcaataaagaaagaaaatggttccatgtaggagctgctcatgacagggttctggtcttcactggacaagaacagcacatcagccatcaggactccctcaacctggagtccctgttccctgacctccacatcgtcaatattgcagcttcccttcaccgacaatacctgaagaagcttacccggctcctgttcgatcgaaaaccgttttgccatcttcattgttgcttggtttttgcctataagagattcaaaggagaaatctctgaattccggtaccagagtctttttcatcgtatagcagtctcctacataggagagcacctgatcctcatagaccttgatatcacattccaatgtggcgtctacagagataactctctcctccccatccacatccgggcggatctccagctggtgattgccaagtgagatatgaatcttgccaatcatccccggagcacactcataacattccagctctgtgtgcagagggatctcccatctggcgtactgaaccggcagctgctcatcttcccccagatacaaaataaatacatgcatatccccctgtatgtcaatgctgtggtctttcagtttcccctgtacattctctaactccacctggctccagaggatctcgtaaatattagacttgttggcggggagtaccaactcctccttcattcttgcaatatcctttttgttgacgatcagatctgttacctgcacttcttttttcagggcggatataccatcccccagaacatcgatgattccttcttctttgatctcctcattgacatgcagggtcagggtcagaaggatccttatgctcagtttcctggaattgatcagcaccgtattaatatcgtcaatgacataagataccttcacataatctgtcggcacagcgccgtccatatgtataaactcttcaaatggaagaacgaagtccaaagactccagataggtcctggcatcaatcgttccataaagtcctgagaaatggaattctcccttgatccggatacggtctaccatcatctccgtctcctgcatgatcaccagtcctttggtctggatcatcttctccacatccggttttgtgtccggcacattgcagtcctggtctatcgtgatctgtacctgctttcgttcttttgctactattccataaaaatcctttttgttaaaatccataaaaaattcctccctgtcttgtatatacaaatatattcagacaggaaggaatctattccttcaagattaaaattgtatccggtaaatgtcagccttccagcaacatcatcctgacatcttttgtgatgacatcctgataactgaagctgaccgtcttgctcttagagctgctgctgtcatcctcaatctctaccagaaaaatattcggatatgtctccgtaatgactccctgtgaagttacaaacttatgtctacctttatttgagctgatcttgattttgctgccaatgcgctcctgaattgactttcggatgcactgaatatccatttgtgtcattctttcaccccattctatctatacagaactcgtgacaccttctgtatactgtaaactttattgtatcattataaccgaattctgtcaaatctatacatgggatgtccagaatcttacacttcctgagaattattttcaggttcagcaggctgctcatcctgcactaaaacttcctctgcctccaaggatccgtcggtatccccggtttcttccacatcagaaggggcatcttctgtctcatcagagataccttttttctcgttgaatattttcataaattcttttccggtgattgtttccttctcgatcaagaactgggcggcttcgtccaggatatccatgttggcacgaatcagctccaatgccttggcgtaggcttccttgaggatgcccatgaccacttcatccacctttgcggcggtggactctgcgcagttcatcacaggacgcccatccaggtatcggttgctgatagactccagccccataagcccgaactcctcggacatgccgtattgggtcaccatagctctggccatagcagtagcccgctcaatatcgttggacgcaccggtcgttaccgtgtggaacttaatctcctcggctgcacgtcctccgaagaaggacaccaaatcagccagcatctcatcctttttgttcagatatttctcttcctccggcctctgcatagtatatcccagggctcccatggtcctcgggacaatcgtgatcttctgcaccggctcagactctttctggagagccatgacaagcgcatgtcccacctcgtggtaggcaacgatctgcttttcttccttgccgagaatacggtctttcttttcttttcctgcgatcaccacttccacggcctcaaaaagatcagactgtgagacatactcacgccctgccttgactgcggccagcgcggcctcgttgatcatattagccaggtcagatcctacagctcctgaggtagccagtgcgatctcgtcgaagtccacactctcgtccatcttcacgtccttggagtggaccttcagggtctcgatccttcccttcaggtccgggcgttctacgatcactctacggtcaaatcttcccggacgaagcagagccttatcaagtacctccggacggttggtggccgcaaggatcacaagacccttggatgtgtcaaacccgtccatctctgagagcagctggtttaatgtctgctcacgctcatcgttgcctcctccttgtatcccattatcacggctcttacctatggcatcgatctcatcaataaaaataatacacggagccatggattgggcctgcttaaacaggtcacgtactctggaagcacccacacctacgaacatctccacaaaatcggatcctgaaagtgagaaaaacggaacattcgcctctcccgccaccgccttggcaagaagtgtcttaccagtacccggaggtcccaccaaaagtgctcccttaggaagctttgcaccgatctttaagtatctgtccgggtggtgcaggaagtctaccatctccgtcagcgactccttggcctcctgctgtcctgccacatcggcaaaggtcacgcccgttttcttctccacgtagaccttggcgttggatttcccgacgcccatcattccgctctttccacgcatcataaacatcagtagtccgaatatgatgatggccggcaggatactcacaagaacactcataaagatctcagagccatccttagccttggcctgataattctcgatccctgccttctccagccggttgaccagctgatagtcaggaacaggaagctggactactttatatgtagtcttatacagcggattttctgattcttttggcactacagtgatgacatcactgtcgaatacgaccttcttaacttcttttttctcgatcatcttgacaaatttgccgtaggaaatctcggtttctgtaccgtttttccactttccgacgacgaagttgaacaagacagcaactaaaatagatgtaattaaaatcgatatgatcatctgtatcgaattcttgttatttttatctggtttcttctgtctgttatccacgaacgcttttcctccttagatctcttcaagcatttataaactccattatatggtttcactgcctcaaaatcaataaaacaattctaaagtttttatgatatatcacaaaaacactacatctttttcataattctggctcttgatcacaatatatggacaggagcctccttctccctgccggctcttgggaaccccgatcaaattggtatcgatatagatgtgatcctcatccatcagcatgcttttgacccggattttataccctgtgccggtctgctttccgtatccgatcacgtaatacattgtttccttcatagaatacgtaaaatgaaaaactttatccttctgttcatcaattctccccaccaattcctttggaagattttcttttctacagactgcatactctatcttttcttttgtcccctgtttttcctgctttacgcatccggtggaaatacagcacaggcatagcaatacaacaacagcaaacctcttcataggccactccgtttttttattaacctatgaaaaagtatgcctcctcatgtctttcaggaaagtattttttttatgatcggttccgcttttggctgtttttcagatatgatgacatttttcaaaaaatgctgttttgccttcgcaagtttaaggctgtcatttgcataaatgaccgcaagacaatctccttttgataccaagtctccttttttcttcatgagcaccagccccacggacggatcgatcctgctgtcttttgtctccctcccgcctccgaggagaagggaacagatgccgatttcctgagtggaaaagtccgacacatatccactgtcttctgaaaggatttcttctatataatctgccctgcagaagttctcaggccggtcggtccagcccggatctcccccctgcgccttgacaaactcccggaacttcccaagggcatcaccactggagattttctgctccaggatcaatctggcctccccggaactatgagcttttccggccatacacagcatctgtgctcccagtgtcagcacaagttctgtaaagtcttcgggcccttctcccttgagcgtatctacagcttctttcacttccagagcatttcccactgcccttcccaaaggttggtccatgtcggagatcacggccgccatcttcctgccggccttttttcctatgtcgatcatggcttctgcaagttcttctgcattcttctgagatttcataaacgctccgctgccgcatttcacatccagcaggatcgcatctgcccctgccgccagtttcttgctcataatgctgctggcgatcaatgacatttggtcgacagtggctgtcacgtcccggagggcatacaaaagcttatctgcaggagccaaatcctttgtctgccccatgatggcaatgccagtctccgtcaccaggtccataaactgctcctctgtcagagacgtacagaatccagggatgctctcaagcttgtcaatggtgcctcctgtatgccctaggcctctccctgacattttggccaccggaattccacaggatgccaccagaggccccaaggccagcgacgtcttgtcacccactcctccggtgctgtgcttatcgattttcatgcccggaatctgtgacaggtccagcatatcgccgctctctgccatggccatagtcagctggtaggtttccttcctgtccattcccttgaagtacactgccatcatcatagctgacatctggtagtccggaatactcccatttaaatagttttctatcatccagcggatctcattctctttgagtgaaaccccgtttctcttttttagtatcaaatcatacattctcatagcggctgctcctttcttcgtaccattataatctctgatatattagcagcaattgaataatttatccttattgtaccataataaaagaagagtatgtattgacttatgtacttatatctgagataataaaacagtaataattactattataaaattaggaggtcgtgtgtaatgccaaatttaaaaggaacaaaaacagaacagaacctaatggctgcatatgcaggggaatcacaggcacgtacaaagtatgatttttatgcaagccaggcaaaaaaagacggttatgtgcagttcggcaatatctttgctgaaaccgcattgaatgaaaaagaacacgctaagatctggtttaagcttttacatgaaggaatgccttccacagaagtgaacttaaaagacgccgctgccggtgaaaattttgaatggaccgacatgtatcctacttttgcaaaagaagcaaaagaagaaggatttgatgagatcgctgccctgtttgagatggtcgctgacattgaaaaacgccatgacgagcgctaccagcagttaacagagaatattgacaaaggaattgtctacaaaagagagactgagcaggcatggatctgcacaaactgtggacatgtacattatggaacagaagctcctgaagtctgtcctgtatgtgcacatccaaaaaaatacttccagatcaattcagaaaactactaatttttaaccatattaaatttgggcactgtagatttacaatcttcagtgccccttctttttaataaaatgtcctgatccagttatcaacttttttagccgacggataaatccttttttgccttttcgaattaaggcttatcttatagtatctgatggagcttttaaccggtttggcataaatcagggatttattgctgaagtaaagcacagaagccgggcttttgatcttcttagacaaaaccctgcgtttctttcctttcaggtctctgctcacaagccggtccgtactcttactgtgggatttgttataggtacactcaagatagtaaatccgcttcccataaatcttcatccttgcctgattcgcctttttggtgatacgcttcgctttttttccatttgtcttgctgatatagatcggcacactgcggacatcagtggcaaagccatttgtataaagctttccgccggagatcagcatatggcgcacatttcttctcacaaggtactttttctttgtcttcaggttataacggtatagattttgttcgttcccatatggatagacagaataatacagccattttccgtactctgccttcacagtcataccgtaagtatttttatgagtcaagatctttttccatttcccctttttcttcctgtacaacacagcagacgggctgcgcaccgcggtccccctctccttaatattaactttatagcggtgcttaccgaccttgtaattactgcttccagataaaaccgcatactttgccgaagcagcttccgtctgctccggcggcagaaggacagcgcaaagcatcacagcaagcaacacaacactgatccttcggattctgttttttcttttcatactttccatccctccagaaaaaaggcacaaaagagttctactcctttgtgcctttatcattaccttttctttacagacagcatctgcatgtttgcctgtccttccaaagctccgtatgtaaaggagatctttgttccaggttccatgtcatttaacgcatccataaccttctcatcctcaatgataaatgtcttatattctccgtttgacatcttcacttcaacagaattgctgtcaccgaagccattgtagacacccgtcgcactgactggctttttcgcttcatccttcttgtctgcgatcgtcgcttctgttgtggactttgacgtagccgcagtggttgcctcagtctcctcggtagctaccgtagaaacttcatcgctttccgttgtggcctctgtctccgttgttgcagcctctgtggtagcttcagagcttgggctcttcttgccgcatgccatcaaactgacagctccgatcatcagcatacatgttataagtaaatatttttttctcataataaagttcctccaattgcacttctgtaacatttgtaacatttagattagtaccagtatacttcatttttttccgaattacaagacgatatcatatccagcaccccgggcacatacaattagaggtagaactttgaggagggcatattgtgaacgacaaatacaaaatacttttagatcaatatgatctgcatattgattatttaaaaaggggccgcggcgaaatcatctgcggcactgatcaggggttatttgccctgtctgctacgaaactgtccgaagagcgtctggctgtcgagcatcaatggaaaaatgaattgattgaccagggatttactaaaattgaccaatatatagtaaacaaagaacatgaatttatttcctatgataaatactatgaaccctttgtaatgagaaggacttacaatggtacagaatgcaatatccactctccttccgacttatcttccgcgtgcaggaatcttgcctctttccaccgtgtatccggcaagatcccctaccgggcagattacgggacgcctcatttctctctgacaaagcattataaccagagacgcagagaacttaagagcatctggaaatacatcgggagcagaaaaaacaaaggggattttgagtatttgtttttaaaggaaattcaatccttctggaaacagcttgaggaatcttccgccaagatgaaagaactgacaggcatgagggaaggctggtgccacggttcctataaccagcacaatgttctgatggggcctcatggaaccgcgacgcttcactttgagcatttttactacggttatccacttactgacctctattattttatccggaaggctctggagaagaatgactatcagttcagtatctgcgaaaccatgctgaaaggctataataaggtacaacgtctgacaatgaacgattattctttcttgtacgtcttatttttataccctgaaaaactatggaaaatctcaaatcagtacatgaatcataaaaaacattgggtatctccaagatatctcaataagcttcaggatattgttgatttaaaagaaaaaagagagaaatttcttttacaatatcacaatttttataatgttttttagacccagataagttataataaaacataaggaaaaacgtaaaggaggagcactactatgaactatcaggaaacatatcaggaatggcttaataatccatattttgatgaagctaccaaagaggaactcaagaacattcaggatgatgacaacgagatcaaagagcgtttttacgctgatctggcttttggaacagcaggccttcgcgggatcatcggcgccggcatcaaccgtatgaatatttacgtagtccgcaaggccacccaagggcttgcagattatatcctggaacagggtactgacaaaaagcgcgtagcgattgcttttgattcccggcatatgtctccggaatttgccaacgaagcagctctgtgtctggccgcgaacggcatcaaggccttcatttttgagtctttgcgcccgactccggaactgtcatttgcagtccgttattacaactgcattgccggaatcaacatcactgccagccataatcctccggaatacaacggttacaaagtatactgggaggacggtgcacagtttacaccgcctcatgacaagggcgttaccgccaaggttaacgcgattacagatatctccaaggttaagaccatgtccaaagaagacgcggtcagtgccggattatatgaagtcatcggcgctgaagtggatgacgcttacattgccgaggtagaaaagcaagtacataatcaggatgcgatcgatcagatggcatccaaattaaagatcgtctatactcctctgcacggaacagggaaccttccagtccgacgtgtactcaaggatttagggttccagaatgtctatgtagtaccgcagcaggagcttccggacggagacttccctacggtcagctatccgaatccggaatccaaagaggcttttgagctgggcttagcccttgccaaggaaaaagatgcggatcttgtattggcaacggacccggatgcagaccgccttggtgtctatgtgaaggattccaagactggagactatatcgcactgactggcaatatgtccggctctcttctgtgtgagtatgttttaagccagaagaaggctatgagcggttctctcccggctgacggggccgtggtcaaatctatcgttaccaccaacctggtggatgcagtggctgagggctacggagtggatctgattgaagtgctcacaggatttaagttcatcggccagcagatgctgaacttcgaaaacagcggcaagggaacctatctgttcggtctggaggaaagctacggatgcctgatcggcacctatgcacgtgataaggacgcagtatccgccacagtagctctgtgcgaggctgccgcttattacatgacccagggcaagactttatgggatgccatgaccgacatgtatgaaaagtacggctactatctggataaagtcaaagcgctggagtttgcaggccttgacggagctgagaagatccagaacatgctcaaatccttaagagagaatccaccgaaggagatcggggacctcaaggtccttaaatcccgcgactaccagagtgatgagatcgtggatctcaccacaggggagacctctccgacaggacttccttcttccaacgttctctactatgaattggaggacaatgcatggctgtgtgtacgtccttccggaacagagccgaagatcaagttctactacggtgtaaaaggatcttccatggaagatgctgaagataatggtaagaagattgagacatgggtgggacaattctcataaaatatccgcagatataagacaacatttaagaccggagcagggattccctgttccggttttttctgtcctatttatgtgataaaataagtacaaagaaaccccttcaccatcactgcagacaggaggcttattatggacggatatcagataaaaatcattgtaaaagaaagcaggcccccagtatggagacgtctcatcgtacccggtcagatccctttctcgggccttcacgaaataattcaggctgtatttcaaaaatccggtcactgtctcttccgttttgagcttcctgctcagcacaggaaaataaccgatgaatcccagatggttgattcctacatgaaagaaggtcaatcgatcagttacacatatatcttaaaaggaaagattgatttcaggattgaggttgaaaagatacttcccaattacagcagccgttttcccactgtcctgaagtataagggcggatttttatccggattggaagtggaagacatgaacagccttctaaaggataacctctgtttctctgaagacggtacaagacagtcccttgagtcacataagaaaaaaatcgaagatgtctctccagatttttcggcagattccctggcggatgtctaccgccagtacacaaaggaggaccttctggagatcgcacatatccatcagctggaccagtgtacccagatggataaaaacaccttagtcacttttctgtccggatacattttacagccagacgctatgggcagcttctttttgaccctgacggatctggagatccaggcatttgaggccgcgctggaaggttattttcccattgatgatgaagatatcttcgacgcttttctggacgggggatactgtgccgtggacgaggacaatgaaatatatatccctccagatgttttgtcagcctactccgctatgaacacgccagcttttcgtgataaaagggaactcatatggaaacagattcaatactgctattactgtgtcagcatctacggggccgctccattagaccagatcgcagccctatacaatgcgtatgaagaagaccggatcacgcagaaggacttgatcaatctctacttcctgccttctccccacgcctacagcttcggctatcatgacaagatgtttgtggatgctatgcttcttgaggatccgaatcttctggaagatattatgtccatccaaaaagactatgcttactatcgcccttccaaggaagagatcacgcaggatgcatcagatccggatccctcggctctgaaatttacttcctatctgatcgaccagctggggttccagattgcggaagctacagatctgaccaggagaatctcctatatcatgaaagtcggagccgacccggagcacatttttgaaatgcttcagaagggggatgttgtcttcgcagaccaggaccaggcagatacctttgctgaaaagatgatggacctgtatgtggatacccggctgttcatagcttccggccacacccccacagaactggatcagatggagcatcaggaaacttcctgacatggttcacctttttaaacttacaaatgtttctataatagaaggtgtattggaaagcaagaaacttttcccctgaatatcatatcattggccacaaactctcaaacaaacgtgatatttttcatattcagggtacataccttctgtcaaaaaagaccccgccgaatggcggggtcttttgctgttatttggttgtgctgccgaatccgccgttgcgaacttccttggcatcatcgtctatggtcacaccatattccataaaaatgccctgtacgatcccggtcccagcttctacgctgacaacttttccttcgttggaatcgttggtgagcttgacaaagatatgtccctcattgtctgaatagaagtagtcactgtcaatgattcctaccgtattgttcatctgaagacggaacttgaatcccagtccgcttctcggaaataggttcaacacccagctttcttccatgtacacacgaatcccggtgggaatcttgatcgtctcccctggtttaagctcaaaactgatggggctgtaaaaatcgtacccggcagaacctctggtggcccgcttcggaagcttgatgctgtcaaaaatctgttttacttcttcttccggggtaccttcaaaggtatcctgccaactttctaaaaactgtccaaaacttactttatggaactgtgcaatctttttcatttggtctcctatagtctctttaataaatcttctcttctgtcttcaaatcctggttttccaagcagagcgaacatattcttcttgtatgcctcaactcccggctggtcaaatggattgacgcagtttaagtaaccgctcataccacacgcagattcaaatgtgtagaacagctgtccaaggtggtatgcgtccatcttcggaatatcgaatcttaagttcggaactcctccgtcaacatgggctaagatggttcccttcatagcgttctggttaacaaaattcattgtcttgcctgccagatagttcaaaccgtccagatcgttctcttctgcttcaagcacaatgtctaattccggctcttccacattcagtacggtctcaaagtggttggcggatccatcctggatgaactgccctaaagagtgcaggtctgtagaaaagtctacagatgctgggaagataccctttccgtcttttccttcgctttctccgtataactgtttccaccattcagagataaaatggaggttcggctcatagtttgctaagatctccatgccttttcctctgcgcatgagaatattacggattgcagcatataacatcgcagggttttcttcaaacggagcgtttaggaacatgtctcttccgtcctggaatccttttacgaactcgtcaatgtcaattccggctgctgcgatcgggagaagtccaacggctgtgagaactgtaaaacgtcctccaacatcatccggcacaacaaatgtctcatatccctcgtctgtggcaagtgtctttaatgctccccttgctttgtcagtggtagcataaatacgcttcgtagcttcgtcttttccgtatttatcattgaggagcttcttaaagatacggaatgcgatgccaggttctgttgttgtccctgatttggagataacattcacagagaagtctctgtccccgattacatcgatcagctgttttacatatgtaccactgatattatgtccggcaaagtatacttccggtgcttttcttacttctttgtccagcttgttgttaaagttgttggacagcccttcgatcacggctctggaaccaaggtaggatcctccgataccaatgacaaccaatacatcggagtcgctctggattttctgagcggcttttttaattctcgcaaactcttctttatcataatccacaggaagatcgatccacccaaggaagtcatttcccggaccttttcttgacagcaagtactctttcgcatctgcgacctgcttctcgatcataccgatctcgtggtccctgataaaatcttttgcgttgctgtaatcaaacttaattttccccatgtctttctcctttactgttgtctctcttggttaaatgcgttatctatattttaacaaattacgcctttctattcaatagtcagggagttttttcagcgagcggaattcaaatccttttgccttgagattcttgatgacagtctccagggcctccgcgttagactgggatacattgtgcatcaacggaatggctccgttgtggtaattctcttcaaaatgctggatcacatagtcctttcccggctggctgttcacattaaaatccacgtaggccatgctccagaaaatcgtcttatatccaagcttctttgtgagagccagtgtgtgctcactatattctcccataggcggtctcatgaacatatccatgtcatatcctgtggtttttttgcagtattccgcacagtcgatcagttcctgcttgttgtccctgtcagaaacggtaggcatactcttatggtgaaccgtgtggtttccaaccacatgaccttcctttttcattcttttcactaaatccggatcttcccttatgaacggctttgtcacaaaaaatgcggccggcaccttttccttcttaagcacatccaatattttaggcgtaaaaccattttcatatccacagtcaaatgtcaaatacatgacttttttatttttggcctttgtgtccacactatatgcgtcgtacttggataagtcgatattctgtgaaaactccggctgctgatgttctttgttgcgtttcagccaccatccctcttttgtattgcttccctggctgatgactttggtggactccacctgcgcctcttccttgccgcatccggcaagtccgagtatactcacgatacagaataataataaaacttttctcatgttcgatttcctgcttttttattattctattatgtatgccaaagatttataatccatttatgaaatctttcaccgcctgcatttcctcatctgtcagctcaaattccctggatgctgctgcctcctgccaatgtctttcgatttttcttgcttctctcttttcttccttcacctgctcgtcctcttttttcttctccttctgcttcacctgctcttctttttcctgtttcttcacagatttcagatagcggtttggcaggatgttctccaggaagtgaatgaggttggctctcaccagctgcttctttccgtcaaaggcgaccagcctgtccacgaatacgagaaacaatcccgacgccatgctcaaaaacagactctccgccaccaccttaaggtcagctccctctatgtacccacggatcacacccagacagcccagaaaaaagctcagtacagcgcagagtccagtgacctgttccatgatctcggaggataatccacatattttgtggtttttcatatacttgtccacaacacacggaatgttatgcagatttgcctccagctgataataactttcaaacttctttttcagtacccccatccactgctttttatttccatccatctcataggagtctttcaaaagcctgcggtaattcctccagacaatgagttttcctaaaatccccactgccaggactgcgatcaatccctgcacaaaaaatgcgttttctaatacatccatgttatttctccttcttcctttatgattcttatattataaaatcacaaggaggggaatacacggattattgacttacaaagttagacgcttctttgtctaaaataccgtgaatcagtctaattatatgctttattgcagcttcctcaaattcactgtaatttactgttgctgtgtcgtcgcacttgtcggagatagctcttacaatcacaaagggtacgtcatttaagtatgctgtctgggccatggccgccccttccatctccgcacagtacccgccaaaattttcgatcagccagtgtttcttttcgtcgctggagataaactggtcgccgcttaaaacccgcccggtaaagcattggatatccggattggcctttttgcaggcttcctccgcctcttttatcagtgcggcattcgcctggaacacagaacactccatacgcgggatctctcccagctgataaccaaatcccacggcatccatatcgtgctgcacagcatcgcttgagatcacaatatccccaatctcaatatccttgtacaggccgcctgcgaccccggtattgatcagtttttccacaccaaagctgtcgatcagtatctgtgcgcaaacagccatgtttacttttccaatgccgctcataacaacaaccgtgtcatttccccagagccttccctcataaaaatccatggaggcttttgtcttcttttttacattctccatagaagagatcagggattccacctcttcttgcattgccccgataattcctattttcataaatcattctcctttttactgtcattatttccgtctgataaaaattataacacagcttccccatctatgtattcttcgatttttgtgatataatacggattacccatttggtatacaataaaaaaatcaggaggtaactacgatggtttacaaaacaaaaggcgtctgcagcagcgctattgaatttgagatagaagacgatataataaaagacatacagttccggggaggctgccagggaaataccacaggcgtggcagcccttgtaaaaggaatggcagtagacgaggtgatcgaacggctttcaggcatccaatgcggtttccgcggtacctcatgtcctgaccagctttccaaagctttaaaggaatataaagagactcattaacatctgtttaattgatggaggtattatgaaacgaatcgtattgaccggagggggtactgccggacatgtcactccgaatatggcattggtacctgcactggagaaagagggatatcaaatcagctatataggctccaaagatgggatggaaaagaagctgatcgaagacattggtcttccctactacggtatttcctccggtaagctcagaagatattttgatgtgaagaactttacggatccctttcgggtcatgaaaggttattttgacgctaaaaaaacattaaagcatttgaaacccaatgtcgtgttttccaaaggcggattcgtcaccgtacctgtggtcatggcggctaagcatctgcggatccctgtcatcatccatgaatctgacatgacaccgggtcttgcaaataaattaagcattccaagtgccaataaggtttgctgcaattttccggaaaccgtaaaacatctcccagaagggaaagctgtacttactggttcaccgatcagagaagagttgtttaccggttctaaggaaaaaggccttaagctttgcgactttacatcttcaaaacctgttctacttatcatcggcggaagccttggttccgtagcgataaacaatgcggtcagggacaatattgatgagctgttggaggattttcagatcatccatatctgcgggaagaataacctggaatctatgcttgcaggcaaaagtggttaccgccagtttgagtatgtgaaaaaggaactgaagcatctctttgcctgcgcagacgttatcatctccagggcaggggccaacgccatctgtgagctcctggccctcaggaagccgaatatcttgattccgctgggattaaacgccagccggggagatcagatcttaaacgcccagtcattccagcggcaaggctacagctatgtactgaacgaggaggatgtcacctctaagtccctgctgaacgcagtgcacgaggtttatgacaaccgggcaagctatgtgaacgccatgaatcagagcgaactttccgatcccattggaaccattgttaagctggccaacgagctcgcaagaaaatagacggattatctaagtattccatgcaataaaatagtcaagcccttcaaaatgataggaagggcttgactatttttattcttgattattttttctgttgaactgtctacttcacgatgctctcaagctggggcaggatttcatcttccggatggctgcagccgtactgtccgatacaaatagacggcttggtcttcccgtggtaatcacttccgcaggtcacaaacaattcatactttccggcctcatggctgaaaaacatagcatcctccggtgagtgataactgctgaaggcttctaccccatcaatgccggaaacggcgatctctttccagagttccatatggtcctttaagttcactcccggatgcgccagcactgcctttcccccgctttcatggatctgagttatcacctcttccatagaagggaactttatacccacatgacagggtttatcctgggagtaataatcccagtaaaaattcacgtagggattgctgcttctgtctcctcccggacggtaaggcaggagcagttcatgttcctgatattccggtttatttaatagaacttccgcaaacatctcccctgtccaccggtttttccaaaacatagtttccgtcagggcttccatgtctttctcagacacatcaaatcctaattttctcgtcccctcaagcatcttaaccgatgcttcactgctctgctctgatatattgtcctcgatcttttgaaaagccgcatccctttcatctattccatacccaagaacatgcagattaaccccttgaaaggtgcagtcgatctctatccctgagataaaatgaatcccctctttctgggctgcctttcttcctttctccacggcccggacacagttatggtctgcaatggccatataccggatgcccttttccttgcatttttgcactaattcttccggttgaaactccccgtcatcactgtaataagaatgcatatgtaaatctatcataaaaacccatacctcctgtatatctgtacaccagtcaccttaatatataaataccgtcttttgctgattgaaacaatataaatttggacctataatataaaaaaagcgacaaaaaggaggaatctctatgcctttgcaggattgtacaatctatactgaccaggacaggcgggaagtgcggccccatggaaccatcgaattcccgtgtgccggctatgactctgtctattctgttgacaacgtcagcaggatcccttggcactggcatgaagaactggaagtcatctatctgtactccgggactttagagataagggtccccggcagatccctgcgcatgaatgcaggagacagcctgatgatcaattctaatatccttcacgaggctgaaacctccggaacctgccggcttcagtctcttgtctttcatccggatctcatatgcggctctgaaaactctgttttctatataaaatatatccagccgctcatcagttcctgtgccatagactgtctgcagttttctccagtagacgatactgtgccggaatccacacagtgcatcttaaaggctttcgaggccttttctaaaggttcaaagggccatgaatttacagtcagggaacagctctcccgcctttgttttcttctatatcaaagccatgaatctgtgatctcagaaaccacggcgaggccggaccaggattcctgccgcatcaaaacaatgattcatatgattgaggagcggtttgcggaaccattaaagttatatgacatcgcaaagtccgccaatattggtgaaagggaatgtttacggtgcttccgacggacactggggatccctcccatgcagtatctgatccgctaccgtctgtccaaaggcgcccttctgcttacaaagaccagccagagcatctcggagatctccattagctgcggttttgacagtcccagtaacttctcccggatgtttaaaaggacttaccagtgctcgccccgtgaataccggaaccgtaataaagaacaacgtgggcaggcccgccgtcctgttataatataaaatgcagggaggaagcctgattcaaaagttccttccctgctgttcatttatagctgaccctgaagttcccgttctgtcagttcctccatgatcgtttcatattttttgtccagtttgtacaggacaagagttatgatgacgacgacccagacaatgatcggtcccgttttataaatgtttataatcatatcaatggccgactggggctgggtgactgctcctgccgcagaactcagatagcctgccagtgagagaagtcccgtcatgatggctgaggccaggccggaaccaatctttgttcccaccgacccgccggcaaatatcaggctctcctggcggatatggtgcttccactgtccgaattccaccacatcgcccagcatgccaaagacaatagcatttaacggcgataatccgatacccctgatgatacagcacaaaagcatccactgaaaactgtagggattggcaaagaacacaagctgtccggccagcgctaacaccgcccccgcaagcgccatattcctcttgccgaagtgttttagcaggatagggcatacgatacacgtggatgccacgatggtcagagtttccgtcagatacagtgtactgtacatccatgtatcgttgtggaatatgtacttgcagtaatatggcagaatggtccctgtcacaccgtagatcacattctgcatcatccagaggaccaatacggcccaaaaatactgattggtcactaaaagctttaatgccttgagcgcaggtatcttttcctgcttctcacgggcttcgatctttacggtctcctggcagttggcaaaacagatgattaaaaggaccatggcgatcacagcccatatgcccatgacgatcacccatgaggactgggtatccccaaacagctttactaacggcatggtgcaggttactgccagaatacgcccgaacggtgacattcccattctcacgatactgagcatgctccgctcctcagaacttctggacatcatagcagataggcttccgtagggcagattgatggccgtataacagatggtcgtacaaaaattatacgtcacaaacatatacagaaactgcagaaagtttgtcgtgtggggcactgtgaataacaacacggctgagacggcatatggtgccgccatccacaggatccacggccttgatttcccccatttggagttggttcgttccacaataaatcccatgataacgtcagagaatccgtcaaatactctggagagcagcatgaccattccgactgttgcggcagagactcccacgtaatctgtgtaaaacagcgtcagcaccgtgctgatcatcccaaaaaccacattgcacgccgtatctccgcatccataagagaatcttgttttccatgataatttttctaatatcgttccttgcttcttttccattctcactctaccctttcagcagttcccgttcaatgcgttctcttgcctccggcgcctgcttctccatcttttccgggaatccgaacatggatacacatgcgatgttgtctcctccggctttcggtgcagcttcccttaactggctgtttgcgaagtccatctctcttaacgtctcaaaaatcccgtcaaagtccacgtctccctctcccatggctaaatgctggtgaatggtcacatccgcttttcctcttccgtttaaccacggcgggttggcgatatagcggcagtccatggtctggttgaatgtatccgcaaacagtacgtgggtcagttcttcccctgcgtactgtaacatggagcacacatcccctttgccctcgtcatagaagaatccatgtggggaagaatacacatatccaaggttcggagagcggaaggatttcaccagatcacaagtctcattgtttaattcacagaagtcatacggatgggactggatctccacccggagcccttccctctcaatgatcggcagaagttcttccatagaacggaaccacatgccgttgcagatctcctgctggttgggatccccggacagctccgtgttaatcacctgcacgcccatatccacggcgatctcaatcatccgtttccagttggctactgccatctgtctctgctcctctgtaggtccggaccagcggtacaccacgataaaggaggagatctccactccggtttcccggagtgctttcctgtattctgcctcacattccctggagaacagcgggtgtttatagaatggattgatccttggatgcggagactgttcgatgtattgataaccccagtctgccacctgatgcaccatccggttgatatccatctgctttgccagcacatccacgtcaaatgctattttcatctcatcagctccttacttataatctacccactgtgcaccctgatctgcggattgaacacagttttctacccagcgcacgccctctgcccctgcgtgtacattgggataccagaactccacatgctctcctctgtcacatgcgtccatggcctgcgcaaagcggctgtataagttactccatgcttcaaacaaaccttccggatgccctgccccaatacggtcttcctccagggcagaaggtgccagatatcccatgcctctttccagaacacgtacaggttcattctgcacttcataggtcagctggttcggatgctcatcccaccactcaatagatgccttttcaccgatgacacgaatcttctgcccatgcatggaaccgcagtttacacagcatgaccaaacgtatcccacggcaccattgtcatattccatgatggtcatagcgttgtcctccagaggttttctggactcgacgaaggactgtctgctgcacatcagccgtttgatcttcatatccggaagcatgacttcagataagtacagcggatgggttcccacatcacccagcacataggacggtcctgcaacctttggatctacccgccattttgtggaggctgtatttttttcgactgccacgttgtggaatccatgggagaactgcatattgacaatacgaatctttcccagctttccttcggcgatcagctgtcgtgcctcctcgatgacctgatgtcccgcataaccgtaagtaacacctacgattttattttgttttgcggccagtgcctctaattcctccgcctcttcagttgtaaaacagagaggtttttcacatacaacatgaagcccggcaagcaaggctgcctttgtgatctcaaagtgtgttccgttgggagttgcaatggagaccgcctggatcccgtcctggcgcttagcttcctttgcaaacatagtcttataatctgggtaacatctgtcctcatccacatgaagctgcttaccaaactctctgcccctctccgggtcaatgtcaaaggcacctgcaaccaggtcaaaattaaaatctctcattgcggcagaccggtggatatagccaatctggcttccctttcctccccctaccatagcccagcggatcggtttttcaattttcttttctccgtaatacatagttttgttccttttctgaattagatttcatatcctacactttttaaatatgtaacactggccttcacgtcccggaggcttgtgtctgaatttcttggatcacgttcctgttctatggtgatatatccgctgtactggatatcctccaaggtctgcttgatctcagggtagtccagtgcgccttttcctatgggacacatggctccttttccacagccctcaaaaaagcggatatgttttcccagaacttcccggtataccttttcatccacatctttaaagtggacataatccaggcggtccgcatactttttcagccattctgccggatccatgccggagtaataaagatgccctgtatccaggcagagacctgccagctcataaggaatgtcccttaccaccgcttcgatctcatctgcaaactcaatataacctccggcgtgaggatgaatgaccggccgcacaccgtattcatttgctttttcacagattcccctgatgtggcccatcatcgctgcccatttttcttctgaaagcctcggcgctttgtctggatgtccagccgcataatctctctcatcatgaccccagtccatgatggtcatataaggcgcagcaaaatgctggccctcatgtaccggaagcggcggaagctttgtgaccagagaacagatctcttctgtctgtctcaatacgttttcatagttttcttcactcagcagatcgtcgaagatcgtccctgccacaatggctaatccattcttttttaactcctcagagactgtctccacatcaatcggaagatatccgtaaggtccaagctcaatggcccggtaacccgcctggcctgcctccttaagtaccctctgccatggcggcagataagggttctttacatcatccacgccccagcagcaaggagctccgcagatattcatactcatgttaaaacctcctgttttgtttgttcatcatcgctttctgtaattattattttagagaaaacaaaggtcctccgcctttactattttgttcgctgtgagattaaaaacaggggcatttcaaagaaatatattagaaatgagaacaaggactccactatcttgtataagacacaaacaaagtacccataaattactcatataatgattttaaaaagatatgaaaaaccattgactctcacgtaacgtgataatgtaagatagaatcaaagatacacaacagattggagatgatgtcttgagaaccataaaagaagttgcagtactttcaggcgtcagcgtgcggaccttacagtattatgatgaaatcggtttattaaaacccgcaaaggtcaccggcgccggttatagactatacgatgatgaatcaataaacactctacagcaaatattactttttaaggagttggaatttcctctgaaggatattaaaaggatcatggaaaatcccaattttaacaaagaagaagctctgagcaggcaaaaaacactgctaaaagcaaaacgggacaggctgaacagactgttagacctgatcggcagactggaacaaggagaaacctatatgagttttaaagaatttgatttaagtgaatatatccaggcattggagcagtttaaaaaagagaatacagaggagattatgaaatactggggaagtaccgaagccttcgatgaatttataaaaagagccagggatcatgagtccagcatcgctcaaacggcggtggagtattacggcagtgttgaaaaatacacagatgccatgaaagagagcctaagccatttctctgagaatatggagaagatgcggaagatcaaagaaaaagggtatgtagaaaagaataaagacttgatggagcagctgacaagtgacgtttcaagggatgtcaaatctgaagaagtacagaatatcatcggccagatgttgaatctgctggatgaagaagaccagcctacaatggatctgggcgagaactactatgataagctgattgacggatatctccacaatccaaagctgatcgaggctatggatcagcagtactgtaaaggagcttcaaagtttataggggaagcattacaatattatctcaagaaaaaaacatgtaactctaagtttagaattatttgattgctatctgtccaactacctttttagaattagaatctatcagaagtattctgaaatcctgccctcttgtatgtattcctgctcctttcactctcatgactggtccctcctgcccctcagcttttccagatacatgttccggtaccggatcggcgtcataccaacggtctttgtaaacagtgtgctgaagtaattggtattatcgtatcccaccatagtggcaatctgggtcgccgtgagatcggtagagatcagcattgtctgggcaaggccgatccgcctgcggataatataattgatgggagtcatacccgtggcttttttcaggccgtgggagacataagtggcagagcagtgcatgtcctcggcgatcttgtccagatttaattcctctgtaaagtgttcattcaaataatccaggatccttgagataaactcttcctccctcgtctccgcggccatagcctgcggaaatgtatccagctggctggcaatgaccaccatggaggcgcagaaaagctgcgatgccagctggcctgccggattcagctcttccatcatgtaaatctggtcacacatcgtctttaaaaacggaaacagggatcctgcatggcggatatagggcccgccctccggcaccatctggtttttcttaagtccctttaagtgaaggtttgtaataccgatacaataatggccgatgttggtcttctcagccgttgcgatctcatgaaggtctccctggttataataagccacacagccttcttctatgggataaatactggtgcccacctgataggttccggtccccttatatacaagcaaaagttcacagatagattcatggctgtgcagcggacgacttattttctccggggtgctctcctgtctggatatgtataccatggctggcagctttccgtcctcaaaaacttcttttaaattctggttaatatcaaatcgaatcaaagtttcaccccttctccgtgaccacaaggtccattggcacatcatagctgtctgtaggaatctcctcccacagaagctctcttctgcataaaaccaccttcaaaaattctgtatcgcttagataccggtcataatacccggctccatgtccgagacgttttccacagaagtctgcgctgatacaaggaataatccccaggtcaatctctcgtttctccacaatgggagtatttctttttggctccatgagtccgtagatgccctgttctaactggtccatacaggtgatctgccttacttccatgattccgggagctgtgcacaagggcactcccacccgttttccctgtcggaagcattctgttaaaatcaattctgtggatacttcctttcctacggatatgtaacagaaaacagtctccgccctcttaaattccggcagcataaggatctgtttctgaatttcttcttccgaatcccgaagatatcttgtggataacttctctgttttttgtttgatctgttgacggatgtactgtttttctttcatatcctccacacctctgtctgacctttctttaccaaaaaggatagcatatgaaaacaaagtggacaagcccatcatctttccatccagccatacagaccggtactaaaacatatttgagatcacctcacctgcgatctcacagattaaatccgcttcctctctcatctgtataaatggctcagtgatacaggaaattgcaacagtaagctttactttgttcttcattgtatcctctaaaagtccggtagacattaacctttcagacagggtattcgttacgatcaatggaagcggcagtttatgttcgtcttcatgcagatatggaaaagtcttttccagacgtccaaaatcaaaatcctccaagaactttttcacaaacatctttgggtttgtaaagaactccatataataatccagatttccaagagttccttctatgtgctccaggatcacttcttcatataagtcatagatatctgaataatgcaaataaaacgttcccttattgatcacagcctccctggccagttccgtcactgtgatcttgcggatgggcttttttctcagaagcttctttaagaccctttttaaatttgcctttgtctttacaactcttaaatcttcccgttttttcatggtttcagaatccttcctaaaagttctgtattcctatctgtgaaaggtaatgaacacatcgtacgatgccgtagattaatcaacgatatttaagaaccgttgattgaataatagacgattgttgattattatattaatttgtatagagaaaaaagtaaaggagaaatgttatatgattcaaacattaggaaaaagtataaggcaatatagaaaagaatctattaaaacaccggtttttgtgaccttggaagttatcatggaatgtatccttcctctggttatggcaaaactgattgacgaaatgactgcaacttccatgaacccggtcataaaatacggagttgctttatttatcatggcaatgatgtcgcttgtttttggtatcctgtccggaaaatatgcggcaacagcgtcctgcggatttgcaaaaaatctgcgaagggatatttattttaaaatacaggattttagctttgctgatatcgataagttctcatcgtcctccctggtgaccaggcttacaaccgatgtcaccaatgtacaaaacgcttaccagatgatcatccgtattgcggtgaggactccgctgatgatgattttttcagtaatcatgagcatggcgatcaatgtaaaaatgtctctcatcttcctggccatgatcccagtcattggtctggcccttctcggaatcgcttggttttcctttccggtttttcaacgaatttttcgcaaatacgatgcattaaataattcagtccaggaaaacgtctccggtattagagttgtaaaatcctttgtccgggaagactatgagaaagcaaaattccaaaaagcgtcggaggatgtctgcaatgattttacaaaggcggagaaactgctcgccctgaataacccgatcatgatgtttgggatttaccttgccatcttcctggttagcctgatcggcgcccggatgattattagtacacagggaagtgtattaactacgggccagctttcttctcttatcaactatggcgttcagatcctgtcctccctcatgatgctgtctatggtgtttgtcttatgttccatggccgcagaatctgccaatcgtatctgtgaggtgctcacccacgaaagcagcctggtatctcctgaaaatggtattacagaagtgaaagacggcagtatccggtttgaccatgtgtcgtttaaatataacaaacacggcaaaaaggcagctctatctgagattgaccttatgataccgtctggcgctactatagggatcatgggcggaacaggcgcttccaaaacaagtctgatccagctcatttcaagactttacgatgccacagagggaaccgtgtatgtcggcggaaaagatgtacgcgaatatgatctcgaagcgttgagaaatgaagtggcagttgtactgcagaagaacattttattctccggaaccattaaggggaatcttcgatggggtgattcgaatgcaagtgacgaggaactcagacacgtatgcaggcttgcccaggcagatgaatttatcagccagttcccggaccagtatgacacctacatagaacagggcggaaccaacgtttccggcgggcagaagcaacgtctctgtattgccagggcactgttaaaaaaaccgaaaatcctgatcatggatgactctacttcagcggtagacaccaagaccgatgccctgatccggcaggccatgagaacagaaatccctgataccacaaagatcataatcgcacagcgtgtttcttccatagaagacgctgacttaattcttattatggagggcggccggatcaaagaatctggaagccatcaggagctcatgaaacagaaaggtgaatactatgatgtttatgtttcacagaacagcggaaaggaggagtaatagatggacgaaaaaaagaagattcatagttttagaaggctgatagcctatatttttcattattatccggttcagttaaccgttgtaatgatttgtatcgtaatcagttcctgcgcttcagtggtatctacattttttcttcagagactgattgatgattgtatcaccccgggaatcactggaggtttgtccagcgtgtgggttaccttcacctctatcctctgtgttatggctgcattttatgtggcgggcattgtctgtgcatttctgtataccagaatcatggccgttgtgacacagggtaccctgcggaatctgcgcgatgatatgtttaagcatatgcagaagctgcctatccagtattttgataccaatgcccacggggatattatgagtacctataccaatgatacggatgcgatccgccagctgatcggacaaagccttccggccctgatacagtctatgctgaccgtagccgttatgtttgtcatgatgctttactacagtctgtggctgacgattactgttctggtcattctaggaatcatgattgctgtaaccaaacggctgggaggcgccagctccagatacatgatgcttcagcagaaatccctggccaaagaggaaggctttgtagaagagatgatgaacgggcaaaaggtagtaaaagtcttttgtcacgaagaagaaagcaaggaagcttttactgcgctgaatgagcagttatttatcaacggggaaaaggcaaaccagtacggcaatatcttgatgccgatcctgaataatattggaaatatcatgtatgtgctgttggctgtagttggcggactgctggtttacttccatgcctctaatttctgcctgacaggcataagtccgatcacggtcggtattattgtttcatttttaagtatggcaaggcagctgtcacaaactatcgggcaggcctctatgcagatttctatgatcgctatgggagttgccggagccggaagaatctttcagcttttagatgaagaaattgaagaagatcacggatatgtcactcttgttcatgtgacaaaaaatgaaaacggagaactaaaggaatcttctgtccctacaggaatgtgggcatggaaacatccccacagagaacagggcaccctgacctacacagaattaacaggggatatccggatggaaggagtagatttttcctatgtacctgagaagctggtccttcatgacatctcattgtttgcaaaaccaggacagaagattgcttttgtcggagccaccggggcgggtaagactacgatcacaaacctcatcaaccgcttctatgatattcctgacggaaagatccgttatgacggaatcaacattaataaaatctgcaaaccggatctgagaaggtcccttggtgtagtgcttcaggatgtgaaccttttcaccggaacggtgatggagaatattcgttatggaaagctggacgccacagatgaagagtgtattgctgcttcaaaactggccaatgcagatgattttatcacaaggcttcctgacgggtatgatactgtcctcacgggaaatggctcaagcctgtcacagggacagcggcagctgatctctattgcaagagccgctgtggctgatcctccagtaatgatcctggatgaagctacttcctccattgatacaagaacagaggctttggtacagaaaggaatggataatctgatgaagggccggaccgtgttcgtcattgcacaccgtctgtccaccgtaaaaaacagtgatgctattatggttctggatcatggccgtatcattgaacgtggagaccatgatgaactcattgcacaaaagggagtatattatcagttgtataccggtgcttttgaactggagtagatcattccttatcctcttgttttaagggtatcctcaatatttgctttggctttgcccataatctttatgaaaggatgtgtttccatgaatatatccatgaatatacgttaaatgaatccgtgcctgtcggaatatataaggatttggtcatggcatgttccacatgatttccgttcagctcttagaatgcctcactccaatcatgtagaacatggacgtagtgtctgctggataagaatgacagttaaacagaaggtgccatcctacgatagtttttcttcattgtcggaaggaggcctttccagagccgactggagataatggagaaaaacacattggatttccgtacacaacatccaatgtgtttttcttttttacagttctctcgttatctcacttaaatccttcacaatgagatctggttttatatctccattctccacatctttttgggtactctcaccgcttaacacaagaatggatgtcacttggctttgatcggccacggcaatgtctgtatacagccggtcgcctacaatggcgatttcatccgggcggtatcccgtctcctgaatcatataatttaatgtatgttttgaaggttttccgaaaaactccgggtatcgtccggtggaagcctccacaagccttgccatggaaccgcagtccgggataaacgtgcctccctccatgggacagtttaaatcgggattgattccataatagatgcagccgttccggataaaatgacaggccctggacagcttttcataggtcagagtcgtgtcaaatcccagaacaacaatatccggatcttcttccacaagaggtatcccaaagcttctgaattcgttcagcagagacggtgtccccacaacataaacactttttccagaatacttctccaaaagaaaccgtatcatcacatggctggaaatcatcatctgctctttggagatagcaatgcccatattggaaagcttttcaatataggcctgctggctcttggaagagttatttgtgaagaagtaaaattttctgcctgtctcctccactctggaaagaaagtccttcgtaaacggaaacagttcatttccaagataaatcgttccgtccatatccaggacaaaagctttgatattttctaacatagcccctcactttccggcgtttccatagtaggcattggggccgtgtttccggaaaaaatgcttatcctgaatggtcttgggcgcctcacccacttctgtcttcagctgctctgtcctggcagccatttttgccacctcttccatcacgacagcattgtgtactgcctcctctgcatcctttccccaggcaaacggtccgtggtttgtgcagagaactcccggaacataggctggattcattccctgaaatgtctcgacaatgactagccctgtatttttctcatattccatttcaatctcttccggtctcagacttctggcacacgggatctccccataaaaataatctgcatgtgtggttccgtaacatgggattggccttcctgcctgcgcccaggaggctgcccaggcagagtgggtgtggacaatgcctcccacctgcggaaatgctttatacagttccagatgggtcggtgtgtcggaggaaggcttataatctccctccacactctctccgtttaaattcataagaaccatatcagatggtttcaggtcttcataggcaatgccgcttggcttgatggcaaacaaccctttttcacggtcgatgccacttacgtttccccaggtataggtaaccagtccctttgcgggaagttccatatttgcctcataaacctgctgttttaattcttccagcatatctttcaccctccctaattcttgatcacttcttcataaaaactatagaacttgagaagcctcataaacgtgatcctggctctcacataaggagacagccttgcggtcttttcctggaagctctcgtcaaatccaagatcctcaagagatctgaccccgtccacctttgcgagcatctccgtaagagcctctgcagaaggaatctcatcgatgacagctgcgatctcattctttttatccagaagcttttgggaatcaaccttttccagcagattcggtgtattttcctccataatggactcgtacatgccgagctttgtaaaattcactctgatcagttcttcttccaccggcatggattcttttaccgtaaaagcccctctgcgcattttctgagctgccttgtgatagattttagaagcgaggatcagacccacacccactttttctccgtggtaaaaatcaatgtaatcattcagcacttccatctcccacagatgagacatatgatgctccgcccctgaggccggccgggagtttcctgtcatctgcatagccagtcctgagagcagaagcccatacataagctcctcataggctccggcatctccactggacagcccggaaagactgttggtcagcgcatccagcgccttgtactccatctcacatatttcttcacagatgtattccccggtcaggatatgtgtgatcttccagtctgccagagccgtatattttccaagcagatctgcaaccccggaagctgtcaggcgcatcggcgccttgctgaaaatatcagtgtccgcgatcaccacaaccggtgatacggcagtaaagctttttttaaatccatgccatgtcatggctgccaccgtggacacatagccgtccacactggctgctgtaggtacagagaagaacgggatctttctctcataggcatgatatcttgtgatatcgtggatcgttcctgatccgacggcaatcatcagatccacgtctccgatctggtcaagctggtttttggccgcctccacgccgtgttcattggcgtgaaggttggctgggtcaaggactgcttttttcagccccggcacaagatgttccaccgtctttcctgctgcctcataagtattttcatcacagatcatgacaatattctggagattcttatatgcgtcccttgaaaggatctccgggagctttgagactgccccgctttctatgatcatatcgtccacaacgatctcatgttttctgccgcagctgcacggcttcaaaaattcttttacatccactttcatactctacacccctgcctcttctgctgattcatttttatttgcctgacggtctaagtaagctacgatttccttgttttttaatttaaatactgcaaacattgccgcataaactgccaccgcgatagcgatgaataccggatttccggaaaggaacgcaaggaatacgaaaccaagcatcggttttccaagaatgttaaagctggtgatcatggccgctcctgccggaatagcaaagcctgcagtcatggctacctgtgtgaacagcggtgctgtgtaggtacacatcaagagccctaaactaaaccagatggttcctgccacaagaatctttgacatatttcctttatacacagctaccagaccctgtaccatgtatggaatggcaagcagatccacaaccggcagcacctggttgcccggaagaatggtggagaccacgatcatgatcgggatcaggagaagtccgcttgtaagggttgcaggctccccgtatcctaccgcatcattgactgcaatgtaccattctctgtctcccgcttttcccatgaattttcttgccgcctcagtgatcggcgcaaatgcctgcgcaaacatgctggcgatcttggggaagatggccatgacagcactggtggcaatggcaacttctaagatatcaccccatccggcgatggttcccagcttgttgacgcttcccaggataccgatgaacattccaaggaaaaatccaagtgtcatgggctcaccgaggaatccaatcttcttttcaatggattttggattcagttttaatttattgaaccccagcttatttaagacaggatcaaacagaatcgcaaaaattgcaggttccacattgtgcatggcaatgattgtacagttgggatagttataatacttggaccaccgctttgccaccagctccgatatgagcaggctgtatagatttaaaagaatcatacatgcgattccaagaataaaattgtgggtcttaaatatgaccatggctccccagacaatataagaatagttattccagagatccgacggctggaaaatattcgtccacttcacaagaaacaggatcgtctgcagaagaattcccaggcccagatagatcattccggcgctggtagcaaaggcaacgacggaggtcgcctgccatcccacatcaaaggtatttaagttgacaccagtgacgcctgccataaccgttgacatattcttgaccatcggtgtgatgatcggtgtaaatgcgccgaggatcagagtaaatcccatcagggacacccctgcgtaaagtgctgataaaaatgctttctgaactttcactttaaagatcaaagcgataataaaaataataaatggtacgatgatagccgatccgaagttgtcaatgattgatttgagtactgcaagaattgcttccatatgtatttcctccgtttcactttctatttacttcccgacagacttcagtgcctccacgatctggtcaaagaactcatcttctcccatacctgtgatacatgcaaaggcattgactgccggaatcccgtaatctccgtccggaagagggcttgtgtgggccaggatatcaaatcttccggactgggccagattcaaagcctccgtaggccttgcctctgtggtggaaactgaatatcccttttcccctaatttttctttcagctttgctgctaccatggatgaagttacggttcctgatccgcaaacggataaaatatttacaactgacataatatatctcctttcggttttccctgtttaggaaagtgactgttctttgtctttaattatttggatcacgtcctgtttcgccttgcattctgtcaaccctctcaatgtctctggatcctgcagtacctgcagtattttttgtaaaaatacgagatgttcctctggatcgtccacggcgagcataaagatgagccttgccatgacaacttcatctatggtgcccatctgataaaacttcacaggcttttttaacactccgatagccacagcgcccttatgcacatggcttttgtccgtatgcggtattgcgatcccgattcctgccatattaactcctgtaggaaaatccttttctcttgccttcagagcgtcaatataggaatccttacaatagccttcttttatcaatgtcttacccagacgttcaaagacctccccggagctttcggcctccaggcctgtgagcaccagttcttcttttaaatcttcccaaatcatgttgaattacctcatttcatattcatatcgtttgatcgcgttatagacttcttccccgctccctacatcccgtatctcatctctgaacttctggttatggaacaggttcaccagatggaacatagcctttaagtgggtttccttattgatagcacttaaacagcagacccattcaaccgggtcaaattcaggtttgccgaatactactggctctgccagcctgatcaggctcatacccaccttcttagcccccgcatttaaggcttcatggggaagggcaaagcccggtgccaccaggatgtaagggccgttcttttccacgttctcgatcatggagcttatataccgctcctcgatgcagccgtttctaagaagatactgcgcagactgtctgacagcttcctgccagctttcgcagcttacatttaacctgactgcctcgctgggaagcattgctaaaagcggcatgctcacttccttgtggtaaaactcattcactacctcttcaatctgaaataccatctgttctggggacgtattctcggcaaggatctccttgatccgcttcatgtgcgccgcctccggcttctctttgacctttggcctgctgatggctttatggcttcccttcagccgtgaaagcttttttccaacattgatacagtcctcgtcatttaacagtgggtccacttggatgtattccatatcggtatccagcgctactgtggaaaggatcacatccgcctcgtctatgtctgcgtttttcaggtcatgtgccggtatgatgtccgccacgtcgaaattaaaatacttcttcagccttgccagcagaagctgggatgtgccgatgccgccgttgcacacaaggatcacggaataacgctccgtagaattcttgttccgttccatggcagcacagatatgaactacaatgtacgagatttccacctcattcaactttcgtccgatatactcttccaagacagatacgttattctgcactgcttcctggatcttcggatagcgctccaatacttctgtcacaactgaatttaccgtgttatcctggatagccgatgaaaacatgaattccagatggttgatcagattttcgtagaaaatataatccccctgtaaattcagatcgatatcaatggacacatgttcaatgaaggttcttgtgatcacctgcatctttacgatttcctggttgctggttgtctttttgatataacgcatctcatttaatattctgccaagaaacttgacctcttcctccacaacctcaatccctgcaaaatcactgagctgctttaatatgtaaccagccatctcgtatttgctgttcttcttgctgtcctgctccgcatacatttttagtctcatgcggtacaagcttaacaccagaaaatatttcaggtttgtaaaagaggtatccgtgagaaaccttcctgagaaatgttccgccagattaatcaccttttccatagtcttcagatcttccatgtccacccggcactcttctttcagagaacagatgagcctctcaaagaccggtgcctcccggtagacagattcgttgctctttatcatggataacaacagcagccttttatttttttcctcaccttctagtatcaatcctttgttggaatgggaaacgacatacagtttgtgtctcttaaaaaatgctttcagtccatccaggtcctggatcactgtggaccggctcacatacatgcagtccgccagatccgaaagggtccggtagtccttttcacagattaataaagttgccataaacatctttctttcatgtctctccagcttataggagtaaaaatcatcccggaaaaggtactgacgcgccctttccatgtcttttcctgtctcgatgactccctgttttccgagacttacgccggatagtttgttcttgtttagaaattcattaatctgctccaagtcattccggatggtcctcgtggacactccgaactgctctgcaagctctttcatatatgccgcctgcccatattcttttttctgaatcagagtagataagatttcccgagatctcttgttcatatttatcacctcatctatgttctgagtatatcatccatcctttttaaaaaacagtttgaggtatttcatcttttgtgaaaagaaatgtcaccagtacattttctttcacaaaaagtgaaacaaaaaaagcaaggtatatggttgtatacataccttgctcttttctgagtctctaagttataaacctgctttagcgttatttccgcaatacaggaccttctatttgttgagtggttttcttgtgacagacataatcagcataccgatcacggccccgactgcaacagcaaccaggtacatcagcggatttgtcacaacaccgatgacaaacagtccgccgtgaggtgccggaagcccgcacttaaacgccatagacaatgctcctgctgccgcagagcctataatacaaggtggcaggatatggatcggatccccagctgcaaatgggatggctccctctgtgataaaggacaggcccatgacgtagttgacaatacctgatttgcgttcactctctgagaaacggttcttaaagaatgtggtacacagggcgatggccaatggaggaaccatacctccggccatgactgctgccatgatcgcatactgttccggtcccgcatttgcaaccgtaagctgtgctgttccgaacacataggccgctttgttaaacggtccgcccatatccacagacatcattccgcccagcactgcacctaataaaatagaacttgtgccgctcatggaggataagaagttgttaaggcctgtgttgatggctcccatgatcgggttaatagcgatcatcacaacacccatcaccagaatcccgcacacagggtaaaggaggatcggtttaagcccctccagagcgtttggaagcttatcaaagatcttctttaacaggacaacaatatatccggccaggaaacctgccagcagtgcaccaaggaaacctgagcttaccggttttgcctctgcaaaattcatcacattgccgaaggtatagccggcattggccagtgcgcctcccacaaaacctaccgctaatcccgggcggtccgcaatgctcatggcgatgaagccggccagtacaggcagcataaatccgaatgcctgctcaccaatggtctttaagaccgccgcgagttccgtgttcttcccaaagttgctaggatcgatggcctggttgtcaaataagaatgccagcgcgatcagaatacctccgccgatgacaaagggaagcatatgggacacaccgttcatcagatgcttatagatggttcttccgatgccttctccctcttcgttggctgtctcatcctcagaggctccgctgtgatggtagacaggggcttttccatcgaggatggtctggatcagttcttccggcttatggatgccgtcagcgacctttgtctgaagcacctgtttcccgtcaaaacgtgccatctctacattcttatccgccgcgacgatgataccgtcacagtgcttgatctcttcctttgtgagaacattctttgccccgccggagccattggtctcggcctttaaagcaatgcccatttccttggccttgttttccaatgcttccgcggccataaatgtatgtgcgatacctgtcgggcaggcagtgaccgccaataccctgagtccgccctttttctcttcccgtacagcaggttccgccttatcttcttttgcctcttctggaaactttgccgtctccttctcgtcgatatactttaaaaactcttcctttgtgctggcattaatcaatttgtccaggaatgccggatccattaaaatcgttgaaagtcttgcaagggcctccaagtgtacatcacttccctctgccggggcggcgatcataaaaaataccttggtaggttccccgtccatagagtcgtagtcaactccgtccggcactgtcatagccgcaagacccgctttttttactgctgcgttctttgaatggggaatcgcgattcctcctccgatcccggtggtgctcatttcctctctggcgaggattccttttttatactcttccctgtcagatagattacctgtcttatccataagtccggtcagacggtctatggcatcctcttttgagtcgaccgaaaccccaagttcaattccttctgtcttcaataattctgtaatacgcatgtaatcactccttttcatcaatggccctcacacatcaagtcatatattagtcagcataaagtcaattataattgctcatataattccatgatcttttcttttgttgcaagatcctcagaaaatgcgctggcgcttcctgttgcgatccccatctttaaggcctcttcataatctccgtttttcagataaccggtcaggaagcctgcaaccatggaatcccctgctcccactgagttcttcacttctccctttggacaaggtgagatgtgcacatcacccttttccgtgatcagaatcgctccgtctcccgccatggagatcagtacatttctcgcacccttctcctgaagcttctttccatattcaataatctcttcattgttctttaactcaacgccgaacatttcgcccagctcgtgattattcggtttgatcaggaacggatggaatttaagaacgtttaacaaaagatccttcgtggcatccacaacgatctgtatcttcctgtcctgaagcctttccatgatcttttcatagacatcttcaggaagggtattcgggatacttcccgcaagaaccagaatgtcgccatcctttaacgtatccagcttctgatacatcatctccaactcatcctcatggatgtccggaccctgtccattgatctcgctctcctcatttgacttaatcttaacgttgatgcgcgtcatgccttccctgagacgaatgaagtcaggcttaaacccgagctgctttgcccctgtctcaatggcgtctcctgtaaaccctgcgatgaatccaaatcccacactgtcaatgcctaagttggccagtacgttggaaacattgatcccttttcctccgcagtacatatcctctcttgtggtgcggtttacctttcccagtgtcaggtcatccaccttgatgacataatcgatcgccgggttaaatgtcactgtgtaaatcattctaatacctccttgatgactgcatattttaagaagcttggctcctctaacttccctgttacgataactgcctggtctaaatctgccacactgacagctgagactgcacggaacttggacgaatccgccaggatataggcatccagacaatgttcaagagccgttttctttaccagtgcctcagtcacatccggtgtcgtaaatccgctgcgcttggaaattccgttgacaccaaaaaatcctttggtaaagttatacttccttaaactgtccagagcctccgccccgacgatcgcttctgtaaccgcacggagttcccctccgatcaggtacaccttgaagccgtaatccataagttttttggcatgggaaatgccgttggttacataagaggctttcttctctgtcaagaaatcaatcatcatctcagtggtcgttcccgcatccagataaataaagtcatccggtctgatgatacctgcacagtattctgcaattctgcgtttttcatccacattttttaaagatttgttcgcgactgcttcttccatgttaaagcctgtatccagtgcagtggctcctccgtggactttattgagcagacctttcttatcaagtgcagtcagatccctgcggatcgttgactcagagatcccgatctgtctgaccagctcctggacagttacggacctgtttttccttatcaactctaaaatctttctaaatcgttcatctggcagcatcaaatcacctcttttttctaattataacaccttctcagtcaaagtcaatcataatcatgcattttcgttcaccaagaatatttggagacaaaaaaagagcttccgttcgtaacctgatacggaagctccttttatcaatcaaataagtcactgtgtgtacccactcttgccaaggtcaggaccaagatatcttccagacaatagtacaccagcagccagtcagactgaatatggcactctctgtgcccgctccattttcctgacagggcgtggtcattgtattcttccggaagattttgtcctctggcaagcatcgagataatgtgggctagttttgaaacatcaaagcctcttttaactgcaagtttataatcctttttgaatttggtagtcctcttgatctcatatttcatcggtccagatcagccattaaagcttccatagagaggaaaccctctacggatggatctttggcgatctcttctgcctcacacatagctgcggctgtctccctgccttttggatacattgttacctcaaatggaattcccccttctctcacggactgcctcaaaaatatatgaaacgctgctgtcatgtcaatcccaagattggtaaacaacagatctgcctgttcttttaactcactatcaatgctaaaacttacgtttgatgtatttccagccattacctataactcctttccagtatatagatactatatgccggggactgtacatggttaagtgtgctgccgtagcagcaagtaaaaagaaaaagaaataatttcagttttataaataaaataaagaacatcagattattcaagttatctgatgtcctttatttttatacacgagcttatttatttctttccttgatcacagccttacttcccagatatgtggccagcatgtatcctccgtatatgatgaggatcgcaacggcagaggctaagatcccattcagtgcatttacattacccagcgttgctatgacattgctggctaccttaacgccgatataggagtgtaccagtgccaggctcagaggaaccataaagtaaataacgatctgtgccagcatagcatggttgatcatccgttcatcggccccgatctttctcaagagattatatctctccacgttgtctgagttttcgcttaactgctgcaacgcaagcactgccgcacaggtgataaggaacactgcgccgatatagatcgcgatataagtgatgaccatactcagtccagcgctctgttcaatcatttcaactttataaatggccatgtgatatggagacttgtttctctgctcctgtgtcttctgaggataaaccttatccagcgccgcactcagcttgttgctgttcttctccgcatcacctttgaaattacagttataaataacggctctcatcggaatcgtccgggcgatctcgtcaggcacgatcagtgttcccatatccatcggcatagaagacgctgaataataagtagtatcctgcatcgtgttttttgctgacagggtctttcctgctattttcacttttactcctgttttacatacatctttccaaagatcctgcaggttttcaaagttacagtttacagcatattcgtctgatttaaggctgatcccttgttttccctgtttcttcatagactcattataatcagataacgatatgatatcgggggaggatttttccattctctgtttcgtaccttccgggtaatccactaatttgtcacggccgctgagaaatattttaaatttcactttgttatagagacgtgtggtgatattacaggacttgtcaacaaactcatccatattcacaccctttttcttaaactcttccctcatgttgatttttgcttcagagtcagtggcatcttccggaaggtacttaatataagaaacgtcataaggcgtcgctttcttcatatcctttccgaaagtagttgccagtcctgctcctgttgaaaaaactccgatcgccaccaacagcatcagacagagcattgtcatagagacaaacgttgtggtgatttttgagttgatctgtcttaagataaacatattgagctttctatagtaaaatctcttgtttgtttttaatatccttaaaaagaatccggaaagagataggaaaaacaggaaggttcccaccgctccaaaaataatactcatccagaactgggaatccacttccatcattccgttttcctggatacagtaatatgcaaaaccgatgcacaccacagaaatcagaaacaatactacggaaacacctagtttctttaccttcaaggtttcattctttttgcttgcggataaaagatcaatgacctttactttggatatactgaatgcgttaaaaatcataacgatcaggaaaataaccgcaaagtagatgatcgttctgataaatgcatcaccggaaaagataaacctaaactctttcatctccaccataaacatttttgctgtcaccacggagagtccctgggacaggaatactcctgccaaaagtcctgcagccagagcaaagactccaataaacaaggtttcaatgatcaatactttggatacctggcgtttatccataccgaggcatagataaagcccaagttcttttttgcgcctcttgatcagaaagcggtttgcatagatcacaaggaatccgaggatcacagcgataaatacagataatgagccgatggccatctgaagcatttctatgatctgtctctgggattcattcattctcagcatagcctgctggctgccgatagagttaaatacataaaacaggcagaccccgaaggtcagagtcaaaaaataaaccgtaaaatctttgatacttttctttacatttccaaaagctaatttagaatacattggtactgtcacctccaagcaatgtcacaacctcaatgatgcgatcaaaaaattcttttctggaatcccggcctctcaccagctcattaaagattttcccgtctttgataaacagaatacgtttgcagtagctggcggtaaatgcatcatgtgttaccatcaggatcgtcgcatgcatttgggcattcattgtctccatgctgtccagcagcatccttgcggacttactgtccagcgctcccgtaggctcatctgcaaggatcagggagggatctgttaccatggcccttgcgcttgcaaccctctgcttctgtcctccagacatctggtacggatatttgggcagctcctgtgtgatcattagtctttccgcaatggatcttactctgtcctcaatttctttcgccggtgttttcatgatggtcagggccagtgcgatattttcgtaagcagtcaatgtatccagcagattgaagtcttgaaagataaaacctaactgttctctccggaacttggagagatgccgtccctttagttttgtcacgtccattccgtcaataaaaatgtgtcctgaggtaacccggtcaatggtagaaatacagttgagcaacgtcgtttttccgcttccggacgcacccatgatgccgatatattctcctttctccacatcaaagctgatgccgtccaccgcctttgtcacatttcctttgtttccataatacttttccatattttcaacttttaatactgttttcatatcccattactcctttgctttttttatgttatctatactatatcatcgttctaaaagagcagccatcgaactgccttacacaaaacttacacttttgtcacctttcatatagattgtaattttaaatgcaatcctctatactgatagtatcatctaataataaacggaggtaatgccatgtatttaaaaaacgaagatgtaacatatgagacagtggaaaatgccaggggaggaaaaggatcgatcaaaaaaactgcctttctgacaaaaaaagaaatgaaagacagcagccgtcttttcggtaaaatcatcatccctcctggatgttctttcggataccatgtccatgaaaatgaaggtgaagcatatcatatcttagccggatacggtatgtacaatgataacggcactgagtatgaagtaaaggcaggggatactacatatactatgagcggatgcggacatggaatagaaaacatcggcgacacagacttagaaatcattgctttgatcttattagacaaataagaaaaatattgaaatttgttttccaatgataattttttcatggaccaaccatactattcatatcccaaaaaggaggttgagatcatggaaaagaaaaaagaactgacaaatgaagagattgatgaaaatatctttgatatgtgttctacttgttctactaccgattgtacaggcttaattcccgcaaaaccggtgtctgatgcagaaattgaatcctatgaggacctctatccattccgtccgccggtcctgaatatcaaggactgtccgaatctggaagaagaggaaccggaaaaatagtaattctgtcagaataagttctttcttactagaacagcaaaaccgctgacatcttatgatcagcggttttgttttacatatgcacaaatgagttctttggaaattcaatttttatctgggttccttctccttctatggagcggatagaaatcccgattccaagcttatcagcaagctttctgcacagatacagccccattccagtggactttgcatattttcttccggtagttcccgtatatcccttttccatgacctttggaagatccttgcttgaaataccgattccattgtccacaatcaggaacgtgacatggtctctgtcttcctctgctctaaaccatatgtgtggatcttctttccggtattttactgaatttattacgatttgtttgatgataaactccatccatttttcatccgtatatacgtcgaaatccagatgttcaaggctgatctttactttggactggatcaaaactttagagttcttctttatcacatcctgcaccatcttattcagattcatacgttttacaatataatccttttcaaccccattactcctggagtaatagagcgcctgctccagataatattctacttcctccagttcatcattgatatcttttgtgacctgagagggattattttcaatcatcagcctggatgccgcaataggggtcttcacttcgtgaatccacatctccacatactccctgtaatcctgcgcggacactttgtactctgatatctcatcacacatagatttattgcattctgtcaggcagtcataaaacaaatccccctctatgaatccaggcctgtccaaaagctccgacagcataaactttttatccagtgcgtccatgcttctcgatacagtctcataaaaatttcttttcttaaaatactcattgccgagtgccagcgctagaaggatcaaatataaacaaagtaaataaatgatggcaaacactgtggcatggaataaatgcagcatccatacaagaaaagcaagaaagaacagctgcagtgcgaaaaacagcagcttatcttttaaaaatgccctgacattcatacgagatacccctgtcctctctttgtgataatataattagaaaggccgatggaatccaatttttttctgagcctgttgatgttcacagtcagtgtattgtcgtccacaaactcattggactgccagagttcttccatcagatcatccctgggtacaatctggtcttttttcttcataagcacagcgagcatcctcacttcatttttgctcagctctatctgttcctccccatgccatgcggtactgttggacaggttgattgtgagtcctttatgtgcaatcttccactcttcttttatattttttgtacgttttaaaagcgaagaaatcctggcgacaaggatctgggtattatatggctttgcaataaaatcatctgcccccagattcatactcatgagttcgtccatctcgctgtccctgctggtgaccacaatgataggaatttctgattgttccctgaccgcccggcatatataatacccgtcatatacagggagattgatatccagaagaatcaagtctgcctcttcctttaagatatcttccactatattctcaaaattgttaagtgctttcacatgataatcatatctgcttaaaaattcacataactctttctgaatttttaggttatcttccaccaaaatgatctttgccttttccataaaaaatcctttactgaatgactttcattccacccatatacggctgaagtgcttctggaatcctgacactgccgtcttcctggagattattttccaaaaatgcgatcagcattctaggcggcgcgacaactgtattgtttaaggtgtgagcaaaatacttcccattttccccattgacacggattttcagccttcttgcctgggcatcccccaagtttgaacagcttcctacttcaaagtattttttctgacgcggggaccatgcttccacatctactgatttaactttcaggtcagctagatcaccggagcaacattccagtgtgcgcactgggatatccagagagcggaacagatctacggtatttttccacagtttttcataccaatccatgctttcttctggtctacacacaacgatcatttcctgcttctcgaactgatggatcctgtagacgcctctttcctccagaccgtgggcacctttttccttacggaagcaaggggaatagctggtaagagtctttggaagttcttcctcctgaatcatggtatcaataaacttaccgatcatagagtgctcactggttccgatcaggtacaaatcttctccctctattttatacatcatggcatccatctcatcaaaactcatgacaccggtgaccacattgctcctgatcataaacggcggtacacagtaagtaaaacctttgttgatcataaaatctctggcataggagatcactgcggagtgaagtcttgcgatatctcccatcagatagtagaagccctgaccggctacctttcttgcactgtccagatcaataccgctgaatttctccataatttctgtatggtaaggaatctcaaaatccggtactaccggttctccaaacttttcaagctctacgttttcactatcatcttttccgataggaacagaaggatcaataatattcggaatggtcatcatgatctttaaaatcttttcttctacctgcttttcttcttctgtcagctcttcaatacggcctgcctggtttgccacttcctttttgagctgttcagcctcttcctttttgccctgtcccatcaaaccgccaatctgcttggatatcttatttctgttagctctcagtgactggacttcctgtttaatctcccggttcctttcatctaattcaagaacttcatccaccaaaggcaattttcggtcctgaaacttattctttatattctcttttactatttctgggttttctctcacaaatttaatatctaacataacttcctcctgatatgtttattgattcatacaatcttccagtacaatctgctcctccttagaaagagctacttctgaatgtccgtctttgatttcttttgcatacatatagcttccgtagcggttgctcattgcattcaaaacaatcccgttatttctatggtccagcaaggcgatagcaaaacttgtctcgccgcccatttctttaaatgcattatattttagtatatgcatttttgagtaagataattgaagcttatctttcagtcttcccatttcttcgtcaagtattttgtgattctcctcaattcgttccagctcatcaaaatgtttgacaaatattttttcgagagatttcccattttctcccttcatgaacagtttgtatttcttttttagcctgctggtttttaccagcagaacaatgattagcagcaatgccagtgcacacaaaccagctaagccgcaaaataagtaaaataagtcaaccccaaaaatcgtaatacctgtagtcattttattcctcctataacgttctcagcatatcgaccagacggtccagttcttcctttgagtaatattctatttcaatttttcctttgttgtttttgttctttatatttactttactgccgagcgcctgttttaaggattcttccatattagcaaacaaaaattcatgtaccgtattatcctctttcggaggttccttttttttcttggccagctgttttacaagcttttcaatctctctgacactgagtttttcatcgaacactttcatggcaatctcatactgctggtcagcatcattgatcgccagcagcgcacgtgcatgtcctgtggatatcatctcctctgacaacagattctggacccttgtatccagtttgagcaaccgcagtgaattggtgatagccgcacggctttttgaaactttcgctgccacctggtcctgttttaatgagaactcttccattaatctcttataggccaatgcctcttcaataggatttaagtcttccctctggatattttcaatcagtgcgatctccacgatttcattttcagcgtaatctctgatcagtaccggaacttcttttaaacctgccagtttcgcagcccgccatctgcgttcacccgcaataatctcgtagaactgatcatgttttttgacaatcagtggctgtaagattccatattgtttgatagagtctgccaattcctgaagggcatcttcatcaaactgtcttctgggctgatcaggatttggctctacctttaagatcggtaccatgacctccgatttaatctgctcatctttttttaggattttttccgtctctgtctctttgactggggcacttggaatcaatgtatttaatccccgtcctaatcctgttttcttttttgttgtcattgttcttttcctccatttgaaatgacctcttctgcaagcatctgataactctcagcacctactgacttgggatcatacacattgataggaagtccatgactgggtgcctctgctaagcgcacatttctcggaataatagttttataaatgttttggtttaagtatgatttcacattttctacaacctgaagtgacagattggtcctggcatcatacatggtaaacacagcgccctcaattttaaggtttggatttaaacttttttgtattagttctatggtgtacattaattgtgttagaccatccaaagcataaaattcacactgtattggaacaattacggtgtcggccgcggtcatagcattgacagtcaacattcccagtgcaggggggcagtctataataatgaactcaaagttctctaccgtatcatgaagtttttcctttaatatgtattgcattcgatccacagtcattagttcaatctccgcgcccgcaagattacggtttgctggagccaatgacaagttttcaaaaacattgggacaaatacattcattaaaagaaatttcatccgaaataacttcatagatggtatgctctaactcatttttatctaaacccaatccggttgttgtatttccctgagggtccatatcgataatgagtgtcttttttcctgcagcagccaatgcagcagaaagattcaccgccgtcgttgttttaccgacgccgcccttttggttagctattgcgataattcttcccatattatatattctccttttaaaaggtattatatcacttacaactattcatttctatatgtttcacgtgaaacattaaaataatttactcatacctatcgttttccaaagggaacccctccctctcttatgataaacagtgcagtgcaatgtttcacgtggaacattgacaactttaagcgccaaatgcgatttgacgcagtcaaatagtttcctcacgcatttgtgtgcataatgcccgcagggcttttttattccatagggaggttcgaagaactttcctatggaataaaaaaagcaggtattaaaaacctgcttttcaatcttttatattaatactcttacatctgctccggacacttcattccaagaaggtcaagaccatctttgatcgctttcttcgcaataatgaccaatttcacccttgcacgttttaattcctcatcttctacattacactggttttcatgataaaaatgattaaaggcctgtgcaacagccataacaaacctagcaactacagatggttccaaccgttctgccgctgtcttcacaacctctgggaaacggatcagttcttttaacaaagtaacagatgcctcatctgtcaataaagcaggatctatatcttccgccacctctgtaatgcctgtttttcttaatacactggcagcacgagcataggtatactgcacatacggaccagtctccccatcaaagctgtgaatcttttcccaactgaacgtaacatctttaattctctggttatatagatcattaaatataattgcaccgattcctaccatctttgccacttcttctttatcctttaaatcaggatttttatcttcaatgacttccttgatcttagatacagattccttcaaaatatcttccgcatatataatatttccgctacgtgtagaaagctttcctccttccagactgaccagaccataaggcacatggatcaaatcttccttcgcccaatcatagcccataagctccacaaccttaaatacctgcgcaaaatgaagcttctgctccataccggtgacatagatacagcggtcgaaatcataagtgttcttgcggtaaaagatagctgccaaatcccttgtcgcataaatagaacttccgtcttttttcatgatcagacaaggaggcatatcatactcctcaagatcaacaataaaagcaccttcgctttccttgagcattcccttttcttttaactgttccacaactgctgccgtcttatccctgtaaaagctttctcctgcataggaatcaaaatccacatctaaaagctcatagattctcttatactcgatcagactaatatctttaaaccactcccagatagagagtgcctcctgatcgccctgttccatttttacaaaccaagcccttgcctcatcatttaaggtatcatctttttctgcctcttcgtggaatttcacatagatcttcattaactcagagataccatttttctctacggcctctttgcttccccacttcttataagcgacgatcaatttaccgaactgggtcccccagtcaccgagatgattgatcctctctaccttgtaaccaagctttctaaaaatacggtaaattgagttaccgatcagggttgttctcagatggccgacatggaaattttttgccacattcggtgatgaataatcaatacaaatcgtttttccacaacccatgtcagaacttccatagttatccacagaaacctgtcctaacatctgatttacgaacatttctctatcaataaaaaaattcacatacggacccattgccgctacctttgagacaaactctgattcatgaatctttcctgctacttcctctgcgatcagatttggtgccttgcggaatactttagccagctgaaaacaaggaaatgcaaaatcacccatatcctcctgaggcggtatctccagtatcctgcccacggtttccttatctaattcatcaatagattcagttattaagtcaataatcttctctttcattttcttcctcacttatgattcaacgatagcctgcaataccactgagttttcctgccatctggtaattgcaaattctcttgttaacatatcttccaaaatatttctattctttttaaatttttgaatggatgcctgttttttaggttttaatacaaactgtaacataatcctatcctgttctataaataaatcaatattcagggaacggattcccactctcctgatagcaaacttgatcatttgatgaaaacctgtcaaaaaagaaaaagtcagaagcaccggacactcacgttctatcttctcgcacgtcacggtgatatctggatgtatctccctgatatggtccgccagctcataaaatgccggaacaaacagtatctcctcctgccccttatccaattcctccaggccggaaactacaaagtaattttcctccaacccctttaaataggacttaaggcggtcacacttcctttgtatttttctttcttttctggatattatatctatttcatgttctacctctccggtatccggctctttaacctcttccatcctgttttcatccagggatagaggggaaaatacagaacggatctgtcgcttttccttctccagctgaacacagcggatcatccgctccttttcctcttccaatttatatctttgctcgatcagctcttccttatccgccacacattccatatactcctcagacaaatatgctgctaaatctgacatcaactgatctttatcgatctttttttcatccaaatgtctcaccacctcacttctatgataaacgaaatcttaaggaatgcaaagtattattgtatcaaatcagggtttgtcatataataatagtaataaattagaaaggagactctctatgcgtttctataaaaagcttcggaatctggccacgattacaactaccgcaacattcagtgtttgtctcataaataaacttgtcttttctctctcctctatgaaagacgccctgttttctaaatacggtaatacctatacctggaggttcggcaatatttattatacaaaacatggaaccggttctccgattcttctgattcatgacctgaacaactgcaattcagaacttgaattctataaattaaaagaagaactgtccaagtcccacaccgtctataccatggatctcttaggatgcgggcgttcggacaagccgcggatcacttataccagttatctttacgtccagctcatcaatgactttatcaaaaatatcatcggcacaaaaaccgatatcatagccagcggcaaatcttcttccctgatctttcttgcctgctacacagagccgaggaacttcagccgcctcatgctgattaacccggagaatatgaccagagcaggacgttatccgggaaaacgcaagaagatgttaaagtactttatagaacttcctatcatcggaacactcacctacaacatcctccacagcagacctatgatcgagaaaaaactggcacgggagtatttccacagacctaaggatatcaaaaagaaatatgtggatatctgccacgaagcctgccataaatgtggatcagatacaaaatatttatatgcaagtcttatctcagattatttaaactgcaatctggtcccttccatcaagaacttaaatcacagtatttactttcttatgggagaccatgcaccggatgtggagaataccattgaacagtaccaggtattaaatccatccatagaatatcattttgtcaaaggtacaaaactccttccccatcttgagaatccagaggaagtgctgaaaacctgccgtatctttttttaactgatcggctctttggaaggcagccctgctttgcgcggatagcgctttggggttgccttttgttttttgatctttaggatcgttctatccatatccgtgcctggaagcacaaaggagaccacttcttccatctttccgcccaaaagcttcaccgcatgttttccctggcttaactcctcttcgatcttgccggatttataggggagaaacattccggataccttcacatacggaagacaatattcagatagtgtactcagatttgctaccgcccgggatactaccagatcaaattgttcacggtagtccttctgccttgcataatcctctgcccttccatggattgcctcgatgttcccaagacccagagcttcgatcacctcttctaaaaacttaactcttttattcagagaatccaagagcaccactttcagatctgggaatgcaatctttaacggaatacccggaaatcctgctcctgtccccacatccagaattctctggctggaaaatccacagtctgccttcaccagggccagactatccacaaaatgttttaagatcacatcatcccgctctgtaatggcagtcagattcatgaccttattcttttcatgcagaagctcataataggtttcaaactgggccagctgtctgtctgacagggtaattcccagctcttctgctttttctcttaaacttaccatatacactcctaagccttttgattcagctgttccaaataaatgagaagtacggaaatgtccgccggggacactcctgatatcctggacgcctgcccaatggatgccgggcgtatcttggacagcttctgaaccgcttcaattctcaagtttcctatttcttcatatagtattccttctggaatcttctttttctccaaacgcttaaactgcttcacctgggaaagctggcgtttgatatacccttcatatttaatgttgatattcacctgttccctgacatcctcgggatattccggtcggtccgggtcgatgggcgccagaatatcataagtaagctccggccttctgattagttctgccatagtagcggaagactttaattctgtacttttacattcagacaaaagcttttgcacatcctttgaggcccccacatttacacggctgagacgcccaatctctttttcaatcatctcttccttctgtaaaagcttctcataccgctccctgctgataagaccaacctcataaccaatttttgaaagccgcaggtctgcattatcctgtcttaacagaagccggtactctgctctggatgtcatcatccggtatggctcactggtttcctttgtcacaagatcatcaatcaatactccaatatatgcctgggaacggtcaaggatcaaagcttcctttccctgaagttttctggatgcattaattccagcaataagcccctgggctgccgcctcctcatatccagaactgccgttaaactgccctgcggaaaacaaaccttcaatagctttaaactctaaagaaggcttgagctgggtagcattgatgcagtcatattcaatggcataggcatttctaatgatctttacattttcaagcccggtcacactgcggtacatatcatactgcacatcctcaggcagggagctggacatccctcccacatacatctcattagtgtattccccttcgggctcaatgaagacctgatgcctgtttttatcggggaacttcacaatcttatcttcgatggatgggcagtaacgggggcctgtaccctcaattgctcccgagaacaacggggatcgcccgatattctcgcggatgaccgcatgcgtctcctcatttgtatatgtgagccagcaggatatctggttccgtttaatatcctcccgtgtatttgtaaagctgaaaggaacgatcttttcatccccaaactgctcttccattttactgaagtcaatgctgtttctatcaatcctcgccggagtccctgtcttaaagcgccgcatctcgatccccaggtctaacagggactgtgtcagataattggcagcctgcagtccgttcggacccgtctcgttgctcacatctccatagatacatctggcctttaagtaagtacccgtggtgaggatcaccgcactggcataatatacagcgcctgaataagttttcacaccctgtactttcccttcctccacaagaatctctgtcacttccccctgtctgaccgtaagattttccgtatttcccataacctgtgtcatggacatagagtacatctttttatccgcctgtgctctcagggaatgaaccgccgggccctttgactgattaagcattttagactggatataagtcttatcaatattaatgcccatctcaccgccgagagcgtcaatttcttttaccagatgccctttggagctccctccgatgttcggattacacggcatgagagcaacgctgtccatactgaccgtaaaacagatcgtctggaatccaagccgtgcgcaggaaagtgccgcctcacagcccgcatgccccgctccgactactacaatatcataatgttcttctaattttttcattgtcatttacccatacaaaattctgcgaatatttcatttaccagatcctcacctacggattctcctataatgtatccaagttcctcataagcgttcatgagatcgatagagaagaaatcctccggcatttcatcatcgatgctcgtaagcaccagctccaggctttccttggcatttgaaagtgcctttttatgcctcatatttgtaatataaacttcatcattgaaagatacactgccatggaaaaacagttcattgatcttttcatacagatcttccaaaccgtagagactttttgctgacatggcaacaatattctgaaatcctctctcaataaattctttttcagaaacctctgtatccaaatcggatttattcaagagtacgatcacctgcttgccagtgagaagtttcataatatcttcatcttcccttgtaagaggtacagaagtatccacaacatagagcacaagatcggcttttatcaccgaatctctcgctttatccacaccgatcttctccacaatatcttccgtatccctaattccagccgtatcaatcacattcagcggaataccattaatctgtatagattcctccagcgtatccctggtcgtgccggcgatatcggtgacgattgccctctcctctcccagtaatacattaaggattgaggattttccggcgtttggtttacccacaatggctgtatggatgccttcctttaaaatacgtccattgtctgaggagtcgatatacctttgtatatcatctctggcatgttccacctgcactctcagctgctcagaaaatccatccacagagtaatgctctggatcatccagtgcggattcaataaaggccacgctgtgaagaatctcttttctcagtatgctaattttttctgacagtgcccccttcagctgctttaaagaagtttccatagcaaattcattcttagagtggatcagatccatcactgcctcggctttcgtaagatcgatccttccgtttaaaaatgctcgttttgtaaactcacccggttctgccggtcttgctcccgcctcaagaacacaggacagaatcttcttcatgactaccacaccgccgtggcagttgatctccgccacgtcctccgcagtataagaatgaggccctttcatgatgatcaggatacattcgtcaatatctttcccgtccttaacggcatgtccataatgtgcagtgtaggtagctgccctttttatatctttatttctcttgggacggaatactttagagacaatgtctatggcctccggtccgctgattctgataatgccgatcccgctgtttgtgagcggtgtggcaatcgctgcaattgtatctgttcccatttcactgtcctccgcaaggcaaaaaagggctgccgcaaaaggcaacccaaatttcttatttcttcagcatgacaaccactctgcggtaaggatcttttccctgactcttcgtcacaatctttggatcccgctgaagtgcagaatggatgatccggcgttcatttggattcataggctccagatgaaccggtttttttgttttcttaaccttgtttgcaatactgagtgcaagcttttccaatgtttcctgcctgcgctccctataattctctgtatcaagcttaaccttaatgaaagattcactctctttgttcacaaacagactggttagatattgaagtgcatccagagtctggccatgctttccgatcaaagcacccatcttctcccctgtcacattaatattaagtatatttccggtagtattataataaaggtttagctttggaataaggcccattgcctttaatacttcgtccaaataggattctgtatcttcaatgatcttgtcaatgttttctggacgtttatattctttttctttcggtttttcataagaatcctcagccttttcctgagactgttccggtttcttaatggaatcttccggagcctttgcaagcttttcttcctttacaggctcagcagatatgtcctctgcttcccttaattcaatgatcaccggtttcttgaacaatcctaaaaagccgttgcttcctttgtcaatcactgcatactgaatttctgtgcttggaattcccagctccatcgccgcattcataaccgcatcagattctgttctgccagtaaaacgttttactgccatcctattttcctcctttatccatccggttctttacaatgttcgccttagatgcaattcctccctcagatttcgtattatactctacattcttggtgactttcttcttcgcaatatcgctgatcgtagtatcctgggatgattgggacggagcaccgcttccatttgcggctcccatcattttttcatacatagaagggccttttttcttggctttcttctttgctgctttttctctgctcttctcaatgatcttctgcatatttgtatgattataataattattgatcaaaatctgctggatccactggaataccgcactggctgtccagtaaataccgatgccgactggaagtgtgatacacatgaataaagacatcagcggcatcatcagcatcatattctttgacataccagctgccgggttgtccgaatccatatcggccatagatgtacgtgcgcttaaatactggaacaaagctgataaaatcgggatgatcagataaatactgagcttaaatcccggtgtattctgaatattgatgccaagtacaaactcatatgcgctttttgagatattcggaatgtatgcttccagattccttactacatagtataaagccatgataatcggaaactggattaaggtagttgcacaaccgcctgtagggcttgtcccatacttatcataaatcttctgcatctcttcctgctgtttcatcatagatgcctgatctctcttaccgcggtacttcttctgaatcttattcaactcaggctgtgccacctggttgatcttcatacttctctgctgcttcattgtcagcggaaaaataaataatttagaaatcagtgtaaacaaaataatacataatccaagattctcaattccaacggctgccagaccgttataaatccatttcatgatctcgccgaaaaaccagacgatcggagctaagattcctccgctgcttcctgcctgtgcagcctgtgccaaaaacatcatttctttttacctttcacctttctcacttccggaacaggatcatatcctccctttgcaaaagggttacatctcaagattcgaaacacggccagaagactccccttccatgcaccatgcttttccagtgcttcaattgcatactccgaacaggtcggtgtataaatgcaagttcctttaccttttaatttagacaagtgcgctctataaaaccgtatcaaatatatcaaaatctttttcaatgtttttcatctcttcttaagcgatgaagacccatcagatgaagcaaagcgctctctaccttatgaaaaccttcatccttgacagcattccttgcaatgactgcaatatcaaatccttgcttcagctccgattgatggagccggtagctctccctcagaagtctggtcacccggtgtcttaccacgctgtttcccaccttcttgctgacggagattccaaaacgattataacctagctgattttccatgcagtacaaaacgaaatacttgtttgcctttgacttgccggttctatatacctgctgaaactccttcgttttccttaatgaatgataatgcttcatatgttttccttccctattcaatttagagaaaagaaaaggtcacatcactgcgacctatgctgacaatctatttcttccttttgctcttctgcttttaataacttttcttccgttagcagtgctcattctctttctgaaaccatgaactttagatctctgtcttttctttggctgaaatgtcattttcatgtctagaaacacctccttaatcaaataatagtaatattatatatgaaaccatatattttctaaaaaacatcactcccattatatgcaaagac

SEQ ID NO: 4 - DNA, 286029 bp, Anaerostipes rhamnosivorans
tatccaccactagaaccaatagcttcttaaattaattcctaaaatcaatacttcaaaaagttgccatttcttgacagcttaaatcagtgcgccactttttggctgtcctctactttctttcacactatacctccaaatgttttttgacgcgctaagatttaagatactggaacagatccatctgttccgcctgatacggccttttatatgccgtgataatatgtctcatattaaagaaaataccggcatcgctacaggcggaagcaaaggcattccaaagttcctttgccctggggctggtacactggtatctgtctctgtatttcttttcatatttttctctgaatccctgttctggaaatatctgctccagcttttgaaaataccactccctctgattctgcctcagagtcatgccaaaggcaggatagataaaatctactccgcattctttagctttcttgacgatgccaagaacattctccttcgtatcctcgatccatggaagcaccggcatcatcaggatccctgtaaagatccccgcctctttcagccttgcaatggtctcaaaccgttccgaagacaaagaaactcccggttctatttttttagaaagattgtcatcacatgttgtaatcgtaagtttgcagatcacaggggaatgctctttaatctcttccagaatatcaatatccctggtaataagcgcacttttggtggcaatggcactgccaaaaccaaacgcattgatcagctccagtgcatgcctggtgagtttcagttccttttcaaaagggttatatggatcactcatggctccggtggccacgactcccttttttgtttttctccttagatcatctcttatgattttcagggcattttctttggcccgcacctggtcaaaattctcaatatgataacagtcacttctgctgtcacaataaatacaaccgtggcagcagccacggtatatattcatgttgtattcttcgccgaaccaggaatcccccggtcccctggtgatgatctgctttgcctttacatattccatcctttttacctcacacgaccggagttctcaaaactgttttcagacgttcaggagctgtccttctcggatcagacagatagatctcatgatgcttgcggccatttcccacatctggcgccagtccattctccttcataaatgcggccattttttccattgtctcagcttcctgggcataggttcctatatgcattgcctggacacattttccctccgtaaatgtctccatccggagacggctgatatccagtttgggcttttttatcttgatctcatcttttgcccactgaaatacatcctccgtgacaaattcaggctggcggatcatagaggtccagagccattcctcccttggagtattcaagtcaaacatgctgtctttggtccaccaaagtccctccagcggaggtactacatattcaaaatacccttccggtctgttgttacccattttgctcatttttattgtaaaagaaaatgcatataaaagctccattgcctgctggtaattgtctccgccaggctctccttttccgtccaccataaaaaaagtcatttccgggacttctataaggaccggtttcttttttggcatatacagatctttatactcttttttataatccagtttttccataaactcactccttcagtgcaatatacatatggatctcagaatcctccatcgtgcctcccggctgatattcctcaaaatccccggtaaaactgcggtttaggtccatgctccaaagcttcatccaaaagtcactcacagccttctgcatgtgtccccggacaacaaacttcgcatattttcctgcggggatcacagcaaacgtcaagccctcctgggactgctcccggctgtttacctcacatcctactgtgatctgatattcctccattttctccccgttgtaatcagaatacagaccgatgcttttttcattctctttatggtcaatgtgaaagaagatgccttcctcgaaaaaacgtccccacagcgatccaatcaccatgcccatatccggtgcatcattggatgtcctagcactgagccccgctactaacttttcctttaaatccactacttcgtaatccataattcttcctccattgttttttctttattgtacaacagagaacttgacagctgtgtgtcaggttttacttttattacacagggaagttctgagaacttccctgtgtaataaaagcagcccttcgggcataatgcgcacaaatgcgaggggtaatcatttgacttcgtcaaatcgcatttggcgcgcaaagtgtacaaacccctcatagggtgaatagttagagaactttcatgggtttgtacactttgttcttacacatattacacagggaagttctgatactggccagccataagctccagacggtctatcatcccctggcggatctcctccggctccagcacctcaagtccaggtccgaacgataaaagccagccgtacagccattcctgcccggaacacggaaaggatatatagaaggcgccgtcctgcaccttgatccattccggttcaaactcatcatagacacggaatcctagactgccgtctacgcgaacggacaccgtcagatcattgtgttcctcaagttccggcatggttttaatttgcctgatatcccttcttttaaaatgctctttcgtgacttccaggttcttgagccttttcagcttaaaggtcctcatttctttgtgttttttacaataggcgatcaaataccagtccatcccccggaagtaaagctgcataggctctgccgcccttctggagtgctctccctttgcattatagtaatcaaaggacaccacttcctggttaagaactgcctgcttcagctgctcaaaaagttccttttccccctgtgcattccacctggagaagtccacataaacccagttttcatcatctttctggaacaggcttgaaagcctggataaaagcttctgggcgtccatatgctctgtcaccgccatacactgcagcgacaaaaggatctggttctgttcctgctccgtgagagccgacttgtccatgacaaaatcctctaaaagaccgatgcctcccccttttccccgggtacagtaaaccggtatgcccgcactactcagtgcgtcaatgtcacggtatatggttcttacggaaacctcaaaccgctcggccagctcaggggccgtgacctttttcttttccagcagaatatatatgatttcaaataaacgcgtgctagtcatgatttatctcctttttggtattataacataccacaaggctttatgcccttcaggtggacgtgctgcgcacgataaggtatgacattttccacataatttccgttcagctcttagaatgcttcactccaatcatgtagaaaatggacgtaatgtctgctggagaagggtttctgtcaaaagaaaagtgtcacttttcgaaagttatttgccactattggaggagtacatttcaaaagtgcgacggaaatagtggtgaataactcatgacatttccacatgatttccgttcagctcttagaatgcttcactccaatcatgtagaaaatggacataatgtctgctagggaagggcttctgtcaaaagaagggtgccacttttcgaaagttatttaccgctattggaggagcgcattttaaaagcgtgacggaaatagtggtaaataactcataccctctggagcatcccgcatcttataccctgcgggtggacgtgctgcgcacgataaggtatactattcggtatagcacatgtttattttttgcagcataaaggagcatagtatgagttcttatcagttaaaaaatgattctatttctgtttctgttgacactgccggtgccggtcttacttctattatggatgcagagggcaaggaatatttgtggcagggtgattctgagttctggagcggacaggcccctgttttgtttcccatctgcggcagcttaagaaacggaatggcttctataggagatggagagacctgtaccatgggcaggcacggcattgccagaaggtgtgaatttaccctgagccatctggatgcggattgtatttcactttctttaaaagccgatgaggaaacactgaaagcttttccctttgattttgaatttcagatgacgtaccggatcaccggcagcagtgttgccgtggaacatacggtgacaaaccatgattcccaggtcatgccgtattttgtgggaggacatcccgcctttcactgtccggtaaatgacggagagaattttgaggattatgtcattaaatttgagcagccggaaaccgcagcctgccctatgctcacagaagacgggcttgtcaacgtggacagccggaaaccttttcttaaccaagaatctgaatttggagtaaagcatgaacttttctataatgatgctctgatttttgatacccttacatccagatctgcttccctgctccacagggataccaaaaaaggaatccgtgttgattttgccggctttgattatctcggaatctggtccagcgccaatgacgggcctttcgtggccatagagccctggagcggcacctccacatgctccaatgaagatgatatatttgaacataaacggggagtaaaaaaactggcgcccggacagtctgagacactgacctatacgatcacggttttatgatatggaggggaatatgtatcagatgatcggctttgatctggatggcactcttctggataccaagtattcgattctctcaggctttcgggatttgtatgcagaaacatggaaggaaaccaaacctcttggcgaatttgaatattgcctgggaggcgacagtatcgccctgcttcattccatgggatttccggagggaagcattcatgtctggcttaaaaatattgaacgctacgcacatacaattcacccttttgacggaatcccggatactctgtctgcgctgaagcagactggaatcacactgggtgttgccacgaacaaattaaggattgaatatgaggagaccatggagcgatttgaactgaagcactttatgagacactccatctgcctggatgaagtatccagagccaaaccggatccggaacctttatactatctggctgagcagtcccgcacccctatcacccacatgctgttcgtaggggatactctttatgataaggactgtgccgaggctgccggctgtagctttgccctggccggatggggagcctctgagtccttaaagaaagattgtagtctggttttaaatcatccagaagagttactgacactcattgattagaaagaaggtccaataaatgaagcaacataccccgcacaagaaggtattggatatccttgattccctaaacatttcttatgactttgagagacacccggccgcctacacgatggaggaaatcgatgctcttagactgacccgtcccaacgagtccattgccaaaaacctgtttttaagagacggcagcggaaaacgccattttcttgttcttgtggccggagacaagaccgtggatttaaagaaattaaaacagaccataggatcgtccagattaagtttcgcatcggaagaacgtctgatgaagcacctgaaagttaccaaaggatctgtgtcccctatgggaatcttaaatgatgatgatctggcagtagaagtgtttatcgatgaagctcttaaggacagtacctgcatcggtgtccatcccaatgacaacaccgcaactgtatggatcagctgcagagatctagaacaagtcatccgctgccacgggaatccattctcatatatccctatttgatcaacaaagcttattgggaggtcctcgcagaatgccgggcaactggagaaaatgtcaaattaatggtataatgaaaccaacccatctatttaggaagagcttaaaactttcctaaagaaaacaactaaactggaggtttatatggtacgatttgcagtgataggcacaaattttgtaacggacggcttactggaagccggaaactggtgcgaagatttcaaacttcaggcagtgtactcccggaatatagaaaaggcaaaggagtacggtgcaaagtacggcgccgaagaatattatgacaatcttaaggaactggcaatgtctgatacagtggatgccgtctatgtggcaagtccaaacagccttcatgccgaacagagtattatgatgatgaaagctggaaaacatgtattgtgtgaaaagacaatcgcatcaaattcagaggaattgaaggaaatgctggagacatccaaagaaaatcatgtggtcctcttagaagccatgcgctctgtgtttgatccaggctttgctgccatcaaagaacatttacataaaataggaaccgtccgcagggcaacgttccaatactgccagtattccaggaggtatgacaagtataaggaggggattgttgaaaacgcgtttaaccctgctttttcaaacggtgccctgatggatatcggtgtgtactgcgttcatcctctggtaaaattattcggcgcaccaaaggaaattgacgcatcctgccttaaactctccaacggggtagaagccgaaggaaccattgtctgcaaatatgaggatatgcttgcggaactgatttacagtaagataacaaattctgccctgccaagccagattcagggagaggacggaaccatggtcatcacagagatcccggacaccacagagatttcgattgtatacaaagacaaaacaacagagaccataccgatcgagaaaaaaacaaacaatatgtactatgagatccaggagtttatccgtctcataaacagcggttcatctgccgagatccacaatgaggcttctgtaatggaactgcaggtcatggatgaagcgcgcagacagaatggaattttatttcctgctgacgaaaggagataacatgaacattgaagatcagatcaggcagatcgaacaggacagaaaagaagttatacagccgtgcttttcttatgaaaaggcgtataaggtcggaatggcaatgtatgaaaaagctttggagaaaaaacttcctattgtgatctccattactatgaaccgccatcagatcttctatgccgctctggatggtacttcctctgacaatgacaactgggtgaaaagaaaagaaaatacggtatattattttgaaaaaagttcctatgaaatgagcctgtatatgcagttaaaacaggataccatgcagaatcgctatggattaccggcatccgaatatgctgcagcaggagggtgcgtccccattgtcgtggagggcgccggtctggttggaaccatcgggatttcggggctgaaacaaaatgaagaccatgatttcgtcatggagacattaaaggaagcaaaacaaagaaagtaatcttccagcaatggaagacaaaaggagtcatctgacaatcgccggatggctccttttaaaatatgtaccaagttaatcctgaattctctccacgctgacatttccgaggatttgttccatatcctcgctctggaatcttccggtgccctcgttcatcgcattggcggcggacactgccaccgcaaaggccagtgcctcctctggtgttttgctgcggctcattgccacagcgaaagctcccaccatggaatccccgcagcctacaggattgacagcctcaagctttggcggccttccgtggtaaataccatcttcacagatcaaaagggcaccgtccgccccggccgaaatgactacaaatggtatcccccagttcttaagctgctttcctgctttgatcaactcctgcctgttctggattcgggtccccagcagtgcctctaattcctcctggttcggctttatcattgtaggaaccgctttcaatccttcttccaaatagaccccgctggtatccaggatcacctgtttcccctgacgctttacttcctcaatcagagttttataacactctgcctccaatccttgtggcgcgcttcctgaaatggtgatgacactgctattctctgtcatccaggcgaaatcttgtaaaaaccgctgccactcctcttccgtcactggtgcgcctggctccagatattctgtcgatgtgccgtcttccgccaggatattgatacagcttctagtctcgcttttcacctctgtaaattgatgttgaatgccatcttcatccagcatttttctgacgtacccgccgttaaagcccccggcaaagcctgctgcctgcacctcttcaccgcagagatccacaatcctggccacattcagccctttgccgcctgcagtgtttgtacactcctccactctggagacggtcccgggccttacagaacctttgatcttgtaagctttatccactgatacgtttaatgtcaccgtagtaatcatcgctattcctcactgtcgattaaaatctttccttttacagcacccttttccttataaagctcaaaagcatccataatcttagataaaggcattttcttaaaaatcagggattcatcaaacttcagctgtcctgctttaaaatagtgtgccgcaagttcccattctcttccggggaacggagcactgtaagacatccaggaacccgtcagggtaaattcctttcggttcatatgttcccattcttccacgctgaacgaaagctccctggtcggtgttcctataaagcagactcccgctttgttggccgccagttcaaaggcatatttcattgtggtggtgactccggctgtctcatagacataaccaaatcctttgccgtccgtgagtttcatggcctgctccatgaaattttcatccaatgtattgatcccttcatctatgccaagacgtttcgccagttccagacgttcggtgctgatatcaaagactacaacctttttggccccaaatatttttgcccactgggcggtaaagagccctatggtgcctcctccaaggatagctacgctttcaccgcctttatagtctgttctgcaaagcccgtgaagcgccacagttgcgggctcaaaaaaggctccctgttcaaaagacacagaatcctcaaacttcaccgcatttttctccggcaccgtcacatactccgcaaagcttccgaactctctggagccgataaagctgtaatgtttacagagagaataattgcctttctggcagtcctcacattccatacaaggaaccagtggcacacctgctacacggtcacctggttttaaggaagatactccctctcccactgtttctaccacaccggaaaactcatgtcccagaacattcggaaagaaatgacatgcgtctccattgacccttggcacatcagatccgcagatccctgtatatttaactttgatcagtacctgccctttctttggaacgggagtctcgatctcctcatagcggatatcatttttggcatggaccactcctgctttcatcactctcacctaagcctttccttcacttttcactaccttgatctttgactttacgtattccttgaccatttccttgcctgccttgttatactttttcggatcgatggcatctggctgttcctttaaaaacccggtaacaccctttgtaaatgcaatccttaagtctgtggcataatttactttgcagatcccgcgtcttacgcagtctgccaccgtttcatccggcacaccgctggtcccatggagcaccagaggaatggagacaacctccctgatctctgagagacggtctaagtccagcttcggctctcctttgtaaaccccgtgggccgtcccgatggccacagccagggaagtgatgcctgtcttcttggcaaattccttggcttgcataggatctgtatatcctccgtcgcctccgtctaagtcatcttcttttccaccgactttgccgagctccgcttccacagatataccggaaggggcacaggcatccgccactgacttggtgagcctgatattctcctcaaaggattcatgagagccgtcaatcatgatggatgtatatccggtcctcaaagcctgcatggccagcgcgaagctgtctccgtggtctaagtgcatggcgatcggtacactagcacgctgcgccgccgctcttacgttggccagaaagtaatccaggcctgcatatttcaccgtggacggcgtggtctgcatgatcaccggagattttaactcttctgcggcttccatgaccgccatgaccatttccatattttctacattaaatgcacctaccgcataaccgcccgcctgggcacgaagaagcatttgttcggttgtcactaatggcatattcattcctcctgaaattttgataaagccggagcgggcttttcggcccgctcactgtgattaatcttcttttaaagctgccgctcttgctttggatgttcttacggtgaacacaagacagatggcataaatcactgcgatcatcgcaagacctgcaagattctcccgtgtaaagatctgcgtaaacatataagtgatcggtgagcctccctggtcaagggccgcaatctgtgatgcccccttggttaagttgacagacttagccagcgctgtggtccaaggaattgcctggtttgcgatccagatggtcacatacatgatcacagatccagagattaatgtgcggaacaggtttcctttgtgcactgcaacggcaatggcgataaagaatccaatggtcgccagatcaccaaacggaagaatgacatttcccggcacgatgatcgcaataagaatggtcagagggatgaagatcaggcctgcggtcactacctgggcatctcccaaaaggattgccgggtccagtccgatgtaaaattctgcgtctccggaccgttttgtgagaatctctttcattcgctcagagagaggcatcagtccttccatgatacatttagtgattttcggcatcagcaccataactgcggacatcttgattcccagctggagtgccgcctgaaaattatatcctgcaagtgctcccaccagcgttcccaaaaggccgccgatgacgataggttctccgaggactccgactttttcctgcagtttgtctgcagtgaggttgatcttattgagtcccggaattttttcaatgatggcgtcaatagcgcaggcaaacggtgccaggtacgcggacgttccatgagggactgtaagtccttccaattcaaaataatcttccatcagcggtgcgtataaatcaccaaacttgtatgtaaaaaccgcatggaccactacccctaaaattccgatggcaaagttccctgtcaccgcataagcgatggcaccggtaaacgtcatatgccagatgttccagatgtcaatatttacggtttttgtcaacttcagtacgatcatgaccacattgaccaggatcgctaccgggattgcaacagttgcgattccggaagcccaggtgatcggcgacattcccggccatcctacatccacgacactcatgtgcagcccaaaggtttctgacattgcctttgccgcagggcctaagttagcattcatcatatcaacgatcaggccaagccccacgaatccgacaccgaccatcagtccggcacgcacagcctttcctattttaactcctacaataatactcagtatcgcaatgaccaaaggcagcataaccgatgctcccatgtcaatcacataattaattgcctctccaaaaatacccattgttctcctccttgaattttccttttatttattcagcacttccaggatcttttctttcgtcttatccactccgattcctgagataaacggcattcccgtaatcaacggcgcaccataatctctctttactttggatgtagtcacaatcaggtctgccggaagattggattcaatctctgagatcctcacctgtgcgatctctatatcaattccgttctcttttgccaggtctaccaccgcgtttgctgccactgttgatgttgccactgctcctccgcatgctacgattactttcttcttcataatgaactctccttttctttgatgatatttataatttctgccggggtttctgctaagctcagctgttctaatacatccaagtctctcagaatccccaaaattgcctgaagtaattccagatgccctttttcgtccaccgccagcataaagatgacccggacgtccactgtctcgtcgtctgtccccatctgtacaaaggatactggctgttttgtggttacgatggcgatccctttcttgtttacatggctgatgtccgtgtggggaatggcaacccctgctcctcccatgtccacaccggtgggaaaatcctgctctctctttttcagtgcatccacatagctgtctttgcagtagccgagagcatgaagcttccctcccgctgcctcaaatatttcaccgctgtcctttgcgtccagtccggtcaaaatcaattcttcttttaattgttcccaaaccatgatctactcctttattctatgttcataagttttaatgatctttgctgtctctctggcgctctttgcacccaatagttcttccttgaaccgttcatttgtaagcatattgaccagatggaaaaatgctttcatatgctttttgtgatcgactgtgctgaggcagcagaaaaatctcacttcctcccggtctccgtcctcatcctcgatgataacaggagttttaagcctgatcaggttcatcccgactttttggctgcccgcctcaaatccttcatggggcagggcaaaacctttggatatgacaatgtagcttccattttccagcacattctggatcatggcgtccacataacggtcttcgataaatcctttttccagcagcggagccgccgacttatgaatggcatccttccagtcactgcattcgatgtccagctgtatgttcccttctctcaaaagttcgcacaaaagcggttctcggtactcatcatatggctcctcaaaatattcatatacggtttttgatatatccctgaagagatccgaatccttcaccaagggttttaaaagagccaggagctctgccggattattctctttttcctgtaccttcttcgttggaatcccctgttttccctgcagaagctctatctttttgtttactctcagataatcttcatcggaaaacattggtgtcaccagcacatattctccctcataatccttcagaggaatggtagacacgatcatatcaatgctctggtggccgctttttttcagatcatgggcagataccacatcgacgatatggaaatcaaaccggttcttcatcttggccagcagcagctgtgatgtgcccacgcctccgttgcagacgatgacaacgcggaagtcgatctctttcttttttctgcgttccagcgccgcactgatatgaatgacaatataatcgatctcgatttctgagatctttctccccacaaaacgctccagcatttccaaatgcttggaagctgccaaaagcactgtttggttttgttccacaatctccttcaggaaatcatcccgctgggtgatattaaattcttttgtaaatatggattccagatgattcaccagattctcgtaaaatacaaaatccttgtttaaatccacatgcagttcattggatacttgttcgataaactttctcgtgatcagctggagaccgatgatcctctggtttctgctcgtcttttttatatagcttaggctgtcaagaatatcactgagaagctctgtctcgccttcactttccgagaaatcccaatactgggatacatactttaaaatgtctcccgccatttcatacttgctctttttcatccctgtggtgcatgtaatctgtcttccctgctttactctctgaatcataatcatcagatactgaagcagatagtcaaaggaagcgtctgtcaggaaacgtccgtgggcatgttcctgttcattgatgatcttctgtaaattctgcctgtcttcttttttcaaacggcatcccacatttaagccccgtatgaaggtctgtaccacactcccctccgcgtcaaaaccgcctccctggctcaggagcttcagcagacaggccctctttgcactctcatctcctgagagcaccaggcctttgttggaatgggattctactgtcagattttcagccaaaagcatctgtttgacactgtccagatcattgatcacggttgccctgctcacgtacaaaagctcagcgatctccgataatgtcacatgtccctcagcctggatcaggatcgctgcggtcagcgttttcctttctccttttgagagcctgtaagtgtagaagtcattctggcgaaacagcttggccgcctcctcaatgtcagcctccacaagaagcaggccgttgctcccgaacttaatcacagaaatatgatgctgttccaaaatgtcattgacatcattgatatcatttctgatggtccgctccgaaacctgaaacttctctgccagctctgaaatccggaaactcttatccgcatccataaggccgagcaaaatctctcttgatcttttgttcatttttatccctccgttgctatgcatttactatatcatccttgtattttagaaaacagtcaaaaggatttctggtatttttgcaaaaaaataaacaggtctaaaacctttccatagattttgaaaagttttagacctgtcttttatcccaaaagcttttgaagcagctgatacagttcctcatcagagccggcacagtaatccggcctaactactgacggcggatatggatgcttcctccggttcacccatatggaatgaagccctgcacctttggctccttctacatcgttacgaaaagaatctcccacataccagaccgagtccttttgaaccttcatcttttcacaggcgtacagaaaaattcttttgtcaggtttcgccgttcctatatctcccgatacaaaaatagtttcctttaaaaaccattcttgaagccccagcgtctctattttctcccactgatgtccggacggtccattggttatcactccgatggggactctcgcccggcagtatgacaggatctctttcataacatcagagaccgtgatctgtttttgatgctccgcgtacagatgctggaatttaagccccgtttcgtctgaaatctggatatcaaactcctccagtgcctttctgatcctgtaaatatacatctcatccattgtcatctgcccactctgggactgttcaaatgattcatcgctgtattttctgctcaatgcaaacaattgcctcatatcgatcttgtatttttcgttaaacagctgccggtatgccctctcaaacggagtctgctggtcatacagtgtatcatccacatcaaataaaactgcatccatgtctctcttccccctgtgaattatgtacttttgtatcatttaagaagattataacacaaaccaacttcccgcaaatgcatctgcggccacaaaaaatcaataaaacagctttcagcttcttgtgttttttgatttttcccggtatcataacggtgatatccttaagttttttcttcatttagatgagcctccctattcttcttgaggtttccgttttaggatgtcacaattttttatagattcattgtacacctccataaaaaccggaaaggaaactacaccatatgaattgggatggaaaacgctattactctttagatttctatttaaaacaaacgtttggagagaaaatatacaagatttctttagacggaggctttacctgtccaaaccgggacggtactctcggaacccgcggctgcattttctgcagtgaggggggatcaggagattttgcctctgatcgggccctcacagtgacagaacagattgaagatggcatccggctaatagaaggaaaatccaatgctcaaagatttatcgcttatttccaggcatttaccaatacctatgcccctgtggaacgattaaacaggctgtaccgtgaagcaatccaggatgaaaggatcgccgcactttccattggtacaaggccggactgcctgccgcctgaggttctggaacttctcagggaattaaaccatatcaaaccagtcttcgtagaactgggactccaaaccatccacgaagagaccgccggattgatccgcagaggatatcccctctcctgttttgatcatgcagtaaaagatctccatgaaagagggatcaatacggtagtccatttgatcctcggccttcctggagaaacggaagaaatgatgcttaaatccgtgcgatacttaaacagcctccctgtggacggcctgaaactttcccttctccacgtccttcatcatacggatctgggtgagctttataaaaagcagccgtttcctgtgtatgaacttgacgattatgtcagcttggtcattcgctgcttggaagaactgagggaggacattgtcattcaccggcttacgggcgatggtcccagagatcttttgatcgctccccgctggactctccataaacgcaaagtcttaaatgagattgccaaacgcatgaaacaagaggacagctggcagggtaagaatcaaagttcctaacgtattttatatacatccttaaaaaagcttgtaccaggaatttaaaatctcggtacaggctttttgttttaattattctttttttcttttttccttcatagctgttgttgtcacacgtgttattatttccgatctcaacaccctttttgatcggggagagcaaaaatccgatgaccacgccgagccagagccagaatccgccgaagaaaaatgcttctttttttgtcataaagagttcctcctttgcaaatactcttataacttacttcttcattctaacagatataggtccaatttcaagttttgttggaatgtttctgcgtcaaatttttttacagcagggtatcccttatgaaatgaagctgccacagaataaaccgctggcttatggctctttagataatagatacatttctttacgaagacacaaaaggccagcgcatgtaaaccaattacatccactgaccttttttacaagtatttatttgctaaatttacagaatctccgtaatatcagccaaggaatccacaatcacatccggctttacgtcactgttctccacatcctccaaggtactctccccagaaagcaccagaatagaagtcaccggacttccgtctgccacggcgatatctgtatacagcctgtcgccgacgatggcgatctcttccggtttaaaacctgactgctccacaaaataattcagggtatgctttgacggtttaccgaaaaactcagggaatcttccggtggacgcctcaacaagctttgccatagaaccgcagtccggaatgaagtttcctccctccatcggacagttccagtccgggttgatgccgtaataggtacagccgttccttacatagtggcacgccttggaaatcttctcataggtaagcgtggtatcaaatccaaggatcacgatatccgggtcttcctcaacaagcggcatgtcaaacgcttcaaactcttttaacagagaaggagttcccactacatagagggtctctcccggatgatgcttttttaaatactggatcatcacatggctggatatcatcatctgatccggtgtgatggaaatgtccatgccggcaagtttgtctatgtaagcctgctggcttttggatgaattattggtaaagaaataatattcccgccctgtgtcttccaccttctttaaaaagtcctgggtgaatggaaacaagtcatttcccagatagatcgtcccgtccatatcaagaacaaaacatttgatatctttcactgcctgaatattttgcttcatctgcttttctccttattcttcgtcataaaaccgatgcgtgatcttttccgcgatctcctgcatccttcctttttccactgccaggtctaagacgctgtagcggtctctgaccttgtgtccgttcaacaagctctcgtaaaacagttccctgtcaatgccaatctcttttggggaaaccggtgcgcctactgtctttaacagtccttctacgtattccctggatggtgccagcttctttgccgcctctggtatctcatctcccatcatctcaaagatctccgcgatgatcggtgttgcgatccccactttgatgccgtgaagctccggatacttcttccttgcgataaactccatctcccagtaatggctcagcatatgctccgctccggatgccggacgggacaccccgatcagccccatggcaactcccgtcaaagtcagagcctcgatcaggtaaagaaccgcttcttcatcccggttggccagtgcctcagcgcttcctgttactttttcaagagctttctgcaccagggtcacacaggtctcacaacagtactctccagtgttttctttcgataagtaccagtccgccagcgctgtaagcttaccgatcacatctccgaaaccggcccggatcatgtgcatcggtgcctgcttcatgatgtctgtatcaccgaggattccataaggcagcgttgcgatgaacgagatcttcttccctcccaggatcagaggggctccgtctgacgcatatccatccatggaaggtgccgtacacacaacaatgtatggaatctttgtcctcgctgacatatattttaccatatcgtttaaggttccggaacccactgcgatcaaaacgtccgtctcaggctccaggttcaggaacatggttcccgctgcatgttcatccgggatcaagatgtcctctcctgagtccaacacaacactttttacctggaaacctgcatcttccagaagtttctttgctgtttcccccgcagctttatatgtattgttatcactcagcatgtaaactttcttagcttcaagccctttgaccatttcaggcagttcactgatcactccctgccccatcaccaggcgttcaatttctaaagtatgatgtcttccgcagctgcagtcaaaacttgcctttgccatttcattcatagaatagtttaagatctcatccattttgtttcctcccgaatcttaatttcaaataaggttaccacctgcaacataaataataccactggtaatataatctcattttacttctattctattataaaatctaccccttctatagaacaattgtataaattctttattttaatcaaatatacagacatttgtataaatcagtgcattcatactgcttaaacacccttctggatataacatgttccacataatttccgtttggctcttaaaatgcctcacttcaatcatgtggaacatggacgtagtgtctctgttaaataaactcgatggtatttcccggggcaagatccgatgctgtcagcggctcttcaccctttatggcctggaccatgatgcatccagggcgttctgcctcaggcccgcccttgaagctcacagtacagtgccccaggcctctgagcgtttcgttggcctctgtgcccactgctgtcacctcaaatcctttttcgttgatcagcatggtatccccaggctctatattggctctcagttcttcgatggtatgcagcacacacagatcttcaaaggccggcggtgcatcgtcgttaaacagaatgataaaattggaatcaggatctcctaaaaatgtcagagaatcttttcccagcttctggattcttgtgaaatacttcatcttatctctcccttactgataaatacggttggttattttctcggctatctcctcaagtcttcccgttttcagggccagttccaggatactgtaccggttcctcactttatatccctccaagatactgttatagaacagctcccggtcgattccgatatcagtcgggtataccggcgcccccacggtctttaagaggccttccacatattctctggacggcgccagcttcgtagcctcctctggcacctcgtctctcatcatctcaaagatctccgcaaccaccggggtagcgatccctactttaatgccgtgcagttccgggaactttcctctggcgatgaaatccatctcccagtaatggctcagcatatgctctgcgccggaagcgggacgagatactccgattaaccccatggcaactccggtgagggtcagagcctcaatcagataaaggattgcatcatcatccctttttgccagtgcttctgcacttcctgtgaccttctcaagtgccctctgtacaagggtcacacaggtctcacagcagtattcattcactttttcctttgccagataccagtctgccagagctgtcagtttccccagcacatcgccgaacccggcatggatcatatgcattggggcctgtttcatgatgtcagtatctccgaccacaccgtaagggagggttgcgacaaaggatatttttcttccttccaggatcagcggcgccccgtcggctacatatccatccatggaaggtgctgtacagacgatcacatatggaatctttgttctggcagacatatattttgccatatcattgatggtacctgagcctacagcaacgatcactgcagtatccggctcgagattcaggaacatggttccaacggcctgctcatttggaatcagaatatcatccccggaatccagcatgacatttttcacaaggaagtcatcagcctccaggatcgaaagcacacggtctcctgctgccttaaatgtatggttgtcgctgagcatgtaaaccttcttgcccctaaacggctccagtacattggaaagttcctttaaaactccctggcccataatgatatgtttaatatccagcgtgtggtgttttccacagctgcagtcgaaatccgcgcctgccatttcattcattgaaaaatttaaaacttcatccatatgctctcctcctgcctatttgctaaactgtttttcgtaataagtaatccgctctaccttttctgtagaaggcccatctttgaattcaagccccatccagatatccagcagataaagtgccagctgaggcgccaccactcttgcccccatacacatgacatttccgtcattgcttaggatagaacgctctgtagagaatggatcgtggcagactgccgctctaatacccggtaccttgtttgccgtcatagccataccgatgcctgtgccgcatacaaggatccccctgtcacactcaccgctggtaaccttctcacaggtctttactgcaacatccgggtacaatgcgctttctcctgcttctactccattgtctacatacgtatgccctgtttcttctaatctctttttgatcgcctcttttaattcataagctgcctcatcacatccaattgaaatcttcatatgtatctgcctcctttgattttatgtctccattttacctcgatatttatgcaaagtccatagaatttattgaaattatgtataaatatttctttctatgatgtatacagaccaaagcttgcaacgaaagcgatgacaacggccaccggtcctgtgatgacacgggaatataaaacggacggcacacccagttcgatggtctcagattcacattccgcgagactcaatcctaccgggatgaaatcacagcccacctgggcattgatggcaaatagtgcaggcagtgcgtactgggccggaatctttcccatagcgatctgagatcccagaagtgttcccaccacctgcgcgataacagctcccggtccgagcacaggtgacaaaaacggcatcgcacagatcagagaaatgatcagcattccagggagcgtggcacacagaggcgagatggtcttcgctatgatgtttccaagtcctgtggcagtgataataccaaggatcgtacttgtgaaagccataaacgggaggatattttttaccaccatatcaatagtctcacgtcctgcggcaaagaattttcctaccacctgccctacaccgataccaagccttgtgatcagtccaggctgttcgcctgcttccccagctttattctcctgcccggcctgtttttctccctccggcgctttcttttccatgaccgtctccccatctgcataggagagacagttttcgtcaactgcggatacatagatgtcaggagtgatgtattttgccagaggaccagactgtcctacaggattcaagttgatcgtaaagattcccttttgaggataaatcccacatcttaaagtacctccgcagtccacgatcgccacaaggatttcttcgtcgggcacattattcttgtgtccgtccactgcctcccctccggtcatctgggcaagctttgctcccagcggatggatgccgccgatggcagtcatacataagatcttgttgcatgtttctgttgcctgaactacaagcggacctccgaatcctccggagcctgcggttatctttactggcttattcattgacagctacctcctttttccccatcttcttatatttgttgctgagcatcagataaattctctctgtcaccatacctctgatgaagatgacgacaagtcctaccagaaaatatcggactgccaagtctcccagaggaagctttaacttctggatgcccacggcgattcccatgtagacaaacagttcaccggcattggcatgaggaaaaaatcccagcaccggatgacaaaagctgatggccgcatcaaaaaacggcaccttatacttttcttctacaaatcttccgaatgtgtaggccattggatttccaacacaaatcatggcgatcacaggcaggaataagtaccggcatattctgtttccggtgatcttcatacaaaacttttcaacccggtcttcaccgatcagttttatgatcgcgttgactgctgtcatcagacatacgactgtgggaatgatcgtggtaacccagctcaaaaatgtctgccctcccgtggaaaacagtttcataaacccatttgctaaatttgatataacctgcatatgttcctccttaacctctcatttctaatgcttccagcgcctgtatgtatcctttataatacttctgcttttttttcgtcataccacggagctcagagagcacttcccggaaatcccggtccagcaattttacctgataaacctcagcaaccggatggaacctggccagaaacgagataccgtccatcgcttctcctcccgttatccttccgtcatcgccgcatgcaagaatgacaatgtgtcccccggacagcagccgcccccttttttgtccgattcctaccgttccgttttggttcacccgccgcacagctttctcataatctttaatctgaaaaaagccgcccgccgactggagcaaaaacaataccagaaatactccaaaaagaatcactacatgatttgacattttcctctcctttctttgaacattttctctgtattgttattttaactctcaacttaatcatagtccataattatttttggaataatgtataagtaaatattattgttcaaatattaatacattttttcaatacaattttattcataacaaacaaaaaacttcccggatttttttaatccgggaagtccctttatgttaacttattttcaattagaatatcacacttcttttaacatctgccttgcacattctgagtctgtgatcaggacattgatattcttggatctgactgctccgatgacagattttgctttttcaattcctccggccactccaatcctgatatcgatgcttttgagctgttcctgggaaatacctgctactctctggttaaaggaatcaaagggctgtgtattgccctcgatattgtaaaagtaaagtgaagcatcccccactgcacccatctcaacaaaatcttttagttccttctccgacaaatacccttcggccacgagggcggtaccgcctgcctccgggatgccgatccccatcaccacgatcctcagcttagaaaaatactcatagatataattgaccgtttcctcttgaagaaaaatatccttgacctctttgctggaaaaaatcccaggtgagagaaactggacatagtccccaccgaacttctcagcaaattccacagcgatacggttggactggacatcccgcttctccgtccttttctgggaaatacccccgtaaaggggcacaaataaaagtttatttcccttatcgtaacctttatccacatgggctatatgggacagcgtcctacccatggtaactcctacataatcatcattttttagaatatggctcagataatcaaaggctgcctcagacagcatgtccatctgctcttctcttgtatccagaggttcactctccacaatgatcgcttccttcagaccaaatctctgctccagcttctgttccagttccccgtaatcgtaactgattggattaatgacctcaatcttcacaatcccctgctctcttccaagtgccagcatcctggaaaccgtggctctggaaagtcccagtgtgttgcagatctccacctgggtcttattcttcatatagtataagttacagcatttataaatcagacggtcatcatcaacaattttcttcatccgcttccacctttatattaattctaacccttccagcgcattatagattccgttttcctttgttgtctgagtaaacatatctgcgacagccctgacagcatcgctgcagcggcccataccgattccggttcctacgtttcttaacatctccacatcgttgtccgaatcaccgaatgcataaaggttctctctggaaagccccagatccttcgccacctggacaaccgcatcaccctttgtaacaccctttaaagtaatatcaaagaaattctcccggacatgcttggcacattcaaatgtgtccgcgtactccttcttaaagtcttcaaacacatccggtgccttatagttcatcgtcagctttgatatatgctgtttcttccagtacttccacggtgcgtaccactccatcggaagactgaacagccgacagaaatacttaaaaaactcttcatcgttatgtaagtagtaggtgacatcctgggtatccatctggatgatcgtatccctgacaaaatatttgtctatgacttcgtgcagcaggtcctcctcaataaagatatcccgcagcacttcaccgtcaacttccgcatagctcccattgcaggtgaccgcaccgtcaaaatgttcgatgtcagcctccaaaaaacgcttggtccgcccggaacagagcaatgccgcatagccgttgtcctgaagcttcttgacagcctccagggtcttaggcgtgactgtcttaatatgatctacctcatccaccagtgtcccgtcataatcaaaaaataccgctcctttatattgtttcatagtatggtctcttctccttatttattaaaatcaacagcttaaccaatactattgtactttcttttaattcccatttcaagcggtattctacatcatcagcacctgtatgactaaaatcagtgtaattccaagggaaagcagaaacattgacctatagaaatctttcatgataacgctccttctgatttacttatctattatgtttttatcttataacgttatcataccggatttctctttcataaatctcaaccattttatgaaatatttcttaacattttgtgtttttatccaaaagaagctctggacagcagctgcccaaagcctctcttttattatagtttatccagaatctctttcagtatcttattgacgatacccggatctgccttgccctgggttgctctcatggtctgtcccacgaggaatccaatggcttttttctttcctgctttgtaatcctccacagatttcggattttcctttacgatctgttcaatggttcccttaatggctccttcatcattcatagatttcagtccgttttcctctacataggactttggatccacatcttctttgaagattttttcaaagacttcttttgccactttcctgttgatctcattactcttcaccatggcgatcagatctgccagatgttgcggtgcaaaagaaatgtcctccagatccatctctgaatcattgaccaggcgcattgtctcacccatcagccagttggagacttcctttgcctcggctccttctgcgatcgttacctcaaaaatatctgccaaatgcttgcttccagtgagaatgtcgatatcataatccggcaggccgtatgtttccttatagcggctgcgtttttcatcacgtagctccggctgcgcatcttttattgtctggatccactcatcactgatcacaaccggtgccaggtcagggtcagggaaataacggtaatcctgggcgtcctccttggagcgcatcgggtaggatttttctttggcatcgtcccaacgtcttgtctcctgggtcacttcttttccttcctctaaaagggcaatctgacggtctgtctctccctcaattgcacgccttatggctttaaaagagttcaggtttttcatctccgtcctggttccgaattctttggctcccgcttctcttatggagagattcacgtcagccctcatagaaccttcctgaagtttacagtcagaggctccgagatactgaatgatcagtctcaatttttccagataagcgataacttcgtcggcagaacgcatatccggttcagagacgatctcgatcagcggtacgccggaacggttataatcaaccaaagaacagtcctcccattcatcgtggatcagctttcctgcatcctcttccatatggatctcatgaatcccaatggatttcttttctccgtctgtctcaatttccacgtgcccgtcccggcagattggcagatataactgggagatctggtagttctgcgggttatccggataaaaataatttttacggtcaaacttgcagttctgagtgatcttacaattggtagccagtcccacagccatggcgtattccactacctgtttgtttaatacagggagagaacctggcattccggtgcataccggacaggtatgggtgttgggctccccgccgaattctgtgctgcatccacagaaaatctttgttttcgtcgccagttccacatggacttccagaccgatgacagtctcatattgtctgctcattaccgcacacctccttttgttatctccggtgcttcataagttctcgtctgttcatatgcgaaagccgcacggatcagtttcttttcctggaaacagtctcctaaaagctgcagtccgatcggcagccctttgctgtcctttccgcatgggacactgatgcccggcaggcctgctaaattggcagaaatcgtatagatatctcccaaatacatcttgatcgggtcactgagactctctcccagcttcggagcggttgtcggcgccgcaggtcctaagatcaagtcataggaggcaaaggctttgtcaaactcctgtttgatcagagcttttgtcctcaaggcttttagataatatgcatcataatacccggaacttaacacaaaggaaccaagcatgatccttctcttgacctccggcccgaatccttccgaacgggtctttttatacatatcatgaagaccttctgtcccttttgctctgtatccgtattttatcccgtcaaaccgtgacaggttagagcttgcctccgccgcagcgatgacataatatgcgggaatggcgtattctacaaggcccaggtcaaactcttcgatcattgcacctttttgctccagtgtctttgccgctttcaaaacggcttctctgacctcctggtccagtccgtctccaaaataatccttagggattccgatcttcattcctcttacatcatccaccagggcttgcgtgaaatcatattcttcccgctcaatggatgtggaatcttttttatcataagatgagactgcttccagaagagcggcacagtcggatacatctttggccatcggtccaatctgatccagagaggagccgtaagcgatcaatccatatctggagatagtcccataagttggtttcattcctgtaattccgcaaaaagaagccggctggcggatagatccgcccgtgtcagagccaagagccataaaacattctcctgctgccaccgccgcagctgaaccgccggaagatcctcctggcacatgttcctcattccatggattctttgtcggtccgaaggcagaagtctcagtggtgcttcccatggcaaactcatccatgttggtctttccaatgatgactgccccagcgtctatgaggttttccactgcctgtgcagcataagtgggaacaaaattttcaaggatcttggaagcacatgtggtggcatatccttttgtacagatattgtccttcaccgccatcggaacaccggccagaggcccggtcaatattccgtcatcgattttctgctgtacttcatcggcccttttcaaggcgctctcctcatcataagatacatacccgtggacagtcggttctatttcccggatctggtccaaaacagcctgcgttgcctccctgacggaaatctcttttgcttttattttcctgcccagttccagggctgttaaatctaaaattcccatggtttcctcctattctacagtctttggaaccataaaggctccatccttcttttctggtgcgtttttaagaatctcttctctgtcattttcgttggtgacaacatcttctctaaatacattgtgtaccggaaatacatgtgacatcggctcaacaccatcggtgtccagctcattcagcttatcaacgtagtccagcatactctccatatcctttttcgcctgttccttttcttcgccggacagctccagttttgctaagatcccgacatattcgattgtttcatcactgatgtgatttgccattttaattcctcctttttatccagagtgggttaactcaaaaatcccgccccaaagcataatatgcttcggggcgggaatatcttcccacggtaccacccgtcttaaaaccaggatctctattcttatcctgacttcttctcatttccgtacttaacgcgtaccacgtgacagcctagtgcagattctgcattttgactgtccggctccaaagtgttcccgccgcaaggtgtccccggaaagctttcagtctttggcttttcctccctgtagagttctttttgctttgagtctttttcatcgccttttatccactatgatttttaatcataacacagttgaatttatgaatcaagtccatttcacgaatcatacacaggtacattctcaggtctgatacgtttgcttggtacaagctttacctccaggtctccttcggataaaatttcaatttccgttccttctgtaagttccagattcacgtatttatccggctcttccccctgtggatcttctgagagccaaacactgtgtgccccatattcgtcatccttgtcttgttcaaaagtaaaatcaatctcaccttctccgttaaccgcaacgatatcataagtacctgccggaaaatcttttcctgcagtcatcaccccgaagacttccacctcttggctcagactattatccctcggttctcccattttttttagattggcgtccgatgttttgcaggatatgtgccccttgcccgaaacttctactaaagaaccctgataaagacggacatttttcactttgcagaaccggtccgcttccaatgttttcttatttgtaacctgttcataaatactgatattctgtacatcatttattgctgagaagtttaaatcatcccctgccccagtcattgtatagtttccttccggaaggtccaatcctacgatatatctgccggaagaaagcttcacagaaaaactgttcccggttttttccaaagaataggccgcatcttcatatgtaaaatcgggcattgtttttgtatgctcttccatcccatcatcgttcacaaatatctgaaccttttttaatatctctccgatatcgttatcacttacaacatctaataccatgccggaaataactacaaggctcaagataaattttataaactttccttttccccttttcgtttccgtgcggaactgtctgtgtgcccttttatgatattttgtcatggagctctttggctccacatttggccttactctgtactccggtctattccttgtgctttcgaacctctgtccgatctccaaccgcttaaaatcataaccgcacataggacagacgccgttttttaatttttcttgacagaccgggcatttatcatatttcatattcattccctctgactgataaaaatattatgttatctatcccgatttttaaatttcttcttttgcttttcgatacgttctttgtctttttgctcaatttctggtgcgatggtcttcgtaaaccacaaaagagccaaagccggcgcaaggatccacagggatctctgatcatttcccagaattgatagagtcaagagcccttttgcctgaaacatcatcacaaacatatagacaaaaactaaaagcagagcaaatgactcagtggcagtatagttcttgccccttccagggcctaccagaaatcgctccagcagcaatgcagccccactgatgatcgttaaaacaaatgccacatctgtaaatgaagtgctggatccaacaaagtcttttacccagtcaaacaccaggctgaatacaaacatcagtatcaataccgcccacaacactttttctaattttttatataaacccatcttttcacctctgtatgctggatcacgcgtcttttaacatcgagatcacttcttttatatgatttacttttgtatcagcttcttcctgttctaaccggtacatctcaggcacctttgccactgtaaagatccctgcatttttggacgccctgatcccgatctgagaatcttccagtgtaatgcactcttccggctccagccccatgtactccatcgcctttagataaacatccggatgtggcttattcctagtaagccgttctccactgatcacaaaatcaaaatgcttttccagctcacagtcagccagcattttttcaatacagtccatagaattacccgatgccagtgttgtcttaatctgtctctccctgcaatatgtaagcagctcgtccactcccggattcagaatatcacgatagtcaaaagtgatgctttctttcatgcgggtaaacttctcctcaaattcttccctgctgctcctgtctccccaaaactccataaaataatcaatggcatccgcatatggagtaccgatcaccttctcaaaatccgccaactccatttcaatcccatgtttttgaaaccacttcttaaatgccttcaggtacaccacttcactgtccacaataacgccgtccatatccaagatcaaaccttttttcatgatatctaccctctcctaatcaaaacaaaaaaacaatataacaaaagtataccttatcgcacgcagtgcgtccacccgaagggtataaaatgcgggatgccctcctgggtataccttatcgcacgccatgcgtctagccgacaggtaaaagacacgatatgccctctttatccagaaaacattacgttcatgttccacatgattggagtgaggcattctaagagccgaacggaaatcatgtggaacatgtttaccttatcgcacgcagtgcgtctacccgaaggatataaaatacggtgtgcctcagtctttgctctcaacaatcagcaggataccgtccttcatttcaatgacccctgtctcatccaccagttcattactgatcccccatgtttcctggaacagaagagtgtcgttgttcaggggataataaaaaccgtgaagtgtcactcccgtcaccgtgcccacagggatcagggagatataatctccaaactgttctctcttttccagtttcaaagggcggtccacggcccggatacggttgtgggcatccacaatgtatgcctccaccccatgctttagagcataaacaagctgtcccatatttcctagtacatgatccagtctggttccggtgcttcccagcacagtgactttccctgctcccatgctgactgcctgttccatggcaatccctgtgtccgtgtcatccttttccctgggaaggatcatgatattttcttctttaaaccgtttgagcgtctcgtccgggcagctgtcaaagtcaccaaggataaaatccggctggatcccaagctgttctgcgtatagaagtcccctgtccgcagtaatgattttgtcaaatgtctgtgtctggatataagaacgggcgaagactgtgtctaaatctccgcctgttaaaattaatatatgcattaccattttctcttttcttttaattcatgatagatgagtacatagttgtcataccggatctggctgattttcccctgctccagcgcttccttgacgccgcatcccggctcgtgggtatggctgcatccctgaaatctgcacttgccttcatatggctcgaactccttgaagtaatacttgatctcatcttcctcaaacatatccacaaacaaggagctgaatcccggagtatccatcacaaacgtgtcaccttccacatggatcagttcagaatgtctggtggtatgctttcctcttttgatcttttcactgacctctccggtctccatagccgcctgtggatacagaaggttcatcatagaagatttgcctacccctgacggacctgccagcacagtcgtcttgtgctccacagcctctcttatctcagaaagtcctgtctcctcggaaacactggtaaagatcaccctgtacccgcagtccttgtaaacatctgttaacacagacagttctctttccctggccagatctgtcttgttaaaacagaccaccgcaggaacctgctgtttttccatcatcaataaaaatcggtccaatagattgtaattgggttttgggtttttagccgcaaagatcaccagtgcctggtctacgtttgccacggcgggacggatcaattcgttccttcgcggaaggatctctgtcagattcccaagttttttatcctcatccagtacctcgatctcaaccacatcacctaccagaggcttcatcttccggttcctgaaaatacctttcgctttgcactcatataatccgccgtctgcgtagacataataaaatcctgcaattcctttgattattcttccctgcatgaacttgaccttactcctctgtatctcctgtagtatcttctgtggacggctgtttaccaaggcttacgacaacaccaatgcccgtgcctttggtcaccttcttcccggctttcggggactggcttataatgcagccctccggcaccgtgctgttgtatttctgtgaagacacgatgagttttaatccctcattgttcaaaagctcttttgcgtcatccacggtcttgaatacgatctccggtaccgccactttgtcttctcccttgctgaccgtgatcgtcacctttgcgcccctggcgatcctgtttcccgctcccggggactgggagatcacatctccctcatttacactggaactgaacttggtggatactgaaaccttaaatccctgttcagacaaaatctttgtagctgatttctggctgtatccccggacatccggtacggaaaccttgctctccccgctgctgacagtcaatacaatcgttgtcccttcctccacttcctggtctgactccagactctgccgaatcacatatccagcttcataggaggatgaagcctcagtcttacgttccactttcaaatcatccccgatggacgcaagtgctgcatcgtaagtcatgcctacataattttctacaggaaccttgaccagtttctctgtggtactctcctctgtagtcgtaagcttttccgttgtggcgttatcgccagaacggaacaaaccagaactgttgatgaccagaacaataatagaaatcaggatgatggcaccgaccactgcggccaggactaccactagcttttccagcttggagttcatccctctttcttcttcctcctcgtcatcttccacaaatccggattcctcttgcggttcgtcttcctccggctcctcctgcctgataaactcttttgtgttcagcagctgggtcggtgaatcatccacaaacggagccatgcccacatagcttccttttgtatcctcaaatacaagtctaagatcctccatcagctcattgacagactggtagcggtcttcgggctttttcatcgtacattttaaaatgattttttccaggctttccgggatgtcttcaatcaactctcccggggaagtaatctcattctgcagatgcatcagcgcgatggtcacgccgttctcgtgatcaaatggaacctgccctgtggccatctcatacattgtgattcccagagaatagatgtcacttttctcatcacaatactttccttttgcctgttccggggagatatagtggaccgatccgatggccgtggatgtgacggtattggagttggccgcttttgcgattccaaaatccgtcaccttcacctgcccggattcagataccaggatattctgcggcttaatgtccctgtgaatcgtgtggtgttcatgggcgtgcccgatggctgaagcgatctgaagcgaaagctcaaccgtttcttttgcggagagatgcccttttttcttgatatattccttcagggtaatgccctctgccagttccattacgatataattgacactgccttcctgcccgacatcatatacatttacaatgttcggatgggccagtcttgcgaccgcctctgcctccacctgaaactttttcaaaaacttttcgttatctacatattcattttttaacactttgatggcaacgtttcggttcagcttatggcactttgccatatatacgtccgccattccgccagtaccaatttttttcaggatttcatagcgtcctcccaaaatggttcctgcttctaacatgtgatctcacctcgctcccccagcgctacgatcaccagggatatattgtccttgccgccatattcgttggccctgttcaccaactgggctgccttattttctaattgactgtgatctaacaggagttccttgatttcgtcatctgcgaccatactcgtcaagccgtcactgcacaaaagcagatatccgcttttcttcggcagctcaaaaaaatccggaacagactctatgcctgcaccgatggctcttgtgatcagatttctctttggatgctgtctcatctgtccgcgttcgatctctccggccttcaccagttcctccacaaaggaatggtccgtggtgatctgtactaaatcctggtctgcgaaatacagccggctgtctccgatgttcattacaaaaatgctttcctctgtcacagttgctgccaccatagttgttcccatgcctgcatattcttcttcctggcatttcagtaatatttcgctgctgaccttctgcagtgcttccttcatgatctcaataggatcagaattctcaatctcgcgtatcaattccacaaaacgcctgacagccaaagaagacgcaaagcctcctgctttgtggcctcccatgccgtctgcaacgatatacaaattatccaattgacctacaggtacatcagagttaaagattgtgtcctggttttcagaccgtacctttcctctgtgagaagttccaacggattgcatcttagttctcctttttgatctggattccctgtttatccacagaatccagcttttttcttcttaattgtccacaggcagcattgatatctctgcccatttctcttcttatggtaacatttacacgatttttttcaagtatgtttttgaagtcatttacaaattccggcattgactggcggaaatctctttccttgatgggattgaccgggatcaggttcacatggcatggaaagcctcctaaaaaacggcacaattctctggcatttttcggactgtcattcacacctgctacaagactatactcaaatgtcattctacgtccagtctgttcaaaataatatttacaagcagaaagcagttcctccatggaatactggtttgccaccggcatgagagattttctcatgtcatcgttggaagcgtgaagggaaatggccagtgtcatctgaagcttttcgccggccagctcccggatcttgggcaccagcccgcaggtcgatactgttaagttccgctggctcaggttcagtcccttctcatcggtcaaaagcctgataaatcttaagaggttctcataattatccaaaggctctccggttcccataacgaccacgttggatacccgttctcccgtgtccctctgaatgtaataaatctgtcccagcatctctgaagggagaagatctctgtccagccctccgagagtagacgcacagaatctgcagcccattctgcacccggcctgagaggagatacagacagagttaccatgtttgtatttcatcagtacactctctatgatattcccatcatccagctgaaataaatattttcttgtcccgtcaatctttgagacataagtctccaccgccttaagctccctaacctcataccgacaaagcaatttttctttcagcgctttcggaagattattcatctcatccatggaagatgccagccttttatggaaccattcaaatatctgctttgccctgaactttttttcacctgcttgttcaagcgccagttcaagttcttccagtgtcatcgattttagatccttcatttcattctcctaagttttcctataaaaaatccgtcgcacggatgaatccccggaagcagctggatgtaaccttcttttgctgtctcaatcctaagatattccggcagcagcgaagtaatgtcctccggctcaaaccccggctgggctgcaagccaccggtaattatcttcattttcttttggattgatggtacaggttgaaaatatcaggacacctcctggttttacataggccaccgctgtcttcaatatctctctctgaaggctgactaattccttcaaaaccttttcttccagattgtatttgatgtcatgtttttttcccatgatgccaagaccggaacatggaacatcacatagtactacatccatgctttctctcagatcttcatccaggatccgggcatcccatacctgggatctgatattatgaaacccggtgcgttccatattttcttccagcaattccactttatattctgtcaggtccctggccaggacctggccagttccatgcagtttatctgccatatacagtgcttttcctcccggggcgctgcacatgtcaagaatatcctgtccttcctttacatctgcgatcttccccgcaagcatcgaactctcatcctgtacgataaatcgcccctggcggaaagaagacaggcgttttaaaaagtcataatgggtgatgtatatggcctcagggagcagttccccgtctttcaccgtgatgtcttctctcttaagtgaatccaccagttcctccctggatccattgctctccatccaggacaacgtcgtcttcttaggttccagaaaagagcggacgatattctccgtatcctgctctgaataattggaaagaaaatggcggacgatccactccggcatggaataggaaacggacagatattttacaacatccttttctctggaaggaaacactatgttctctttctgccgtgaaacagtccttagaaccccgttgacaaaccctgacaattttgaaaagcctctttttttcgcaagcttgacacattcattgcaggctgcggaatccggaatctgatccagatacaggatctggtaaacgcccatacgaagtagtgcccggaccagcggtttcagtttgtttactttcatcttggaatactggttgatcacatagtctatggtcagccggcgttccagagtaccctggcagagacgggtaaaaaatgcccggtcctttttgtcactgaactggtacttctcaagggtctctccaatggcaatgtgggacagtgcctcttttttatctaccttcatcagaacatctagtgctgattctcttggattctgcatattactctcccaacaccgttccggtttccactttagatcctgccaaaaatgcctggacagccatccgtttctttccggataactgaatctcattgagggccagtgcattctcaccgcaggcaacgacgatctgcttttttgtcacctctaccactgtgccaggtctctcgtccccgtcataatcaacagtgtccgcatcccagatcttcattgtctttccctcaagctctgtgtaagcgctgggccatggattcagtcccctgacccactgctcgatctggtccgcagtctttgtaaagtcgatccgccccatctctttgctcaacatcggggcataggtactgtcctcgtctgtctgttttgttctcactgcagttttgttttccagtttgtttaatgtctctatgagcagatctgctcccagcaccatcagcttgtcgtgaagagttcccgatgtttccttctcatccagggaaatgaccgctttgtcgatcatatcacccgtatccagacctttttccatatacatggttgtgatcccggtctctttttccccgtttaagactgcccactgaatcggcccagctccccggtatttcggaagaagggaaccgtgcacgttaatacagccgtattctgggatcttcaaaatccgttccggcagaatctgtccgtatgccactacaacaatgacatctggatttaattcttccagatgatcgataaattcctcatctctggccttcacaggctgcaggacagggattccatgtttcattgcagactccttcaccggcggaaaggatacttttttccctctgcctttctgcttatccggctgtgtgaccactgccatcacatggtggttttcgatcagtttctccagtgtcggcaccgcaaattccggcgttcccataaatacaacgttcatcgtgccctccttactcttcttcctcttctacatctctcaccgcttcctccgccacatctggatagagaactccgtccaaatggtcaagttcatggcagattgccctggccagaagtccttccccttctacggtaatcgggttcatatcccggtccagagcttcgcagatcacatgattcgggcgctttaccactgccaccttgccaggtaagcttaagcagccttcatctccgatctgttccccgtccttttctataatctttggattgaccaggaccagcggctgcccttcatatgtgtcaatgaccacaagccgtttcagtatccccacctggggcgccgcaagccctacgccgtaagcctgatacatggtctcaaacatgtcatctaccaatgtctgaagcctgggtgtcatttctttgatctcttttgatgattttctgaggacatcatcccccatttttctgatgtttctgattgccatggatacttctccttctcaaatgttctatgttaataactgctcatcggattaaagtcgaatgtgatatgaagatccttcggcagctcctgcctgtcgatccacagttccagccgctctttcaccctgacgagctgctggtaatctttttcttttacatacaatacctgccggtaaatgtcattgaccttggacagggatgcctcccccggccctatgacacggatgccggagttctttatgaccctgcccagacgctgcgcagtctgtctgcacacttcttcatccggtccggcaagaagaaccgtcagcatctgccagaccggcgggtaacaaagcatggtcctgtatgcaatctcctgctgataaaattcttcatagtcctggccggccgccgtcacgatacagtaatgttccggagaataggtctgaatcaccacctctccggctttttcccctcttccggcccggccggccgcctgagtcagaagctggaaggtccgttctgccgccctgaaatcattggcgtgcagagacagatccgccgccagtatgcctaccagcgttacgtctgcaaaatcatgccccttgacaatcatctgggttcccacaagaatgtccgcttcaccgtcagaaaatgattttaagatcttctcatggctatgctttctctttgtggtgtccatgtccatccgcagcactcttgcctcagggaattctctcttgatggcggcttccactttctgggtgcccaggccgaaggtcccgataaacggacttttacactctggacaggcctccggcatgatctcctcatatccgcagtaatggcatcggagttttccatccctgtgatatgtgagagatacatcacagtggggacactgcatgacagtcccgcagcttctgcaggacacaaatcctgcataacctctgcggtttaaaaacagcatgatctgttctttcttttggagccggtcttcgatcagcccgtacagcctgcggctgaacatgctccggtttccttgttttaattcttcccttaaatcctcaatatagacatccggcagaaccgcttcctttgctctctgttttaacgtccaaagtctatattccccgtcaagtgctttctgatagctctcaagggacggtgttgccgatcctaaaatcactgcggcgtcctccatctctgccttttgaagtgccacctcccttgcgtggtatttgggggtctgttcacttttatagcttccctcatgttcctcatcaatgatgatcaagcccaggttcggaaacggtacaaacagcgctgatctcggtccaatgatgatatcaatctctccgtttttagcccggagccactgatcatacttttctccctttgataacctggagttcaagatggatacccgctccccgaatcttttagtaaaacggcagactgtctgataggtcagtgcgatctcagggatcagcacgatggcctgttttcccattctgacggcttcctcgatggccgccaggtagacttccgttttcccgctccccgtaactccatgaagcagataagtctttctctctcccaaggcatagtcttccttgaactcccgtatcagtctctcctgatcttcattcagcggcagaggctcctctatctgaagacctttcgggttgggatttctgtaaaactgctcacgctgcacccggataattccgtccttttccataccttccaccgttgtcctggggatctttaagttctttatgacagattcccaggtaagttcctgatgatccataagtgctgccagaagccttgcttttgccacataatgctttccaaaatattcatccagctgtgcaggcgcatgttccatggaaagcaagagcttcacagtcttcttttccttctgcttcatcttatcctgcaccgggagcaccgtctttaacgcctggatcatggtggaaccatagttttcccggatccaatacgcaagctgtatcatcctggactctgcatctacgctgtcttcctctatggaaaggatttcttttatctttttgggatcgtaatctgccctgtcggaaagtctgaccacatatcccctctgctccctgtttccggcgccaaacggcacacggaccgactggcccacccggatctggtcacataaggaaaaaggcactcgatattgaaatacccgatctagtgcctcatgcgaaatattgatgataatatctgcgtataatgttcccataaattattcgataacgtgccccttctggcgcagcactttgaccacacggtccacatactctctgcagatctcatgggattttgcttccaccattacacgcaccaaaggttccgttccgctttcccttacgagaatccttccgtcctctccaagttccttctccaccgcttccactgccgcgatcacatctgcatcttcccttgcgtcttttttatctctgaccttaacattttcaagaatctgcgggtagatctccacgtcccttaccagctgcccaagagactgcttctgctccagcatcgcttccatcactttcagtgaagtaagaatcccgtctcctgtagttgcaaacttgctgaaaataatatgtccggactgctctccgcctaaaccgtgtccgtttttagacatattttcatagacatacttgtcacccactgctgtcttctcataatcaatcccggccttgtcgaatgctttgtagagaccaagatttgacataatcgtcgtcacgacggtgttgttatttaaggctccatgctctttcatatattttccgcatacatagaggatcaggtcgccgtttacctccatcccgttttcatccacagcgatacaacggtctgcgtcgccgtcatatgcaaatcccacatccaggtggttttctttcacatagcctttgagaatctcaatgtgagttgaaccgcagttggtattgatattggtaccgtccggctcattgttgatcacgtagacctctgctcccagtgtctcaaatacattctttgcgatactggatgagcttccgttagaacagtcaaggccgacttttacattcttaaatgaccgtgtggcgagggaaatcaaatatcctatgtagcggttccttccggaagcgtaatccgtcgctcttccgatatcactctttgtcgcaaaaggcagctcccctatctccccgtcgatatatgcctctatctggtcttcgatctctgcttccatcttatgccccttggcattgatcagcttgattccgttgtcatagtacgggttatggctggctgagatcatgatcccgcagtcaaactgctccgtgcgcaccacgtaggacacactcggtgttgttgtcacatacagcatataagcgttggcgccggatgcggtaaggcctgcaaccagtgcatgctcaaacatatagctgcttcttcttgtatcctttccgatcacaactttaggacgttttttattcttccctaaatgccatcccaaaaatcttcctactttatatgcgtgttccacagtcaggtcgatatttgcctccccgcggaagccgtctgttccaaaatattttcccatgattgtttgacctctttctcataattgattttcaaataaattaacctagactgtattataacataaagtctgatcaatgaaaaataaaaagtggagggtccatgcttcaaatgtgcctcggcaaaggaaaataatatcaattggcataaaaacagagatgccgtaaaatcgtctgtttctaacgatctcacagcatcttcattaactgcttttccggctgactttcacaacaacggaaatatcttcatccttaatttctcctaaagccctgagcatttttttcagagcaggataccagatatcctttggaagttcctttatctcctctttggtcagaaggctcgtttgatcctgtctcgtcccgaacaacccttcgtaacagatctcatactgctttcccctgtcgatgactcccagctcttccagcgtattcatcatccggtagacagtagctcttccgatcgcagagtcgatcttactggcctcataaaatatttctttacagcaggaacaattatttttaaggatcacatccaagatcactttcctttgatttgtaatcctcagcccctgctcccgaagctgctctatgattttttcccggctaagttctgtggtcataattcctcccattcacatctgcctttttgccgtcacttttaaaactgataaccaatatcatttatagttttatcatacgcaatttcatttgaaatgtcaagttatatttgataccaattctcaaaatctcaaattaacagattttgtgatataacacttccagtgcttctttctgcagtaacgccggatggatttttttaagtctggatccttcgtatattccagcaggtacactttctttttcctgccggccaccaaatttaaatagtccaaaaaatattttctgtcttccacccttgctttcctaagcttcctgcccttaaaatcaatccttgtgaatacctcctcctggttgactcccgtgaggatcggcccaagtttacggttgtttttgtaaaacttcctgacgaacgtatcccctccgttcagtatgactgctttctttcggtaagaccggagatgacacaagatcttctttaatccgcggtagatcttctttttgggaaactccgcatagacgtcacagttgtccacaaaaaatccgtccactccttttccattaagctgacccgcaagctgctttatttttctctgccaaggcttttgggaaacatcaacccaatattccccgtcccaattttcataaggcttcatagtatatttgcggtattttttatagtagggacgaaagtgctccaaagacccaatgtttatataactgtatacaatatgcccctgttttttcagttttctaatatcttttttcttaaaatactgtgcatcgatcacgatggtcttatattttttgaacttatttatttcttttctgcctgcatttaagaacacgccatatgtataagtaaacttattcttttttgcagcctggacctctgcgggctgcccggtcatgatcattaccgctgtcaaaatgcagactaccttaacagtccagttctttgtgtatccggccatggcggctacctccgatgctcctcttcattaaaataagacttataattgacatggtaattcccgtccgggaataaataatggtacaggtctacaaaataatcgtccgtcatacttgcgatatagtccactacgatctgacagggttcctcatctctataggcgcttgatgtctcatagtgtgccctggcatcctccacatattctatatgatgcttaaagatcacagaatcctcattccctttgactaagtcggaatacagcttttcataaacttctctgaacataggttccacattttccgtataaatgcggtccagttttttgttaaagtagatttgctcatagttttctttcttagcattcttcatagcctcgtaatattcggaatccagcataatataatccttgcggtagctgttttccacgatattcaccgtcagattgttgatgatctccgcattctccacacctatctctccctgggtaaagattccactgttttcgataagctttgctttctttgcatcctgccggtcctttcccagataagccaccatatcacagatcctcacgacacatccttccaatgtagaaggaatcagtgttttaatataagccttatctctgctgcactgttctgtcttttcataaaactcctcaaaggacaccatatggcacggacggtactcctgctgttcaaactctccgttatggcacaggattccgtccagggtctgcagagagacatttcgttgaaacatcccatccaaaacccgcacgctgtggacgttgtgctgaaaatagcggcctgttttctcatggtagatctggtttaaaaagcgctctcctgcatggccgaacggcgtatgtccgatatcatgccccagcgcgatggcctcaatcaggtcacagtttaagcccagaagcctgccgatattcctggcaatccttgagacaagctggacatgaagggaccttcttgagatatcgtcattcaagtaaaaggaaaaaacctgggtcttatccgtataacggttgtaatatggggagtgaatgatcttctccacatccctgacaaatgccggtctccagagactggcctcatcccgatctttatttctgcggatcacctgttcatccctgcaggcgtatggattgacccatccctgttcccggtcctttatgatttcctgctgccgttcttttgataatttgtgataggtaagcattttgtcccctctctttctaaataaaatcgttccttacaattctggtattctgacctgcgtaacagaaaaaagcccgcaatcatcattgccggcttttcttctttccagcgcccagacgctgtccttgtttaatttttgtctcgcacccatcctgtgttctgtcgagaaggcactggtcaatgtccaccttgtctccctgaaaaagcaggacaatggtagatccgccgaattcaaagtaacccttttccatgccgcggcgcatacgcccctcctcatggtggtttacgatccttccaaccatcagagctcccacttccatctgtaccacatggccgaaatgctctgtcttcatcatggtaaattccctggcattttctttatagatggaaacataatcattggccacaggatttacggtgtgatacgttccatttataaaatagtttttgcttttcttaccgttgtcaatatagcagtacctgtgatagtcgtccacagtcagacgcagaatgactgcgtagccgttcatgaaatgatctgcgatttttttgcttcttaacagcgactcaaccgtatacactgtatcttttacacagaaagaagtatcctccgtgatacggtatgcgctggctttgcagtcgcacgggctgaacagaatattttcatcctccggcagcggacgctttccaggcctgatccttctggtaaaaaaatcattgtaggaggtataggatctgtcctcatactcccgcatatcgatcctgttttttctgataaaacgctgaatcagacattttgaacaggacgtatttaatataaatcccccaagcctggatacccagggctttgtgagaaactttagtttgatccttcccagaaaggtcccgtacagcagttttaaaaactgatcctggaatgtctcttcctcataacagcggccgctttggtctatatacttcattgactgtctcctttatagaaaataaatacggactgccaccagaataccgatgatgacaaatgcgaacatacactttttcccaggcttaaacacgctgaaatcaatcacaaacaaaagagaaatgatcagcacagccaacaggtatatgtaaggaaactgtgcggtaaaaaaacgcttcagctgatacacaatgggcaggatcaacgccactgacgtgaccggaagtccccggtaatgttttcttctctcacttgtctctgcctgtctctgttcctcagtgacattaaaaaatgccaggcggatcacagcccctaaaatatacatcatataaataatctttgcgtaccaggcgtccatccccatggagtatccgatcacaaccggaaacgccccaaaacagatcaggtcacaaagggaatcaatctcaatcccaaacttctttgcatcgtcagaacgtttgatcatcttcgcgacggtcccgtcatacatatcagtgaatccggatatcatcagacaaatcattgctattttaaagttgccgttgaatgccgctgacatgccgaacactgcactcacaacgcccgcatatgtcagtatgactgatacattataaaatcctatcataattaaacctctattccttacgctttattgtcacatgtgccacaaatgttaaaaatgcactgatcagaaccagcgcataataactgattccgcggctcaataacatggccggatacaataagctgcccctgaatatcttcctaaagatacttaagaacagaccttcgctgattcccattcctcccggaagcggcagcatatccactgaaattgaaatcacacactgcagtgccacgatatccacaaatcccagcgctgacagtcccaatgcccggtagaccagatatgtgatggaaaaatgcagaatcctctgcgccaatgtgaccaaaaacatctcaaagatcatcaacttatgttcttttatgaccgcagctgccttgtggtaatcctgcatccatccttcgatcttgcggatcctctcctctttcttcttaaggatgtggatcttctccagtccccgtgtcattcccagcaatactctggatgccagagtgggttcaaatacaagcatcaacatcagtgctacacagaaaacgtttaagccaataccaagataaaagaaaaaagccacctgggatatataatctgtgatcagaccatgccggaaaataaagatcaccgctcccaaaaagacaagtacaaacttatacagtattgtgacgatcattaaaacaacggtcccgactgacacgtcaaccttgtctctgttcatatagtaaagctgagccggctgtcctcctgtagctgacggcgtgatgcagctgaagaaaaatcctacaaatgaataaagaacgcagtgcctttttggcacacgataccggagtacacgaagcattctgtcaatgataaaagattcacagcagacaaatataatgatcagggcaaaacccagtatatagtaaacaggactgacgcttctcatgacatgcagcagttcaggcagctcttttccccggaaaattgcataaaatgtaagcccgaacagtgcaaaaaagaagatgccgttgccaatccagcgcttcttattctccataacctacctctttgtcaattgccctctccaaacggactcctctgttgacctttgtgaaaataccctgcagcttcagataccagtccgtcttctgaccgaccagatacatggcttctgccagtaaaactcctgcaacaaggtctatgatgtaatgctgcttcgttacctgtgtggagatgcataccaagaccgcaaaaacacaagaaaaacgctgataccatacaggaacctttttctgaccgcggattcccacataacagaaccagctgaccagacagtggatcgacggaaacaagtttgccgacggatctactgtatatacaagtctcagcatttggtcccagaacccgcttccggtgatctcaggccttgcaagtgttgtcgggatcaatacaaaaaagactccgcagacaattctggaaagaaaatcccccactaagaaccgatataaatgctcttttccgatccttccaatcataatgtaattcactgcccaaaagagataacagatcagataaatactagtgaatccgggaataacgggcactgccctgtcaaaagctgttgtaaaatcataatgctttaaatccctgcacaaaatctgggtacctgtatatatcagtgaattaaaagtgaaagaacagatcaaaggaagcactgcatatttgggaattaaattccataaatatccttgctgttttttcatgtttcgctcctttacaaacaaaaaccatgtcagatatttgacatgattcttgtttaattatagctttcccttatcaaaatgtaaagctaagcgcatttatttaatacatttgtaagaaaattcaggatctgcgctttttcttctttcggttgaacacaagataaatacaagggatgaaaatcaatgtgagcaaggttccgtaaatcaggcctccaatggtgacgattgccattggctgcaccatctctgctccggatcccatgccaagtgccattgtggaaagccccagaatcgttgtgatggctgtcatcaggattggccggattctcatagcccctgcagttatgacggcatccatcatctcgcagcctttatctctcagctggttcacagtatccaccagcacgattccgttgtttacaatgatacccgacagcataacaaagccgatcattgcaataatgctgagatccttgcctgccacaaacagtccgatgagccctcctgtaaatgccagagggatcgtaaacagaatgatgaacggagactttaaggactggaactgagcaaccatgatcaagtacataaatgcaattgccagtattaacataagcccaacctggcccgctgtttcattgatagattccatttcacccgctatcttgtagctgtagcctgccggtgccttatatcccttcaaagctttcgttacattctcgctgacaataccaatattatatccgtccttcagttctgctgtcacagtcagaattctctcctgttctgaccttgagattgtagaaagactgtcggtatcgtggaaacttgcaactttggatagagcgacctccttgctttcacctttctgtgttccggtaagcttcatttttttcaactgtgatcttgtgatattgtcctttgtatcattggacacctttacgtcccactgtttctcattctggttgatcgtcgtagccgtggagccttcctggagcttcgcatttagctgctgatatacggtagccactgtcaggccgtattttgcagccttggccttatccaccgtcacatggatatccggtgtggtttcctcctggccgtcacttatattttttgttcctttaacggtgcccactttcttcgctatatccctggcagtttttctcagggtattcatatcatttccttttacttcaatggaaataccgcttcctccaagggcgctcatatccatattggactcctgcacctggatctcacagtcgaatttcttagtcttattcaagatttcgtttttaatttctttgttggtgtgttttttgtcttcctttaacataatgtagacacttgcagtatcctggtttgccttacttgaagatgaagtacccccgattcctgaagagctgctcaccatagcacccacactgtctacgtcagagatttcacggatcttcttcatgacagtatctgacatggcggctgtatcgcttagtcctgaccccttcggcatctcaatggtaagactcatctctgtactgtccatggatggcataagggaggtaccgatcttagtcgctccgatgaccgcgcccacaaacactgccaatgtcagaatgattgcgatccacttgcgcttcagaaccttttccattacacctcggtacagagactggaggccgtcaaacagcttgttatctttctctgtcactttgtgcagtacgccagcagacatcatcggcacaaaggttaccgccacgatcagactggcgatcaatgagtatccgatggtcagtgccatatcagaaaacagctttttggtcagccctgtggtaaatacgatgggcagaaaaactgaaatcgttgtcagcgtggaagccgtaatagcacctgccactcccttggcaccctcaatggccgcctctttgaccggcactccttcctttctcagccggtagatattttctatgacgacaatcgaattatctaccagcataccgactccaagtgccaagccggaaagtgagatcacattcagggtaataccgctgaagtacatcatgactaccgcaaagatgacgctgattggtatggaacaggcaataaccgctgtaggtttgatatcctttaagaaaacaagcaggatcaatactgccagtactgcacccatcccaaggttctgtaagacggagccaactaccatgtcaatgtaaatgccctgatccatcaggtttgtataatgcagtcccggattttctttcttaagagtatccagcttttcagacactctcttggatacgtccgctgtggaataattattctgtttctgcacactcagaaccaccgcatcatttccattgatcctgcagtatgtgtctttcttgttattgactacagccacatctgccacatcgcttaaacggatcggggcaaaattcttaatgccaagatccatcaactccaggtcctccaggtcctcctggctggaaaccttgtccccgactcttacaagatactgggtattatcttccgagatataacctgccggcatctcaaaattctgagcaatcagcatggcttttacattatccacagtgatcttatccttaatgttggccgctgcttttgcctgctttttgctggcgtccagctgctgctgccccattgtgatctgggactcgccctgtgcgatcccgatctctcctgatgtcatctggctgtttgcattagctgactgtgcagtcaccgtagtcagattggcatctacctctttcttgcctttctgtatctgcttcagtgcctgttttaaggcctttatatttttatccagcgtcttgatggtgctgtcggctgtcttgagctgcttgtttatctccgcgatctgtacctggagctgcgctttctgtgcaggatccgtcaccgtcttaagctgctcctccaactgtttgacacttgcctctcctgcctgctttacaagctccaaaacctttttctgattctcaaggtttgtcagagcacttgtaacctcgacttccttctgggcaaggctcagttttccgctgtttaaggcagtctgtgccttggccagtgtattgtttaactcggttctcttagagttgagctgggctttgcttccgtccagctttgatttcgcacggtccagcttatcctgggcctcgtcaaactggccgtttaaggccctctgtatctttttattgagggatttaatcttatcctcattgataatgacattgatattttcctcaagcattcctgtctggctcacagaagccacaccttccactgcttccaccccaggcgaaactttgtccttgatgagcttggatatctccgacatatctttgttatctgaatccatcgctgttacaaggaccggcatcatatccggatttaacttcatgatcgtaggattacccaccttatccggccagtatcccttgatcatatccagcttttcccgcatatcaagagctgcggaatccatattagcatccccctcaaactccatatatacaatggacatattctcgctggaagaagatgctacctgcttgatattagaaattgtagccatagcctgttccacaggctttgtcacggtggtctccacttcctccggagaagccccctgatatgtagtcataacaagcgcatatggaagttccatactcggaagcagatctgtggtcatttttgaaaaagagacaactcccaaaatgatcacaaggacgacgcctacaatgacagtatatggctttcgtacactaaactttgaaaacatgattttaccccttctgactttttgtattataagaataatacaatgttagcatgaccggcaagatgattcaagtttttttgaatattattttatattcctacgtaaaataaaaagaaaaaaggagatagattgaaatatgaatgagacatatccattttccctcgaaccgcttccatacgattatgatgcactggaaccagtgattgatgctgagactctcagatttcaccacgataaacatcttgctgcttatgtagagaagctgaatgctgcgatcaaaccacacgaggagctgcacaacatgacattagaacagcttctcactgaaccggataaaatacctgagaatgcaaagactgctattaaaaacaacggcggaggtgtttataatcatcaagtctattttaatgccatggaaaaagatgaattcactaccccggaaggtgaaatcgggaaagcaatcgaaagagattttggatctttagatgcttttatgaaagaaatgacagaagctgccctcacagtgttcggttctggttatggatggcttgtaaatcacaacggaacgttagaagtcataaagctcccgaatcaggatgtgccgctcagtgataccctttatccccttctccccgtagatgtctgggaacatgcgtattatctccaatatcaaaaccgccgtccggattatgtgaataactggttttctctgatcaattgggattacgtaaacaaaaggctggaagacagtaagaaatggtttgaatcacaaaagtaatttgaaatattaaaaaaatggaacgatccggtatagttatccgatcgttccattttgtatttatcgtctaaacgtctacactgtagtttggtgcttcttttgtgatatggatatcatgcggatggctttctttcagagatgcagccgtgatctgtacaaactgtcccttttcctgaagctgctccaccgtctttgcgccgcaatatcccataccggaacgtagtccaccaagcaactggaatatggtatcttccgctgttcccctgtaagcaacacgtccctcgacaccctctggaaccagtttcttagcattggtctggaagtagcggtctttgcttccacattccatagcagctaaagatcccattccacggtatactttgtattttcttccctggtaaagttcaaattctccaggactttcgtcacatccagccatcatgcttccgagcatacatgcgctggctccggctgcgatagcttttgtaatatctcctgagaacttgataccaccgtcagcgatgattggaattccggcttttttagcctcctcatatgctcccatgattgcagttatctgtggcactccgattcctgccacaactcgtgtagtacagatggatccagggccaattcccactttaactgcgtcagctcctgcctcgatcaatgcctttgtaccctctgccgtagccacgttccctgcaatgacctgaagctcaggatatgcttcttttaccattctgactgcttttagtacattggctgagtgtccatgtgctgaatcaacgacaactacatccacatgtgcatttaccagtgcgtcaactcggtctaaaatgtctgctgtgatgccgactccggctccgcacaacagcctgccctgctcatcttttgcagcatttggatatttgatctgtttttcaatatccttgattgtgatcaaaccttttaaattaaagtccttatccacgatcggcagcttttcttttctggcttttcctaaaatctgttttgcctcttccagtgtaatgccttccggagctgtcaccagatgttcagatgtcatagattctttgatctttttagaaaaatccgtctcaaactttaaatcacggtttgtgataattccaaccagtttggttccctcagtaatcggcactcctgaaatacggtattttgccatcagatcatctgcgtcctgaatcgtatggtccgggcttaaagagaatggatcagtaataacgccgttctcagaacgcttcaccttgtccacctcgtctgcctgctgtgcaatggtcatattcttatgaatgattccgattccaccttgtcttgccattgcaatagccatgcggtgttccgtaacagtatccatgctggcactcatcaaaggaatatttaatgtaatcttgtttgtcagacgggtagcagtctcaacttcattcgcgattacttctgaatatcccggcactaataaaacgtcgtcaaatgtaattccctggccaattaactttcccattttttcctcgctttctatctctttcgtaatctaatttatagttttatactataacaaattctaaattctttgtcaacaaacaaaggattattgtctgataacaataatcctttgtacattcgatttagtcttctgtgattaaaattttggaaccgacttttaacttaggcataggatttgcctcaacacagatgcttcccggcagccctgcctcagacgctccgctgaatactacagttagatgtcccaatgtttctaaatttgactgggcaatttcccctacagcagtaattttaaattcagcatcatcaataaccagtgtattccctttgctgatcgttccgtctatctggttgacatcaatgaaatgacagaagtctttcaatgtgtccggaacattctcgccgaacagcacaaacattccttcgtcataaaaggcatcaacctggtctcccaactcatagacagacgtttgaaaaattgttttgctcatatcctgtcctcctgattatcctcttaattttttgtcgatcgccgctgctgcttttttgccggcacccatagccagtatgacggttgccgcaccagtgactgtatctcctcctgcataaactccatctttgcttgactccattgtctcttcattgacaatgattccgccccatttttgaacatccagtcctggggtagtctggcggatcaatggattcgggctttgaccgatggcgattacgacagtatcaacatcaatgtcgtaattggatccttcaatcggaacaggagatcttcttcctgatgcatcaggctcacctaattcctgttttacaatctccatcttatctacccagccgtcttcattggctttaatagcaaccggattgtttaagaatttgaagatgattccttcttcttttgcatggtgaagttcctccagacgtgccggagcctcttcctcacttcttctataaacaatataaacttcatccgcacccaagcgttttgctgttcttgctgcatccattgccacgtttcctgctcccacaaccgcaactttctttccgatctttacaggagtcggatactctggaaattcataacccttcatcaggttcacacgggttaaaaattcgtttgcagaataaacaccaaggtagttttctcctggtatatttaagaatcttggaagtcctgcgccgcttcctacaaaaactgcctcatacccctgctccatcagttcatcgatggtgacagatcttccaacgatcacattagtctcaatcttaactccgagattctcaactgactctatttcttttgctactaagtccttcggcagacggaattctgggatgccataactcagtactccacccggtttgtgaagtgcctcaaaaacagtaacctcatatccctttttaatcagttccccggcacaggtgataccagcaggtccgcatccgaccactgcaactttttttccatttttttcgatgttcacttccaccggctttgcgtttgccatatgatagtctgccacgaaccgttccatacgtccgattcccacagcctcacctttgattcctctgacacatttcccttcgcactggttttcctgaggacatacacggccacagatggcaggcagggcattctcacttgtgatcacttcataagcgccttcaaagtctccagctgctaccttttcaatgaactcaggaatcggtacattgaccggacatccgttcacacaaggtttattcttacagtttaagcagcgggttgcctcttccatagccatttctttcgtatatcccaaagcaacttctttaaaattcttattccgaacattcggatcctgttccggcattgctactttatttggactcatatttgccatgactacttacccctcccaatcttgcattcgtgttcttcttctctaaacattgtctgacgtttcatacactcatcaaagttcacctggaatccgtcaaaatccggtccgtctacgcaggcgaactttgtctctccgcctacagtgacgcggcatccgccgcacattccggttccatcaatcatgataggatttaaggacaccatggtaggaatatcgtgctgttttgtaatgtttacaacatttttcatcatgatcaacggcccgatcgcaatcacttcatcatacttgacgccttttgcaatctgatcttccagtacattggtaacgaatccctttgtcccaaggcttccgtcatctgtagcgatgaaaacattttcacaaaactcttcaaatttttcctttaaaatgacaaactctgcactcttgccgccaattatgacatcaactggaactcccatatcggcaagcttgcgcagctgagggtaaagtggtgctgcaccgactcctcctgccacacctaaaactctctctcttttatgtaacatggatggctgtccaagcggaccaacaaaatcggctacaaaatctccctcttttttcttgctcaataattccgtagaatagccgacaacctgataaataattgtgacagtttctttctctctgtcatagtcagcgatggttaaaggaaccctctctccattttcatccacgcggataatgatgaactgccctggttcacatttccttgctacaaacggcgcgtgaatttccatcaattcaaccaagttattaagtgtctctttttttactattttatacaccaaatacacctctttctgcatcttttaatatcttttttattatatcgtgaatctgcacaatagcaaagcattttttgcaaattcttaaaatactcttaataaaagcaaaaaccatcccttgtttcggcatagcaaagtgttgaaatacatctatgcaaacagaacttttgtgtatttaggccacaaaaagagaaggtacttgtgcccttctccttacaatatcttattgagtctgtcactgtggtcgatcacggtcttttttagaagttctatatctgtctcaaggacctcctgccttttgatgaccatcttgtatctggatgaatcttcccggttttcaaacaaaacattcagttttgtacagatctcattttccaagatcatatggatatctgagaaaccagattccattgcagttctgagtccggacacttccccttcggtacgttccagacgagacgctatagagtctgtcttctcagaaagaagatttgtcttttctgcaagaatatcagtccgctgaagcagcagactgttttgttcacacaaaagctgtgtcgttctgtctaatctatctgttttttcttccagagaatctgttcttttccttagctgcttaatatcgtgttccattctatcagttttttgatccagacgacagatgctctgattcatctcatcggttttttcattcaggttttggatattctgctccattgcatcagtcttttgattcaggttctggatatccctctccattacatcggtcttttgatccaatctcttaagatccttgctcagagtatccgttttctcttccaagatatcagtttttttatccagtctctgaatatcctgactcagcttatcggtcttctcatccagcctctgaatatcctgtgtcaacccgtcggtcttctcatccagtctctgaatgtcctgtgtcaacccgtcggtcttctcatccagtctgtgaatgtcctgtgtcaacccgtcggtcttctcatccagtctctgaatgtcccggctcatcccgtcagtcttttcgttcagcttctggacatcctgtgtcaatccgtcagccttctcatctagtttctggatatcctgtgtcagtccgtcagtcttctcgtccagtctctggatgtcccggctcatcccgtcggtcttttcgtccaacctatggatatcctgcgtcagtccgtcagtcttctcgtccagcctctggatgtcccggctcatcccgtcggtcttttcgtccaacctatggatatcctgcgcggctcatcccgtcggtcttttcgtccaacctatggatatcctgcgtcagtccgtcagtcttctcgtccagcctctggatgtcccggctcatcccgtcggtcttttcgtccaacctatggatatcctgcgtcagtccgtcagtcttctcgtccagcctctggatgtcccggctcatcccgtcggtcttttcgtccaacctatggatatcctgtgtcagtccatcagtcttctcatccagtctctggatattctgtgtcagtccgtcagtcttctcgtccagcctctggatatcctgtgtcagtccatcagtcttctcgtccagcccctggatgtcccggcccaatccgtcagttttctcgttcagcttctgaatgtcctgacccagcacatctgttttttcttccagtttttctgtcttaacagtcagcaggtcaacctttccctccacacgctccattcttccgtcaaatgtaatcatactggaattcatctgttgcattaaatcatacatgtctttcatcatctgttcttcaggcaaaacatcacttcctttcttctacaaatgttataaattgtaaatattatacttcttttactcttttatgtccagtcatttgtactagaatacctttttcatgtcataaaaaaaagaagactgacgtatttatcagtcttcttcctatatctgtattccttttacatcttaattctatccgtatgcggattacatcatacccattcctggtgcccctgctccagctggcattgccggcgcatcttctttgatgtcagccactacagactctgttgtcaataaagtagacgccacagatgttgcattctgtaatgcacttcttgtaaccttagccggatcaatgatacctgcttcgatcatgtcaacatattttccgtttaacgcatcaaaaccaaatccgatttcctgttcttccactttattaatgataacagatccttccagaccagcatttgcagcaatgtggaataacggagcctggagcgctttcaagatgatgtttgcacctgtcttctcgtcaccctctaattcctcagccattgctgctacgtttttagaagcatggatatatgcagatccaccgccgaagataataccttcttcaactgccgctttcgttgccgcaagagcatcttccagacgaagcttgctttccttcatctctgtctctgttgccgcacctacacggataactgcaactcctccggataattttgcaagtctttcctgtaatttttctttgtcaaattcagaagtagtttcttcaatctgtcctttgatctgtccaattcttgcctggattgcatccttggatccttctccgtcaacgatgactgtattctctttttcaactttcacagatttcgcgcgtcctaactggtctattgtgatctctttcaggtctaatcccacttcctcagaaatcactgtaccgcctgttaagattgcaatatcttctaacatagcttttcttctgtcaccatatccaggtgctttcacagcacaaacagagaatgttccgcgaagtttatttacgatcagagttgtcaatgcttccccttcgatatcttcagcgatgatcagcagtttctttccactctgcacgatctgctctaagattgggagaatatcctggatgtttgaaatcttcttatcagtgatcaggatgtatggatcttccagctcagcaaccattttttccatatctgttgagaagtaagcagataagtatccgcggtcaaactgcataccttctactaaatctaattctgtcttcattgtcttagattcttcgatggtgatgacaccgtcattcgatactttttccatagcatctgctactaactcgccaacttcctcatcacttgcagaaattgctgcaactttcgcgatctggtccttgccatttactttgctgctcatctcagcgattgcttccactgcagcgtctgtagcttttttcattccttttctcaaaatgatcggattcgcacctgctgccaggttcttcattccttcatttaccattgcctgagctaatacagttgctgttgtagtaccgtcacccgcaacatcatttgtcttagttgccacttctttgacgatctgagcacccatgttctcaaatgcatcttctaactcaatttcttttgcgatggtaacaccgtcatttgtgatcaaagggataccaaaagatttgtctaagacaacatttcttccctttggtccgatggtaactctgactgtatctgctaactggttcacacctgcttctaatgcttttcttgcctcaataccgtatttgatttcttttgccatgattcgtctcctccaaaaatcttattctacaactgctaaaatatcgttctgttttacgatgatgtactcatcatctccacattttacttcagttcccgcatatttggaatagatgactttctgtccgttttctacttccatttttacttcatccgttccaggtcctactgcaacaacttccgcttcctgcggtttttcctgagatgctgttgtcaacacgattccggattttgtggtagtctctgcttctaactgtttcagtactactctgtctcctaatggttttaaattcatatcattacctcctaaaattcagatgaaattcttttgtcttatttacccgattattgttagcactcacttagctcgagtgctaatcacaaaatatagtataacaccctatcaaaaaaatgcaagagctttttcgaaaaattttatcacttttcatcaaccagccgatagaggtctccaaactctttccgcgcctgttttgtacactgtctgacgaaatctgtcttagctctcgtatatgcatctctgtcgtgctcaaaccgcttttgaagtccgatcttcaatttgccatactcctccgcagctcctttatgcctccttaaatagtcacggaaatataattcatcccaatctccgggataccgaacatggagatggtaaacccgtttggcaaatccgtttaatgtataccccttcaggaacgtcatgtggggtggcggattcttcggctgttttgtatagatataaccttccttttggagaactgaggccaaatgttctaaattatatccctctttaatctccaataaaatatcaatcgttggctttgccaatagtccctcgaccgcggtgctgccgatgtggctgatccgggccacgtgttcctttccgattatgtggagcaaaagcttcctttcattttcatacatctgtttccattcctttttatgcccggttaaaatgataggaaagagtatccaaagttcttcgttggacatttccgtaagctttttcatgatttcccctttctttattgtcgtaaaacagcttatctttctcttattttggctgataggaacttttcatggagacaatccggttaaataccatatgctccggtgtagtatcctttgtatcaagacagaagtatccctgccttacaaactgaaaactatcgccgggagcggcctctaaaagacatggctccacatagcaatccgtgagtatcttaagagaatccggattcaggttgatcgatccgtcctcattatagacacctttttcctcatccacgatattttcgtataaccggacttccgccttcttggcaaacggcactgccacccaatgtatggtgcccttaacctttcttccatctggactgtttcctcctctggattcaggatcataagtgcagtgaacttcggtcacattaccatcttcatcagttacgtaatccgtgcaggtcacgaaatatccattcatcagacgcacttcattgcccggatataagcggaagtacttcttcggacgctcaatcttaaagtcatccctttcaatataaagttccctgcagaacggaacctttctcactcccatctcttcattttcctgattgtttttcacttccatatactctacctggtcttctggataatttgtaatgaccagtttgactggatccaggatggctgaaacccttggctttttcagtttcagatcatctctgatacagtactcaagcatggcgtaatctacagaactgtgactcttggccacgccgaccagttccatgaatctacggatagactctggagtataaccgcggcgtcttaatgcggataatgtcaccagtctcggatcatcccatccgtctacgattccctcatctactaacttcttaatataacgctttcctgtcaccacattggtcaggtaaagctttgcaaattcaatctgtttcggaggatgctcaaattcacactcctgtacgacccagtcatataacggcctgtgatcctcaaactccagggtacagatggaatgagtcacaccttcaaaggcatcctctagaggatgggcaaaatcatacataggataaatacaccaatccccgccagtgttgtgatgctccattctggcaatacggtaaaggattggatccctcatgttcatattgccggaagtcatatcaatcttagcgcggagcaccttgcttccgtcctcaaactccccgtttttcatcgcccggaataacacaagattttcttccggagtacggtctctgtatgggctgttttttcccggctccgtcaaagtccctctgtattcccttatctcttctggtgtcagatcacacacataggcctttccttttttaatcaaaagctctgcgcattcatacatcctgtcaaaatagctggatgcaaaataaatattctggtcatagtctgctccgagccattccacatcctctttgattgattccacatattctgtcttttcctttgtggggtttgtatcatcaaaacggaaatgaaaatcccctccgtactccttggccagaccatagtttaaaagaatcgacttggcatgtccgatatgcaggtaaccgtttggctccggtggaaacctggttacaattttttcgtatttcccttctttcagatcctcatcaatgatctgctcaataaaattttttgagatgacctcttccattgtgtctccattcctccatacttttcattattctttaataatataagacataatttaaatacaatcaagggcttcccttacatttgccacacccagaagccgcatctttgtcttgatctttaagctgtccacatttgccttgggcagaatacaggttttaaatccaagcttctctgcctccttgatcctctggtcaccctgggatactctcctgatctctcccacaagacccacctcgccgaaaatgatcgtgtcctcaggcaaaggcagatttttatagctggatgcaatggctaaaatgatccctaggtcgatggctggctccccgagcctcatacccccggccaggtttacataggcgtcacagccgcccagctgcaggccgaccctcttttccaagactgccatgagaagattgaccctgttgtagtcgatccccacggcagtcctcctgggcatctggaagctggttggggagatcagtgcctggatctcaatgagaatcggcctggttccctccagtgaacataccaccacagaacctgaggcatccacaggacggccatttaacatcatcttggatggattttccacctccacaagaccgtttccgcacatctcaaacactccgatctcatttgtggagccaaagcggttttttacgcccctcaggatccggtatgccgcttctctctctccttcaaaataaaggaccgtatccaccatatgctccagtgtcctcggccctgccacaacgccttcctttgtcacatgtcccacaataaagacagcgatattttcttccttggcgatgcgcatcatctgcgcggtcacttccctaacctgagaaacactacccgccgcagcggtgagttcttcactgtacatggtctggatagagtcgattaccacaaattctggccggaccttccgaaccgactccaggatctcttctaaatttgtctcacaaaacaggagaagctcatcttcaaatgttccaatcctctcagcgcgcatcttgatctggtgagccgactcttccccggaaacatacagaacctttcgttttgcattgactaaattcctgcagacctggagaagcagagtggatttaccaattcccggatctcctcccaccagcgaaagggaaccggtcacaatgcctcctccaaggactctgtccagctcaccgatgcctgtgggaatccgctcctcgctctttatagaaacctcggacatactcataggagaggcagaagcccgcttgggctttgcccctcccttttttgtcactgactgcttttcttctacaaaggtgttccatgatttgcaggccggacactgtcccatccacttggacgattcatgtccgcactcgctgcagaaaaatacggtttttgcctttgccatatcagttcctgctccctactgtttcttcacacggaccatagcggtcatgcctggattcaactcaacactcaggatcagctttcctccgaggtttgccttcatggttcctacgttggtattgtctatatacacgcggtactcttgttcaggctccacttccagggttacctgtacatcctctgatgcctcgatctcaaatgccactccatctgttgttgcagcaaaattatggactgcggatcccggtacagattcaaagatcagctgtccgttcttatccagcttcgtcattgtcttgaaggtcttgactttgtacatatccccttcaaattcaatcttgtcctttttggctttcgtatctaatgtgtaatctccgaagcttaatgtcccattttcttcgctgcgaaacaactctgttaccactgacatgttcttatcctcctattaaatctgcatttgttattttattatataatatttcatacttatttactagcatcctttatcgaaaaagtaaggtttttgtcttttgctccgatcgtcagcacagtcccatcattaagctccccgtttagaattttatccgccagaacatcttcaatctcactggtgatcacacggcgcagaggccttgctccataggtctcgctgtagcccttgtctgccagtagtgcaatggctgcaggagtgatcttcaaggaaacctgatgattcttcataagctgctcttttacattttttaaaaacagcttggtgatctcctttaattcttcttttgtaagcatggtaaatacaatggtcccgtcaattcgattcaagaattcaggtttaaatatctgacgtacctcttccatcactccctgggtcatcttctcgtggtttttctccttgtcagaggtcctcacaaacccaagctgtttaggcgaaatgatcctggatgccccagcattggaagtcatgatgagaacggtatttttaaaatccacctttctgccgttggaatctgtaatatgcccgtcatccagcacctggagaagtatgttaaatacatccggatgcgctttctcgatctcatccagaagaatgacggagtaaggatgtctccggacctgctcactgagctgaccgccctccccgaatcccacatatccaggaggtgagccgatgatcttcgacacgctgtgtttttccatatattccgacatatccacacggatcaggtcctcttcccttccgaacatagctctggcaaggcttttggaaagctccgtcttacccacgccggtaggccctagaaacagaaaggagccaatggggcgttttggatcctttaacccaaccctgctgcgctttatggcttttgccacagcctccacggccttatcctgtccgatgacctgcttgtgcagagtcttttccagattcttgagcctctccatctctccctgtttgagctggtttaccggaatctttgtccatagagaaataatctcttccacatcttccttttcgataaccggtacttttttctgctggctttccatccttcggccctttttatccaagcttttctgaagtacctctttttgtgccttcagctcccgggcctcaacgatcttgcccctgctgatatatgtctccatctctcttacgagaaacttaagcttttcctgttcctctttcatgtcagcgggcactttcagagccttcatcctcttcttggcacaggcctcatccaaaacgtcgatggccttgtcgggcaggaaccggtcattgacataccggcaggagagatctaccgcataggctgtgacctcttcagggattagaactctgtggtgggactcaaacttatatttcagtccgtcaagaatctttattgcttcttccgacgaaggctcctccaccaaaatagactggaatcttcgaaccaatgctgcatccttctcaaaatactttgtatactcttcactggtagtggcgccgattaactgaaaatcccctcgggccagagacggctttaaaatattggatgcatccatggctccctcagagccgccggctccgatcatggtgtgtatctcatcaataaaaaggatcacagaagaatcctccgtcacttctgagataatctgcttcatgcgttcctcaaattcaccccggtacttggtccctgcgatgactcttgtcaggtctagggaaagcactcttttatctctcagattcagtggcacgttcccctctgcgatccgggcggccagtccctccacgatagcggtctttccaactcctgggtctccgatcagacaaggattatttttggatcttctgcagagcacctgcatcagacgttccatctcatcttctcttccgatcataggatccagttcgtcatcttttgccttctgggtcaaatctgtgctgaacttttccaatatgttctctccggacccgtcctctgtaaaataatcgtccgctgtattattggaaaactcgttcttggcagacttatagtcaatccccatggtaaccaaagtgtcaataaaaatagcatctacctggatctttttctgtcccatgatctgaaccgcttcattttcaccatcttttaagatagctaacagcacatgttcggttccgacgacatcacttccgtatttgacagccatctggccggcaaggctcaggatctcctctgccctgggtgtgaaactttttatttttgtccgtctttttttctccatatcccgctcttttaaagcttccgaaaatagttcatccgatactccgtgcattctgaggatctcacatgctaaagaacctttcatctttaaaagtcccattaaaagaaacagtgtttctatattctctgccccaagccttgcggatatctttcccgcctcctccagtgcatggcttaaatatctggtaagtggtaatttcctcattctgtcctcctaactcttgtcaagctgccggtaaacgtggtccaccagctgatataattcttctcttgtcacgcccttacagatggcctgggccaccaaaagctgcaggctttcctccaattcatccagctgtttggccttctcattggcatccacgcttacaacggcgccttttcttctgtccagctttaagtagccttcttccctcaatatagcatatgctttatttaccgtatgcatgtttactcctaagatctgtgccagctgacgcaccgacggcagggactcgccatcctggatatcggaacatgcaataccgacgatgatctggtttctcaattgaatataaatggcctgatcgctgttaaaatctacttcaagcagcattttcatcccttccttctttcctatcttttgttatacttagactataataaatagcacggattgtcaatgtcaaaaaatagagaagcaggacagagaatgtacctctgtcctgcttctgtcacatgacctttcctaagcctcgtcaatggcctttccaatgtcatttcttttgtatttatttgcaaaatcgacccagtctgtcgccccgtatgcattcttacgagcttctttcagatcactgccctttgccactactccgagcacacggcctccgtttgtaacgatcttgtctccgtcaaactttgtacccgcatggaatacatagtagccgtccttttccttgaacgtgtcaagccccgtgatctcaaaacctttctcgtacttttcaggatatccgtcggatgccagtaccacacagactgccgcattgtcctcaaattccagagtgatatcggatagcttaccgtcgatacacgcttccattacgtcaatgatatcgtttttcatccggggaaggacaacctgcgcttccggatctccaaaccgtgcattgtattccagcaccttcggcccgtcctccgtgagcataagaccggtaaacaaaatgccggtaaatgggcgtccttctgctgccatggcatccatggtcggctgatagacatacttttcacagaattcttccacttccttcgtatagaacggacttggggagaaggttcccataccgccagtgttgagcccctggtctccatccttggcacgcttatggtcctgtgcagaagtcatacatctgatcgtctttccgtcacagaaggcaagaacagatacttcccgtccggtcataaattcttcaatgacgatctcattgccggcgtctccgaactgcttgtccagcattaacgttttaacacccgccttcgcctcctccagtgtgctgcagatcaagacccctttgccaagtgccagtccgtccgctttcaggacgatcggcatcttcacggtctccagataagcaagtgccttttcaggatccgtgaaattttcataggctgctgtggggatattatattttttcatgagatccttggaaaatgccttagatccttcgatgactgccgcgttcttgcgcggtccgaacactctgagcccttcagcctcaaatgcgtccacgacccctcccacaagcggatcatccattccgatgatggtaagatcaatctctctttccttagcaaatgccaccagtttatcaaactccatagctccgatgtccacgcactctgcatactccgcaatccctgcatttcccggggcacagtaaatcttatcagccttcgggctttttgacgctgcccaggcaatggcatgttctcttccgccacttccaacaatcagtatcttcatccttttatccttccttttacttctcgatctttacatgtcctttggaaactgtgactctgccctccgcgattaagttgatgacctccggcagaatcacccactctgcctgttccatgatacgcctctggagagtctccggtgaatcgtcttctttgacctccactgctttctgcatgatgatcggcccagtatccgtcccttcatccacaaaatgaacggtagctccagaaatctttacacctcttagcagagcctgttcgtgtaccttcagcccgtaacagcccttgccgcagaaagatggaatcagagacggatggatattaatcatcctgttctcaaatctgcgtatgatcttgtcaggtatcacaaccaggcatcctgccagtaccaccagatcaatctctctgccaaccagctcctgatagagtgcttcattaaataagtctctggtctcaaaatccttcggagaaagtcccacagcctcgattccatgaatcttggcgcgctcaagagcatacgcctttttattgttgctgatcactacatctatacgggcattggaaatccggccctcctctatagcatcaatgacagcctgtaaattggtacctcctccggacactaatactgcaacctttagcatactgtaacacctttgtcaccggccttaatctcaccgactacaaacgcagtttcacctgcacgtcccagagcttccagtgtatcattcacattcttttcatctacggctaccatcatgccgattcccatgttgtatgtattatacatcattttctcatcgatctccccggtcttctggagcagtttaaagaccgcaggtacttcataagcatccttgtgcacgaccgcatgcgccccgtccggaagcatccgaggaatattctcataaaaaccacctccggtgatatggctgcatcccttgatctccacaccggcctctttgatggactttaatgcttttacataaatcttggtaggtgctaacagcgcttccccgagtgttgtaccaagttcctcatagtaggtctccagagattctttggtcatatcaaaaacgtttcgcacaagagaatatccattgctgtggatacctgatgatgcaataccgatcaacacgtcaccttctttgatctcttttccagtgatcagatccttctcatccacaataccgacagcaaaacctgccaggtcgtattcgtcttccggataaaatccaggcatctccgctgtctcaccaccgatcaatgcggcatctgactgtttgcatccctctgccacaccactgacaatggtagcgattttttccgggaagtttttgccgcatgcaatatagtctaagaagtaaagaggctctccgcccgcacatgcaatatcgttcacacacatagccacacagtcgataccgatcgtgtcatgcttatccatgataaatgcaagctttaactttgtcccaacaccgtcggtacctgaaacaagagtaggattttccatatccttaaacttctttaatgaaaaagctccggagaatcctccgatgtttgtcaaaacttcctctctcatggttgcctgtacgtgctttttcataagttctaccgactggtaacctgcttcaatatccactcctgcttttttataatccattttcatcctcctaaatatgtgtacccaaagggcacaccctctttattttccaaaataagcatcgatgccgtctgcgattccttccgccatctttttctgaaaagaatccttctgcatctttttatcttcttttttgtttgtcataaaacccatttcgatcagtgtgactggaattttactccagttcgtacccgtcaggtcatcccgtccagataatccacggtttttgattcctgtaactgcacaatactttttgatcacagcctttgaaagctttttgctgcgcttactaatcttttttacatatgcatttttcttagtcgggtacaagactgaagctccgcgtactcctttgcctgcagcgtccgcatgaagacggatacagacagaagctccacttttattggccagctgtgcccttttcttattgctgatgttgacgttttgcttctttctgaccatataaaccttatagcctctttttttcagttccttctccaatttttttgccacactgagtgtgagctttgattccggaacttttgttgccgcaccctgagtaccggatgcaactctggctttctttctctttgcccccggaccgatgggttcttttctactgtcaccctttttctgatggcccgcatcgatggccaccgtgatccggcgatccccagccagggcgctctgactggctgtcaaagaccgcaccgctccagcgcaaacagccgtacataacagtacggctgcaagtcttttcttattcatacttcttatagccaacctcatcaagcttctgggcttttttcactacagaatctttcatagtctctctgtaatcctttaatttttgaagaagttctgcatcagaggaagccaggatctgtgctgcaaggattcctgcgttctgtcctccgttaatggcaacggatgcaaccgggactccggacggcatctggacaatagagtaaagagaatccactcctccgagatctgaggttttcatcgggatcccaatgaccggcatcggaaacagtgccgcgcacatccctggaaggtgtgccgcttttcctgcacctgcgataatgactttgactcctctatcctcagctccctttgcccactcaaagaaaatatccggttctctgtgcgcagaaataatggtcatctcaaaatcaattcccatctcctctaaaaagtctgccgccttgctcataaccggcatatcggaatcactgcccataacgattgctacttttgccataatcttatctcctttgtcataattcgatttgtttttcttctattctacccactggatccggtcacgtcaatggttcgttcaggatttccgtgcctgggagcacaaatttcccgctttcgatcaaatgtgtttccatccctccaagtccgatcacgcagatagaatccagttcctcatagggaatggtgatgtctgtatgacagttaaaatattctccctttctggaccactcattgctttttgcaacgatttcttttccatccgggttatgcaattcagtggcctcactgtggctgtagcaggtatctcccactgcgaaatgcggccccatcttttctacaatcaggatcggcagctgataaaggattccgtacttctgagccatggcataggctgtggtgttggtccccaccgcaaattctcccatcggaagagtctctctgttataaagaagattctgtttgatataagcctgattctcctcctcagattcaaaattcctgcaggaatattcactgatcataccatccttgaacaccagcttaaggtcaataaattttaaatctctcagataaacttcacttacatgaagaactccatttgtccccttaagtttcggagacgtaaacacttctcctactggaatgttcacgtccgccagacagttttcaaaattcgtctccctgtccggatgatccagctcatggagcgctacatacagatctgtttcgttgtcttttgcccctttgatgtggacttccacaccctggtccaaggcatcgatcagatactgctggatctttttatatttttctttgttcagtgtattgaccttcactacctcttcaaagatctcctcaaacttttcgccaatctcaggaatgggataggcgatgatcgtaaaactcctctcctcaggcttcatatattcattggcgatcttgctggactcgttctggaattccacagacagtttttcctgcttttcggacagcctcaaacttgcctccttgttctccggcgtaaacggcagctcaccgaaggtctccatgcaggctgggccggcaaatgcagccgcctcttctttcagcttttcataggcatttctgtagcattccagcttatgtctcataaacgcattgttaaaatacagagcctggtcaaatctatggtcgtattcaaactggggatttggacttgtggagatatatccgactttggacatcccccttgtaatcactcctgtggtaccccggtacaaaataggtgttaacccaatctcttgaaactgccggacagcttcccggattacaggttcaaatcccaagtgatacctgatattgacggtggccttttgggtcatatcgatgttgttgatgataaaaccatcgtgaaaaccatccacataagttttggcgatggcctgtatcctttcttttggaaagctatttaaaaatgaaagcatccggatctcattttccgaaatatattccccgtagcggtagagtacatccggatcagacagatcctccttcatgacaatatccgatgcaaaatgaaaggaaggatccagctgttctctgacacggtaagcgcagatctcctggctataatctctcatatggtcaaagatgatctgttttgcggtctttcttagcggattcccatcctggaacagctgatagatctctaagaacaattcgcttaagattgtcagttcaaaaagccgctcttccacagcataaatcagacagccatgaatctctgcatataaaaaacacaggatatcaccgaattcttctcccaggacagcctgtgcatattcaggattcccatagcagacatgatagcgggatggaaatacatcctcataccatctctggttccacgttttcatccggcaaagcggcctgtctttttcctcaaatacctcgttggcaaataaaagcctctccgccatctttttaaaataggccaaaaaaggctctttcacagaatcttcctgtaaaatagccttcagcctttcctgatttaaatcatggcgttccattaataattcatccacgttataagctccttttaatatttccgttttttatatttttctcaaaaacttcctgaatatacgcccaaagtacatcggatccctggctggtatactcgtttttgctcataatctggccgatgcagacatcatgctctctccaggcccttccatctgtggcatcatttaaaaggatcggctgaatccggtccaaggtgtttgcaaacttggattctggtgtctttcgttcctcaaactctctccaaagtccaaacagttcttctgcctgatcttcggggaggatatggaagatcctctcggccgccttctgctctctggcagcttttgttccgttacctgcctcatcataaagataggtatcccccgcatcgatctccaccagatcatggatcaggaccatcttgatcacctgcagcacatccaccggttcttttgaatattccgatagaaagactgccatcaatgcaagatgccaggaatgttccgcatcgttttcttttctttccccgtttgtcagatgtgtctggcggatgatatccttaagcctgtccacctctatgataaactccatctgtttctgtaatcgttccatactccctcctatatcagcccgatcagaaatatagccgtggaaaacagaagaactgctccgttggtaatacttccaaccaccttccaaattctcatggacgctgtgtcgtgataactcctgaccgcaagcatcattccaaagacagagatgccaaacagcacccaagcagctgcgccgatcaggattcctccattgccggcagcctgaaatgaaaatccaactaaaataagatatccgaagattcctatggcccccagaatactggaaactgctgactctctggatacaacatgatccgacggacggtaggcctgacgcttctttttattcacccgcatgttatctcctccggtatatcgtgacggaaatcttatacccaaaggtataaataatataaccgatcaatccgcctactgtgtttaatagtaaatcatccacatcaaaaaccccaactttaaaaataaattggcagctttcgatgagaaaactgaataaaaatgttcccactacaactttgataaagccgcgctttttctccgtcatggcaggaagcagaaatccaaacgggctgaatgcaaatacattgcccaccagatttgtaataaaagcctccggcgtcagcagggaacgatacatccaaaaacgtttgatctctttgaataaaactaaattcacatgggatgtctcatatcctgtctctctgccgtaacgctcactcaacagcacaaaataaaaaatcaaaatgatatacaaataaaataaaatccggcagccgaatctggctgcctttttcttttttctagtcacaaataagcccttctttattgaacgccatactgttcatagtatgcgtcaatagatgcctttaatgtatcatcaataataacttttcctttgtatggtttattgtacaggtgttccacaacttcctgcatggtcacaatggctgtagtctccagcccgtaattttcgcggatctcctccagagcgctttttgtaccctgcccccgctccatgcggtccacagaaactaccagacccaacacatctacgtctccctgtgcctttacgataggaagtgtctcctgaatggaagttccggccgttgtcacatcctcaatgatgaccaccttgtctccgtcctcgatcgggcttcctaacagaattcctgtatctccgtgatctttcacttctttccggttggcacagtatttgatatccttgccgtaatcctcagaaatggcgatggcggcagctacgcttaatgggattcccttatacgccggtccgaacaggacatcaaaatcaaacccaaatttggcttcgatggccttggcataatacacacccagcttctttaactgtgctccggtcctgtaaaatcctgtattgacaaaaaacggtgtgtttcttccgctttttgtcacaaagtctccgaattttaatacattgcagtcgatcataaattcaataaactcttttttatactgttccattatgttcctccttttgttcagccttctgatattctctataataaaactctatcacatcttttctcgtgacaatcccgatgaaccgctgctcatcatcgatgaccggcacaaaattctggtctttgatcacatccaccagatcgtccatgtctgtattgactgtcaccggacggttatcccgtctccgttccatatctcttaaaaaaatgagttctgccttttcaaggtcaaatctggcctcgtccatcatcgcccagagaagatccccctctgtcactgtccccacatacctgccgtccaaagtcaagaccggaaccgcagaatatccgtggtatttcatcttttccagcgcctgtcttagcgtatagtcttccggcagataagaaacattctcttttggcgtcaagaaaaacaatatgttcatgctgacctcacttccgttttcttttgtttttactttacacatccgatcagttctttgatgtcctcaatcccgtgatcttccatgtaagtcctgatcccgtcaatcaccttgactgtagcacagggatccgtaaagttggctgtcccgacagccactgcggtggctccggccatgataaattccagggcatcctccgcgttcatgattcctcccataccgatcaccggaatctttactgtactgcatacttcgtataccatccgcacagccaccggcttgatcgccggtccagagagtcctccggttttgttggccagcagaaaatctctcttttcaatatcaatcttcatgcctgtgagcgtattgatcagagaaagagcatcactgcccgctgcctccgctgcctttgccatctctttgatgtccgtcacgttgggactcagtttcatgataatcggctgttttgctttttcctttaccgcttttgtaatctcatacaatgccttcggatcctgtccgaacgcaatgcctccctcttttacattggggcaggacacattgatctctaaaaggtccgccggctgatcagagagccgttccaccacctccagataatcctccgttgtctttccgcagacgttgacgatcactgtggctcccgctttctttaaaaacggcagatccctctcgatcattacatccacacccggattctgaagccctactgcattgagcatgcctccgtaggtctctgccactcttggggtgggattacctggccatggaacattggcaaccccttttgtggtcaccgctccaaggctggacagctcaacaaattcactgtattcttctccggagccaaacgtcccggaacctgttgtcaccggattctttaaggaaactcctgcgatcttcactgccagattcatcagatctccacctcctctgcatcaaataccggtccgtctttgcagacacgtttattgtggacatgggtatgtccatctacttccttggaattgcagacacaggcaagacatgctccaatcccacatgccattctctcctccagggaaatctgggcctctaatcccttttcctgtgcatatgccttcacaccccttagcataggagtaggtccgcaggcataaatcactgccccttcgactgcctgttctctgacagcgtcaatgacattaccctttgttcccacggaaccgtcttctgtggaaacatatacactgccgtacggctcaaattcatctttcagaaaagtatcatgatcccggtagccgagcacaatacttttatcacattgaagctgctttgcaagctccagcatcggaggaatcccaatgccgcctccaatcaagatcgctttctcttttttcttcgtaaatccattgcccagaggacccagaaccgtgatctttgtccctgcctcataagagcttaagacttccgttccgccgcctgcaatgcggtagacaagccttaatgttccctgcttgctgtcgatgccgcagatactgatcggtctcggcaatagcctgctttggtcgttaacatagacagacacaaactgtccggcttcggcctcccctgccatgtctcccacatttaaagtcatatcgaaaatatcttcggaaagctttttctggctgatgatctcagcttctatgttttgttttcccatatacttctccttattttacaaatgctttcttcaagtcttccttcatatctaaaactgcctgtctggacgcatccgcatagttttcttctccaaacttgctgtactggtcctgtttgtatgcacagatgattcctctggaggaattgatgatagctcccagtccatcctcattaaagaatggggccagatcctcagcctttcctccctgcgcaccgtatcccggaaccagaataaagtttttcggcatgatctttctaaggatctctcccatcttcggataggttgcccctaccacagctccgatatagctgtagtcctctcccatgtggctttctccccacatggcaactttttctgctaccaattcatataaaggttttccgtccaccaactgatcctggaactctccgctggacggattggatgtcttgaccaggataaatagccctttgttctcctccctgcacacatcaatgaaaggcagaatgccatcacttccaaggtaggggttcactgtcaggaagtcctcgtcaaatcccctgtactttttgctgcctacctgcacttgtcccgcgtgtcccactgcgtatgcggatgaagtggaaccgatgtctccccgtttaatatctccgatgaccacaaggcctttgctcttagcatattcacaagtcttgttaaatgccgccaacccttccacaccaaactgttcatacatggcgatctgcggtttcactgcggggatcaggtcatatgtgctgtcaatgatgcctttattatactgccagatggcttctcccgctccttttaatgtttctccgaattcgtcaaatgctgctttttttatctgttcaggcacataatcaagcatcgggtccagaccgactacaatcggggcatccagttgttttattttttttactaattcattgatcatgttgtttctcctttactcgtcagagttatttctcattatttccgccgttgcttaaaacgaactcctacaacattggaaaaaaactcacatatttatttgaaatcataccataaaaaacgaaagaaaaaaagagactatcaaaaagacagtctcttttcatttaaaagatgatagcgattttagttcctttgccaacttcactttccacctggatcctggcgttgtggtattttgccccgtgttttacgatggacagtccgagacccgtgccttctctctcgctggaatggcttttatctcccctgtaaaaccgctcaaagatccgttcctcgtcctccggagggattccgataccgtcatcttccacgatgagtgtgggccggccctccatgctggccgcagtcacaaatacatggcccccattgttattatacttcaccgcattttccactagattgtgaagcatctcatacagcatctgccggacaccggatacttgagacggggctcctagaacctggatatcaatgcctgactccgccgctgccatagaaagagaattcttaatctccaacgccagctggtagatgtccacattctccttctcctgtacaattttattttcatccagcctggacagctttatgattccttcaatcatggagatcagtcttctggcttccgtatagatcttctcagaaaaccgctcgatatcctcctgcttcacaagcccgtccttcatcagctccgcataccctgaaatggtggtcagcggtgtctttaactcatgggatacattggctgagaattcttttctaagctcctccctttcttccttttctgttacatcgatcatcatcagcactactcctttaactgcgccggataccgtcaccggattcgccatcagaagaaatttccgctcatgaaattccatcacctcttccgaagcctctcctccaagtgccatctccaccgcatctcggaattcgtggctccggttgatggacaatacattctggttgctgcactgttccttgtcaatatccagaatacgcagggcacttgtattataagaaagcacaaccgacttctcattcagaacgagaaagccctcactcatattttccgtgatcgtcgtaaactcgatctgcttttccttgatctccctgatcttttccttgatcgcttcattctgcctatggatcctcaccagcagaggcgacagttcatcataggtggtctcctcctccggatgctccagattgatccggttgatcggttcaatgatccttcccgtgagaagtcttgatagcgccagcgccaatacaaacaccactgccatcataaggatcagggccggaagaacgccttctacctggttcagaatcgtctgtgtctccctgctgagccttaagacgctgccatcggtaagtcttactgcataataataagtctgtttattcagtgttctggaaacccgggtactctccccggctccgttttttctggcctctttgaattctttacggtttctatggttgcccatggagttctctttccctgtgctgtcatacaaaacctttccgtctgaagatatcagcgtaatcctgctgatggtaatatccttgtatgcgtccaggctctggttttcatgctggtttaaggattccgccatatatccagcctcgttttgaatcccctcttttacctgtgacatatatcttccgtatgccacagcggataaaaacaccgtggtacagaccactgtgatcagggcgatgtaggacatattcttaaatatcttgtgtttcattcactgcctccgatacggtatccaatccctctcacagtctcgatcatagatccgcagtcccccagcttctggcgcagggtacggatatgcacatccaccgtccgggtctcaccgtcaaaatcatatccccaaatattagtgagaagctggtctctggtgagcacatttcctttgctttccataagcatacagagcaggcggaactccttgtaagtgagctcgaccttttcgccgtccgccagcaccttatgctttcccacatggatataaaggccgcctgctgaaagctcctccttaggttcctctttttttacccgtcttaacactgctttgatcctggacaccaactccatcattccgaacggctttgtgatataatcatccgctccgctgtctaagcccagcaccttgtcatattccgctccttttgcggtcatcatgataaccggtatatgtttaacctccggattgcttctgatcttcctcaagatactgatgccgtcttcccctggaagcataatatccaaaagcaccagctcagggaccttcccattggaaaggtccttaaaaaaactgatgccgctttcatatccctttgcatcaaatcctgtactctgaagagtgtagatgacgagctcacgtatgtttgcatcatcctcgacaatatatatcacagacttcctcctttatattccccggtgatggagaattccacccattcagcaatattgctggcgtgatcgccgatccgctcaaagtattttgcgatcatgacgatggcaacgcaggcttcccctttctccgggtcctgatgaatcaaagagatcacttcttttttaaccttggaaaacagatcatccacctcatcgtccgctttgattacatcgttagctgcatccagatccttctttacaaaggaatccacagcctttgtcaccatggcgatggtcctcgcagccatcatctgcacatgagtatggtcgttcatcacggctaccacatcgcttttcttcacaatgcccgcaatatccacggcctggtccccgatccgttccatgtcggaaaccattttaagcgccgcggaaatcactctcagatccccggccaccggctgctgctgcagcaaaagcttcatacagcgtctctcaatgtcccgttccttctgattgatctcttcctccagatcgttgagcctttgaatcatctctttgctctttgtgtctaccagtttccctgccagatgtatcatatcttcacagagggcacccatctcgatcatttcaatattcagctggctaagctgcctgtcaaaccgatttctcatatcaaccaaaccttcctgttatatagtcttctgttctttgatcttttggcatggaaaacaatttgtcggactttccatactcaactacctctcccaagaggaaaaacgcggtcttatcggaaatacggacagcctgctgcatattatgggttaccataatgatagtatacttggatttcagttctgccgcaaggtcctcgatctttgaggtggagatcggatccagcgcagaagtcggctcatccatcaaaagcacctccggctccactgccagagccctggcgatacaaagtctctgctgctgtccacctgaaagccccagagcactttttttcagccggtctttcagttcatcccagatcgccgcatttctcaaagacttttccacaatctcatccagctgggctttattcctcactccatgggtcctcggcccgtaagccacattgtcatagacactcataggaaacggattgggtttctggaagaccatacccacccgctttctcagcaggttaatatccatatccccgtaaatatcttccccgtcaagcgtgacctttcccgtgattttacatccttccaccaggtcattcatgcggtttagggattttaaaagggtggactttccacaaccggagggaccgataaatgccgtgatctcatttggagaaatgtccagattgatcccttttaatgctttaaaatccccataatataaatccagattttgtactttgatttttgattccatgttctatcctttcgttatccgcttggcaataaacgtagacactgcattgatcacgatcactacgatcagcagaaccactgccgttgcataagactggttgatgtggagtccttcactggagagggcatacatatgaaccgataaggttcttccggatcccatcacattggaggggatctctgctacggtacccgccgtgtacatcaatgcagcagtctctcctacgatccttcccactgccaggatcacgcccgaaagaataccgggaaccgcagatggaaggacgatcttaaagactgttcttagcttgcccgcgccaaggccgaagctgccttccctgaatgaatcgggaactgattttaacgcttcttcgctggtcctcatcacagccggcaaaatcatgatcgccagtgttgcagccccagatagaatggaaagcccccattttaatgtggtaacaaaaaacagcaatccaaacaatccgtatacgatagacgggatccccgaaagagtctctgccgtgatcctcacgatccccacaaatctgttcccttttctggcatattccacaagataaattgcagaaaagatccccagaggcactgccagaagaagcgcaagaactgtcatactgatcgtattgaccatagccggaaacagcgacacatttgtagatgtatatttcagggaaaacaggtcttttgtaaggtagggaactccatggaccaaaatgtatccgatcagatagatcaggatgcctgctgtaaaaatcgtagatgccaggacgagcaggtataaaagcagagaaagaggtgtccttttataagaagaaaaacgctgcttccggctgactctgttcactggtttgatgctgcccactggctttgctgttattgcttccatcagaattcctccttatgttttaatgcagaaaaagaaaggttgatcagcagaatgaatacaaacagcacaacagctgtggcgatcaatgcttcccggtgcaggtctgtggcataccccatttccaatacgatatttgctgtcagtgtcctgactcctttgtaaagttccatcggcatcctggcctggtttcccgcaaccattacgactgccatggtctcccctatggcacgtccgatcccaagcacaaccccggccagaatcccagatttggccgccggcagaacggtaaagaaaacactccgttcatgactggccccgagagccaaagccccttcataataatgatccggcactgcacggatggcgctctctgacacgccgatgattgtcggaagaatcatgattccaagaagaagagaagccgtaagaatactgtttccgtttcccccgaatatattgcgaatcatcggaaccataacaaccatgccgaaaaatccataaactacagatgggatcccagccaaaagttcaactgccggttttaagatcttatataatttcttgttgcagaatttcgccataaaaactgcagtaaaaataccgattggcactcccacgataatggctcccgccgtgatgtaaagacttcccaggatcattgggaagatgccaaagagtccgttctttggcatccatctctcaccggccagaaactctgccggtccgattttcccaatagcgggaagtccgttcaggaacagaaagacacagatcaatatgactgccagtatggaagtacaggctgcggcaagaaatacacctttcataattttttctttgtactgtttcatcttcatttccccactcattcttttcttgcagtgtaaagatctactttacatcgccccatgaagtcacattgcctgtaaagatgtctttaatctggctgctcttcatttcggaaacatcgtttttcttatttacgaccaccgcgataccatcctgtgcaatcacggtcggttccacacccttcttagtctcactttcagccagctctctggatgccataccgatatcacatactccatcgattgttgaggttacgcctgttgttgaatcactctgttgtacttcgatctttacatccttgttgagcgccgtataagcctcttttaatttctccatgactggtgttacggaggaagaacctgccactacaatctttcctttggcaccggaagctttataggctgcagccttgtcatccactgtaatatatccgttatccgcaactaccttctgcccttctttgctcataataaactttataaaatctttagactgtgaggacatttttttcttatttgttacaatattaaacggacggacgatcttataagtcttattttttacattttttgtgctaggctctgctccgtcaatttttaacgccttcactgtatcattcagggaacccagggatatgtatccgatggctgcctcattttctgataccgttgtcatcataacggaagtggagtttgtgatcatcgcttccgttgtggtgttatctatcttatttccgtcactgtctttttcttcaatcccaaataactctataaaagcccctctagtgccagaaccgtcttctctggatacgacagtgatctcctcgcctgctgcttttttgctttcatctttacttccgcagcctgccaataagctggtcgccgctactgttgtcaacaaaacacttaaaattcttttcctcatctttctcataatattctccttttggcttttcatcgctacaagtcatatattacgtccccaatgtaaaattcaaaagatgagttctgttaaatctgagtaaaatttcacagacttcttatgaatatttaacactttttagataacaaaaaaagaagaatctatgattttcaatagattcttcttccatatgtcatgtctgggattaatactgatacagccagtaagagccgtttgcctgtttccctgattttgtgacttttatataataagtgcctttgctgcccttaaaactaaactgtttaaccttttctccagataaaatcaaggacttcacgggctttttcctgccctttttgtaaacagtgaatttgatctgtccggagttcatataagtttctgcttccatagagatctttttccgttttttcggaaccgaaatgcggtaccatctggaggccttttctgtcaccgtatatagatcatactgttcccggaatctttttaagaccttggcattccgctttttggtcttgtaagcaggtttcatgtaggtcttgatgacacagagtgaatatccctgatcctttcctgacttggcagctattctataggttccctttttcaatccgtagacaaccgttccagtttcactgctgaaataggacttttgctgctttccaatgttcttccagtgtccattttctttccgctggatataaaaggtgatcggtttcgcctgatttatcatcggtgatgccgtgatatctgcggttccccgtttccccatattgaatgtgtggtgcgtatattttccctgaccgctctgaatataggatgtctcattggataaagtacggggatcatccttgatgacaaacggagcgataaagatcgtagaataatctttcggaagcctcacatagtatgtgcctggctttgctttcagcttgacagccccatccggaattctgttccccacaggcgtcttctgatggtccagcagtgaaggtatctgtgccttttcatcctcctggagatagacaaggatcaggctgccctcttccttgactctcagctcgatcatcctatcagggtggtcccttaggtaggactgggtaaatgtgtacatgccgtcaccgtacatcagatacatggacgcttcatccatgctggcaaaccggcccgcttccataatgccttcatccatcccagaagtcctggcacttcgtcccgcttttgcgtcagccgcgatactgtctgcactccttggctcattggcagaaacagacaccggaaacccgatgagctctgcacataaaacaacagctacaatgatacttgtaaaacagataccgtatcttttcataagacacccctccttcgtatctgccctgtcgaagcggctttatatgatcgtaagatccatcagaaattcatctatgaagatattatatcatgcagatatctcagaactatgacattcacatgaagtttttagtcttggcagagatcgtaaacatttcctttgcagacggtgtaataaatctttccgaaaagcttccagcccttgaacggtgagtttgaagccttagagtaaaacttctctacaatatactcttcatcttctttaaacagaaccagatccgcaggttttccctcttggatccttccctgctctaaatgatacagtttcgccggattcactgtcatcttctccaaaagttccatcaaggtaaggtgtccttctctcacaagcttggtgatcccaagtcccagagatgtttccaatcccgtgataccgcttggtgcttttataagacctgccgctttctcttcttctgagtgcggggcatgatccgtcgcaatgatctctatggtgccttctttcagcccctcaatgattctgtccctgtcttttgatgtccgaagcggaggattcattttagccagcggcccataggtcagcacatcctcctctgtgagggtaaaatgatgtggggatgcttcagcagtcactttagctccttttgctttagcgtctctgacataatccacggctttagcagagctgatatgctggatatccacagatgccccggtctccagagccaatcggcagtctctttctaccatcactgcctctgcttcgtcagaagcacctccatattcaagctgatcggccactttccccgcattaactcccggacgtttaatatactttggatcctcctcgtggagactgatcggaacgtccagcttcgccgcagtttccattgctttgcgtacaacgttctcatccatgagcggaagtccgtcatccgtaaatccaagagctccgtgggctttcaactcttccatgtccacaagctcttttcccttgaatcctttggatactgccgcagtctgaatgatgcggaccggctgctcctgcgcacgcttcatgatatcatccaggatctctgcgctgtccaccacaggtttcgtatttgccatacagacaaccgtggtaactcccccgtgcagggcagctttgcttcctgtttccagatcttccttgtgcgtaaaacccggatccctgaaatgcacatgtacatcgatcagcccaggcgcaacggtcatgccttctgcgtctatgatctggtcataatctatttcttcagattttcctatgctcttgatctttccgtcggaaagaacaagatcggtcactttgtcgaatccggtttccggatccaaaactcttccattttttattaaaatcatatcttttcctcctacaggttttattttaccttatcgtgcgaagcacgtccacccgtagggtatgaaatacgggatgccctgtggatatgacatgttccacatgatttccgttcggctcttagaatgcctcactccaatcatgtagaacatggacgtagtgtccgctggagaaggacctctgtcaaaaaaagctgccatttatcgaaagttaattaccactatttccgtcgcgcttttgaaatgcgctcctccaatagtggtaattaactttcgtggagcagccccttttgactcatatcaacctacattttatatgccttttgtcttgcaacagctatctccagcagacattacgtccattttcaccagttcggaggccttgcattcgaagggacgttagtttttcttcttgaagtaaagactcgtaggcggtgcgcattgcgcagtgaggctgtttgagcgtcagcgagttccgaacgggccgccggagaggctttgctgaaagtcagaaaatcttacgtccctgagacagcaagccggagaaccggtgaaaatgtcataccttatcgtgcgaggcacgtccacctttaggctatctgcctccacagcagctaagtacaataaacaacttccctataaatctcacccaccgtttttttgctacatatttcatctactttcccatccgtttttccgatcaatacgattgatttcagaagttctagatattcattttctccttttgatgcaaaacagaacaataaatgaatcttatcttctgtttccgtgaatgtaattcctttttctgaaacgagaagactcagacagtctttattggctccgtaatttttattggcatgtgcaagagcgacacctttgcttacaacgatatagtcgccatattcctccacatgttcaactgattttctgatgtattccgattcaataaatccggctctttccaatggttctgccgctttgtatatagcctgtttccaagtcatctcccggttacagatctgaatatatgcttcctccaggagatcccccaatgcattttcttggactaaaagaacagtatttcgatagtcctttatcacctctgacactttcctgcacagcagatccgccagctttttatcatctatgatatcctgaatcatactttttaataattcagattttggattcataacatcctgctgcactttttgcttttgaagtgccatttgctggatcagattcatatcagacatttttaggaaagcatgcactttgatcaccggatactttttgcttttgatcgaaactgtagaaataataaagtctacctttttatctttagcctccaattcctccggtacctcctcagctgccagaacaccgatgaccttaaagtcaaaataattcttaatctgtgcctcaagatattttccagttgccatactgccgggacagacaatcacaacagaaagcctcggcatgtaacgccggtttctgataattgaaacacaaatatggattacaattgattttttcatattctcactgagcttataagtaagatagcgttccagtatccatgcattttgattgactgcctgttgcagtaattcgtaattgataaagctgtcatattcctttggcagttccacttcatagctgccccagtctttccggtttttgatatgcataagcaatgaatccaacagtttggtatcatcgccaagtccaagctgtaacctttgatcgatgatctccacaaaatgcataattattttatacagctcaatctcgtccactgtttttacaaaagaatacaaatgatgacgtttaatataggaccggaaattttccagcatctccagagtaacctgaatatgcagcatagctcccacatataaaatcaaatgatcaattcctgataatacagcctttttactgatcactgtgccttcttttcttccaaaattaaatattacaaataagtataatacaatatcataaaaaacatcttccataaagaccagactgcaaacctgcatatattcctgcatataggagaatattgcagacaagctgtacctgatctccatgcgcttcatgaccattctctgaaaataaccattatgttttatatcaattgctatttcccggaataaagaaattaatatttcaatcctcttttgatcatcacactttaagcacatccctttcccaggatcgatcaccagatttgtttcaagttccataaatttctctttgatttgttcgatgtctttaacgatggtaatccggcttacatatagctcctctgcaaaattctgcatcgtgatatggtgctggctgactgcaagaatcatcataatatagatttgccgttcctgattagataatttatacaaataaatatccatattatacagatgttcttctacaagagcttcatcaaaatcctcttgttttatcagtgccccgccttctgatactgtgatatccgatacaggaatcgaatgtaggaattggttaatctctccaatatcattgcgcagcgtcttttttgtaattttgtattccagggcaagttcttttactgtccagactttatctgtattaagaataaatttttgaatgatttccacactgcgctttctcataagcatccctccaccatggaaaagcagaataaacactgcgccggaaacgcaatgtttattctccgttctatttgttttttacactttcatttttttctcaaggtagcttggaatttcttccaacggcagttcactgcattttgaaattgttgtttgatcaaggacaaaatgaatcagtctcttcaaaaattccagatgatcctccgcccccttaattgccagattaaagaccagcctggtgtcaacatattcttctgtgtcgtccattcggtaaaaccgcactgggtgatccagtctcaaaagacagatacagttttctctgatcccttctgctttagaatgaggaattgccaccgggatctctgagggaaggcctgttggatattctttttctctctcaatacaggcatctacaaaatcctgactgacacttccgcagctcatcatacattcaccgcacagaagaattgcttctttccagtcttttgcatccccctccgttgccaaatatatattttttttgcccatatgccttctcctattctattgctttcttatcctacgaaaagaccagccagccgatgcagcagacagataaccgttgttccaagattatatccgaagaaaccgtcggttgccatctttccccctagatccaatccggtgacactgaagaaagcagtggcctccggcacgaatagatttgccagaaaagatttcaggaagatgagaaccacgcagcaaattaggctccgcaacagtttcccgttacttgccataacacaaaatacggttaagtaacagacagaagccaacattccgattggaaaataagtcattcccggtattaaaaatgcggttgcgatggtgattggtatgcagatcgctgtgcaagtgacgcaggcaggatctccaagtccaagcgcgatatccatcccgataaagagctgtgaatcctctccaagatgttttttcataaatttatttgctgcattcccaatcggggtgattccttccatcatgatggagaccattcttggtattagaatcaatacactggcaattcccatgccaagcactagcatggtttcaaccggctgctttgtcatgactccaagaaaaactcctacgagaaatccaacaaaacatggttctccaaagatgcctagtttgtcttccagatgttccatatcgatatcaatatccttaaggccgggaattttatcaataatcttattcatcagccaggagaccggataagtccacacgataaaggaaaatgttgtacaagtcgtaccttccagaccgaaatattcctgccacttaggtgcaatcagttcagatactaagactgtgacaactgacagccccaccgtgacggccactccaagaatgatgttgccaaacagggcatacgcaagtgctcccggaattaacaaatgaatatagttccaaatatctacattgaggacttttcttttaaagacaaaaatcaggataaaatttgccaacacgatcaaagggaccgccacaggcgcaaacggtactgtccaggaggcagctccagttgccgcaaaccccatatcaattgttgtgaaaccttttcccaatgactgataatggtcgatgaccggctgtatggttgtaatgagtaatgagacaacaagcttaagtccctgaaacccaattcctacaaacatacctgattttaatgccgctccaaatttcattcggaaaattaatcctaaaatcaggatcataaacggaagcagggaaaccgcgcccatatttattattttttggctgatcattaacaaggtatccatagaaactcctttcttttctcttttgcacagctaatatttatatggctcagaagttctctcctaatccaataatcctttgcacgtattcacaatctcttctctgattctgtcctccccgatccccgagattaaaccaaacacttttattaatggttttgttacaggcctacggtaatttgtcgtcaccataatgacatctacatcattttgtttggacggaatttctgtcatcgtactttttactatttttgctggtatgccggcctccctgcaaatcttctttactgcctcctgtgcgacagtggatgtggcaacaccgctgccgcatgctactaaaatggtcaattgttttgacatgtactctcctccttttctttgtttggaaacagtaccaccttgatggcctctcctgtccttgtcaactcaatggcttctttgatcatactcagcggaagcacatgagtaataaattgatctgctccaaattcatcagagattgccagttcaaatgctctctggacctgcatgctgtttgctccataatgaccgtaaatccataaattatgataatgaatataatttgtatccagctctgtcatggctccctttgctactcctccgaaaaacacaacaattccgccttttcttgccataaatatggattgtgcctgagcctgtgttgaaggattcgcggaaatcactttgtcagcaccttttccatttgtcaactctttaacttctttaaccgggtcagtcttcgtactgttaatcgtatggtccaccccaaactgctttgtcatttccagccgctgatcattgatctcgatcatgataactttttttgcacctctcagctttgccagcctggaatgaaaacatccgatcggtcctgcaccaataatcacaactgtatccccgaatccaacttgaatattttcctggcaggcataaacggaggataacggttctccaagagaagctctctcaaagcttacatcttccggaatcttataaacagagtccttctctgcctgtgctttggttaccggcgcaaactctgcaaaaccaccctgcctgtccgtataggattcatggttcacacagttctcactatgtccgctccggcattcctcacattccaaacaatgatttccaggatgaacataaaccctgtctccaactttgtagttctttgttgtttctgaaatctcatcaatcattcctaccatctcatgcccaaaaacatgcggataccgccctttttttgaatcagtagttaaatttctgatatcggatccacataatccgatggcacatacttttaaaacaaatcctccctccggacaagccggccgtttcatttcttctatccggatatcatttggtccatacatcagtgcggccttcatcattacatccctccttttctgtcattcgtttcttttccaatcatctgtatttttgacctccgctccatcagtttctttaactggcactccggtatatctttcactttccctatactctccgtcaaatgataaatttttaaaacttcttccgcagcctccacaatctttactgcatcttccagcgtattcccgacagcaatacatccatgattccccaaaagaatcaagtcgtggtctttgatgacttcttctatcccatgtgcaatgctggaagttccaggttcgccatatggaaggcatgggatctcccccatctttagtgcaaatgttgtagaacattttaattttatatcttttccgcagtatgcatatgctgtcatatacggcgcatgaatgtgtgccgctgcacagcagtcaggtctggccttcagtgcagcttcgtgcagcaggtactcgctggatctcttcgcacttcctccaatttgttccccgtctctcaacactgctatcatgtcttcattcagctgcctttttcttatgcctgacggcgtgatatataattcttctgtttcacggtctaagattgataagtttccttccagtgtattgacaagccctttttcgtccataagttttgcataataaactatttgtttcttaatctcattggcgctgcttcccatggcacttattctcctttaatgtcagttttattgttccattggaattcatgaattctatggttttagtatatcctcggctctggcagccctcaatacaagttttttccccacgaccggaaataaagtttacagatagatataaaacttttcctgaccaaagaaatgaaatatatattttattcaaagaagttttcggtttctcaggaagttctctggtttttacataaaaaaacagagagaagttttaacttctctccgccaatatatgaacaatattctttaattctctaattcaactgctcctttactgcctccagtgcagtctccacatcactctctgtgatcttctggtctgattttacctttaccacataatttttcttcttgacggtaaagccgccgatggcctcataggctgtctcatcctctatctgttttatcactggtatgaaataaccgttctgggcagttaattcctcaccgatctcataggtatggcctttttcctccagagccatgatctcctctgaaatattttcatcaatatcttcttccagtatttctttggaagttccttcgcactgtttgaattgaacactcatattttgaacaaaaatgctgtcatccgcagcctttgtattcatctttccttttacaaaaaaacaccctcccacagccagtacgattcccactgctgccaaaaactttttattaaaaacaatctttctcataatttctcccttcttgttaccgaataaattaagtataccagaaaagtatgataaaaaaatgcataaattattacaattttcttaggatactatgatcgtttcctttttctgaacagataaaaaatatttttattgatttatgcagccagtcattgtatattatcactcataaaatataacaaaagagggaaaacatatggaaatacgaaaagctgagatcggacagctcagtgagattctgaagatctattctaatgccagagcgttcatgaaggaccatgggaatcctgaccaatggggagagacacatccccaggaagcagtcatatgcggtgatataaaatcaggaaacagctatgtctgcatggaaaacggaaaaatccttgcagtatttttttacaaagccggggaagatcccacctatggacatatttatcagggaaattggctgaacctggatccttacggtgtgattcaccggattgcttccagcgggaaaaagaaaggatccgcatccttctgcctggcttgggcttttgaagaatgcggaaatctgcggatcgacacccatagagataatcacgtgatgcagaatctacttaaaagaaatggatttacctattgcggtatcatctatttggaaaacggcagtgagagacttgcatatcagaaatctgaacaaagtgggcaagccacctcatctccccaacccatcactctttgaggggcttgacaactttgagcaccaaatgcgatttgacgtagtcaaatagattccttacgcatttgtgtgcatactgcccacagggcttttttattccatagggaggttcgaagaactttcctatggaataaaaaaccggccagatgattgacctggtcggtttttaatcttaatattcaaatttcttttcaaaatagtcttttaaatcttcgatcttgattctttcctgttccatagtgtcacggtctctgacggtcactgccccatcttcctcagaatcaaagtcataggtcacacagaacggtgttccgatctcatcctgtcttctataacgttttccgatatttccccgctcatcatactcacagttgtaatatttggcaagcatctcgtagaccttacctgcaccctcgcctaatttcttagacagcggaagcacgccgatctttaccggtgcaatggccggatgaaaacggagtaccgttctcttatctccgccttccagctcttcttcgtcataagcagcacataagaacgctaacgttacacggtctgctcccagagacggttcaattacgtaaggaatataacgttctttcttctcgtcatcaaagtatgtcagatcttcccctgaggtattttgatgctgtgtcaggtcataatctgtacggtcagcgataccccacagctctccccatccaaacgggaataaaaattcaatatcagaagtagccttggagtagaaggaaagttcttcttttccatggtcacggactctcatctggtcatctgtgatccccaaagttttcagccagttaatacagaaatctttccaataggcaaaccactcaaggtcagtatctggctcacagaaaaattccagttccatctgctcaaattctcttgtacggaacgtaaagtttccaggagtgatttcatttctgaaagactttcctacctgtccgataccgaacggaattttctttctggatgttctctgtacatttttaaaattgacgaaaataccctgtgctgtctccggacgcagataaactgtatttttcgcatcctcagtgacaccctggaaggtcttaaacatcaggttgaactcgcggatatccgtaaaattcttcttaccgcaggatgggcagacaatattatggtcattgataaaatctaccatctcttcttttgtccatccgtccacggaaccgccttcgatctccatgccgtgttcatccatgtagtcttcgatgatcttatctgcgcggaaccgttcatgacactctttacagtccatcagagggtcagaaaatccgcccagatgcccggaggcaacccaagtctgcggattcatcaggatcgcacagtcaacacctacattgtacgggctctcctggatgaatttcttccaccatgcctttttgacattgttcttaagctccacgcccagatttccgtaatcccatgtatttgccaatccgccgtaaatctcagatccgctgtacacaaaacctctggcttttgctaaatttacgattttctccattgttaattccatattgtttctacctcaccgttttttcatttcctataatctgttctattgtagcgtgtaacccctcttttttcaagagataagcaaaaaaagtcaaagcagctccaaaaaatccaacgacttaaaatggtggctgacatattggtttagaaaagaatcgcagactatctcaagttccttctgcacttctttggaaaccttaaatgtatacagcttttccagggcactgcttaaaataaactgaatggtatataccgtagatccggaaatatgtaccgcccgtcccccggccttttggcaatttgaacataccatcccgcctgcgctgctgtcaaaatattcaaggtcttctgtgctgccacactgggtacagcagaaaacctccatgccctgcccatacagagccatgattttgatctcaaataccctgcggatcaattcgggtccgatggttttcttctccaaggcccgcaggctttggtacagcagctttaaaatatccatctcatcgttattttcccttgtgagataagaaacaaactcacaaaaataactgccataggagatcagtagaagatcctccttgatcccctcaaagtaatgccccacgtctgcccacatgagattaaaggagcttctgccctcatacagagaaaattctccaaacgtaaacggctgacaggctgcagcataaggacttgttgccttttttgcccctcttgcaaaggcggtgatccttcctctctcttttgtgagaagtgtgacccttttatcaaattctccgatattcccggcatttaataccaggccggttactttgatttcctgtcccatgtttaaacttctttcttattgtacccgtagtttttaagaagcatatcgctgtctcgccagtccttttttaccttcacccacagctgcagattcactttaatatccagcaggttttccatttcgatccgggcctgagatccgattttctttaacatgctgccctgcttcccgatgatgatgcctttgtgggaatccctctcgcatacgatggtagcgtcaatgtctatgatatgtccgtgccggcgctctttcatagaatcaatgatcaccgcgatcccgtgggggatttcctggtccagcagacgcagtgccttttctctgatgagctccgcacagatctgtctttcgggctggtccgtgaccgtgtcctcgtcaaaaaacatggggccttccggaagatatttgaaaatacagtcaataacatcgtccgtattctttccctttagtgcagagaccgggatgacttccacaaattcacacacgtctttgtatgtggtgatcgccttcagtatttcctcatctttaactgtatctgtcttgttaatgacaaggatgaccggtgtcttgaccttgccaagctgttcgatgatataccgctctccacccccaataaaagtagtaggctccaccagccataaaataagatccacttcgttgagtgtgcgctcagcgactttgagcatatagtcgccgagcttattttttgctttgttgatccctggtgtgtctaaaaagacgatctgcccccgctcgtccgtaaaaactgtctggattctgtttcttgttgtctgcggctttttagaggtgatcgcgatcttctgtccgatcagctgattcatcagcgtagatttgcccacattcggcctgccgatcaatgttacaaatcctgatttcattcctgcgtccataaacttccttcctaaaatacgtgtctgatttccttaaatttatcctttgcttcttctagtttgtcttcatttccgatggtgcagttatttcctgcatccaccacacagcgcacatacggcgccagagaacgaatcgtttcctgatcacaggaaagcacctggtcccggtacttctgaagctctgcttctgtccttcccagcagatatgcctggaagcttctctctcccagatcatccggttccagcggagtatccatgttgctgatggttccgatgatatatttcaccatgtcacggtcatcaatatcaaaatgctctacaaaatccgccgcattctcaaacacctgataggtctctaagagatttgggtctctgtaggagacaaacatactgtctccctgaggcataaagctgcacatacagccgtaagctcctcctttgacccggatattaagccagagatactcataggaaaagatgacctgtaacacattgagcgctcccgtatactcataaccctttgtggcaaagtttcctgcacaggctacatactgtactcctcctgccgtggcgaatccctcctccatgttctccggcagaatctttgtctcttcttccggaaggtcttctgtaaacatacgccctgtaaactgatgcatagcatcttccatgaaagacggctttttctcttttccagtataactgaccataagattttcctttcggaaaatatatctgcatgcttctttcatgttatctgcgatcttatcgctctcctgttcaaaggattcgtaccagtctttcacaaattcaaacatggaaacaccctggatctgctctttataccttgcataaggagaaaaataggacatagcccggttggaagctgttttgtgtcctgcctgagcaagatcggtcttcatattggtgtagatctgcccgatgatctccttgagacgttttttgtcgtccagtttactgtcaaacaggatctcctccatcagctcaaaggctttatcagcattttcgtagaagcactttgtcctgatgacaaaatagcttttcaccccatcagtaccgtcaggaagaacatccatggttgtcaccatgcctcctgtctcaatgccgatctcattgcccagctcaaaataactgtgttttttggtatctacgcttctgaacacttctgacatgagagacacataaggtaccagtctggctggaaccctggacatatcaaatagcatcttcagatagcagatctggttggtaaagtatgggtgccagatgatcttgactccatccaccagtacttcttcgttgcacagagggcggatttccttcttaatatctttaatatccagaagcggtattttctccagatcctctttcggagtcgctgcctcctgatattctttcaattctttagttgattttaccagctgcctgagttcttcttctaacaggctctccttgaattccctgagctgctctgctgtcttttggtccttcctggtctgaagtcccttttccggtttcagcacaacgatggatttatgtgtatttgacaacagataggttttgatcaagtcggtgaaatagcttccgtccagctgctctcttaaaaatgcaaacacctcgttggtctttacatgcataaacggctcatcatcgtcgtagagccagctgtcgtacatctgaagcccatacatgagtccctttggaaatctcccgaagttggcctccttgtattggaattcataataattcagcgccgcctccagactgcgtctctgtattccttcctcagagattttttgaagcatctcctcgatgatgcgcacaaattcctcttcttttttctcatctgcctcctgggctaccacagaaaagacaggctgctcaataccgttgtcgtaagaactgctgatatcctttgcgattcctgcttccatcaaagccttttttacaggtgctccctgcatggaaaacaacgcccggtcaagaatctgaaaagcaatatacagctctttgtcaagacttgtgcctatgactgcattataagaaaggaacgttttattctccgtcccatcctgttcactgaccggatacacttcctccacacgtttcacttcgctgaaagctttttggggctcccatgaggtgtctacctgctttttatcaaagtcagaaagataatgctcatcgataaactccagatattcctctgggtccatatccccatacagatagatatagctgttggaaggatggtagtaggttctgtgaaaatccaggaactgctcatagctgagctcagggatcgcttccggatctcctcctgactcaaatccatacggagtgtcagaaagcagtgacttctggatgagacgcgcaagctgctggtccggggaagaaaatacacccttcatctcattatatacaacaccgttgtaggttacaggcgcatcttctgactcaagagaataatgccacccttcctgctttaagatctccggttttgtataaatgttcggataaaagaccgcatccagatagacgtgcatcaggttgaaaaaatctttatcgttacagcttgccaccggatataccgtcttatccggatacgtcatggcattcaaaaatgtgttcagggatcctttcaccagctccacaaacggatcttttaaaggaaattctctggacccgcagagcacggagtgctccataatatgcggaaccccggtatcatcctttggcggtgtcttaaatccaatctggaataccttgttatcgtcctcattggagatcactaccactctggcccccgtctttttgtggcggtatacatagcctgttccattcagctctttgatctgttcttcttttaccaactcataattctttatcatagcctttgaaattcgctccttttttatattttgatccaccgtatgcacggatggaaattttatcggcgttcaagataaattataccacatttgccgttttcttatttataactttttttcgtctggacttcctgccgaaatctgtctctgagagcaaaattgcggccatcaccagcgcaaaaccggccaaaatctttaacgtggccttttctccgtaaaaaatcacgctgaaaagcaccccgaatacagactccagactcaggatcagggaagcggaggaagaattcacatggctctgtcccacgctctgaaaggttactgccacagccgtacacatgatgaccagataggccaggcttcccgcctgcccaaaagtccagtggatggcactgagatcctcagtaaacaaggacagcactgctccccacagccccgcaaataaaaactgtacgattgtaagcagcacaggatctttttccccactcttcattcccagataagcgatatggagagaaaacaaaaggccgcccgctaaggtcagcgcgtcacctattccaatgcttaaactgccattgagagatatcagcccgataccggtgatacagatcaatgccgccagaaagttttgttttgtgggcctttttttctgccaggcccatgccacaaaaggcacaatcacacagtagatagctgttaaaaatgcatttttcccgggtgttgtgtgatacagcccttctgtctgaaaccaataagcccaaaaccagaaacttcccagtacaaatccgattttcaaataacttttatttatgttccccagcctcttatggaaaaaaatacacagtaacaatgcccccactaaaaatctagtggcaagcagaaagttttctggtatattggcaatggtatttttcataataaaaaaggaactgccccatatcagtgcagaaccaaacaatgctgccttgccgaacttcatttttgttttttgatccatactaaccctcaaccttctaaattgtattgccgttgactattatcataccatttaccaatgcactgccgcaacttcttttcgttcgaacttctgttcttattttgcttgctttctccatggcactgtgctagaataaaagaacaaacattcgatattgtgaggtgggttatggaaactataagtccttccctgtcattacaggagaaattaacaattcttgcagacgcggccaaatatgacgtggcctgcacctccagcggcgtagaccgccggggcgaaaaaggaaaactgggaaacggcgtggccgcaggcatctgccacagctttgcctctgacggccgctgtgtctccctgttaaaaatacttcagagcaatgagtgcatctatgactgcaagtactgcctgaaccgtgcaggcaatgaccgggtccgcaccacattcactccggaggaagtctgccatttggtcatcgagttctaccgacggaattatatcgagggactgttcttaagctccggtgtagtaaaaagccccgcctatacgatggagcttatgtgccggaccctttccatgctgaggaaccagtaccgtttcaacggctacatccatgtgaaagccatccccggcgctcccgaggaacttctttcaagcatcggatatctggcagaccgggtcagcatcaatctggagctgcccacgccggaaggacttaaggatctggccccccacaagacacagaagacgatcctaaggcccatggaacagatccgctccggcattgtagaccaccggctgtccatcgggaaggatgcgcagatggagcgtttcggtggtaaccggaacttaaagcacacgatctttgatgatgtcccggccagccgtattgaagaacacaagctgctggcttctgactccttccgtccgcctgctaagggaaagccggcaccgtttgttcccgccggacaaagtacccagatgatcgtaggcgccaccgcagagaacgatctgcagcttctgaccgtcacccagcagatgtaccagaagtttgacctgaaacgtgttttcttctcagcttatgtccccctcaacgaagactcccgccttcccgctctggatactgcaccgccgctgctcagagaacatcggctgtatcaggcggattggcttttgagattctacggtttccacgcagaagaactcctgagcaccgaccggcccaattttaatattatgctggaccccaagtgcgactgggctctgcgtcatctggaacttttccccgtagagatcaaccgggccagctacgcagatctgctgagggttcccggcatcggcaccaagtccgcctaccgcattgtgaagagccggaggcagcgctctctcacatttgagaaccttaaaaagatcggcgtcgtcctgaaacgcgcaaaatactttatcacctgcaatggaaaaatgatgtataacatccccatagaagagaatttcatcacccggcagctgatcggtgaagactccaagaagtcctgggagattgaccatccccagacctacgaacagctgtccctctttgacgataagaattttacaacatccccttcagccgaggactcctgcaaatcactgagcggacagatataatgctaagaacagttatgatatctgcccgggaaacacccgttccaacataaggtttcactctgcgaaagtttttctccattgttggaaggaggcctttccagagccggctggagataatggagaagaatttatgaccatctttacctgcaacaacacatttgaggatatgatgtcctgtatctatactgcctgggccgcccgcttaggccataataacgtccgtctcaaaacagaacctatagggaatctggaactgttctgtgattaccgtcatgtagaacatgatgctgacaaaaccgcaagtgtcatccgatccatccaaaaaaagatttcttttcacgcctatcagatggtataccgggccgccatgtcatttgaggaagaaaagctggatataatctaccgtttcctaatctatggctttcactacggcccctctgtggtccatatgcttcaggagccggccgtgatgaatctgtttgagcttgaccggaaggtgtccaatgaagctcatctattccgggaattcctccggttttcagaagtggacaaggtccttatcgctcatatcgagcccaaatgcgatgtcctcaccatcctggctccccaatttacggaccgcatgccctccgagaactggatgatcatcgatgacaacagaaaaaccgctgtaatccatccatctgaccaggactattacatgacaatactgtcagagaatgaactgagccgcttaaaagagtccgagcgctccgatatctatacggacctttggaaggctttctttgaaaccatcggagtggaggcaagaaaaaatccccgctgccagagaaccatgatgccgctctggtaccgaaaacacatgaccgagtttcagtgatccaagggatactttatcgtgcggagcacgcccacccgaagggtataaaatgcggtgtgccctgtgggtataagtttttccccattgtcggaaggaggcctttccagagccgactggagataatggagaaaaactcttgactctcacgtggcgttatgggctattcttatcttaccaggaggagaccaagatgaaaacagtaagagaagtaagcagattaaccggtgtcagtgtgcgcaccctccactattatgacgagatcggactcttatgtcctgaccgaatctcagaggctggctaccgtctgtatggagctcaggcgttagaacgtcttcagcatattttactgttccgtgagcttgagttctctctaaaagacatcagacagattttagaccgtccggactttgaccggcaaaaagcgctggaccagcagattgaactattaatgctgaaaaaggatcgtctggaacatctgattgattttgctcttggaatacagaagttaggagtggagccattgaattatcaggcatttgacaaacagacactggaaaactataaagccgaggcaaaaaagagttggggccaaacagaagctttccaggaatacgaacaaaagacccaggactatacagaggaggacctaaagttcatgaatacaaagtttatggcaaactttgtggaattcggccgtctgaaagccgaagatccggcatctgaaactgtaaaaaagcaagttgaagccttaaagcagtcgatcacagaccagtattatacttgtaccgacgatatcctcgcctctctcggtactatgtacaccggtgatgacaggatgaaggagtccattgaccgcgctggaggacagggcactgcccagtttgtttcagacgcgatccgcatttactgccagtcccattcataggcaagggagagaaatcataatgatttctctccctttatgatttagtgatggaataaacggattcctgtaaaacacatagccatattgtatttgttgcatgtttcaataacatggtcatcacggatagaaccgcccggctcagccacataagagacaccactcttgtgagccctctcaatgttatccccaaatgggaaaaacgcatcagatccaagagcgactcctgtcagctgcgaaagccattctcgtttttcttctctcgtaaatacttctggcttcactttaaagatgttttcccactctccgtcagccagaacatccatataatcatctccgatatacaaatcaatggcattgtcacggtccgctctgcggataccgtcaacgaactgcagtcccataactttcggtgcctggcgcagataccagttatccgccttctgtcctgccaggcgtgtacaatggatcctggactgctgtccggcaccgataccgatggcctgtccatcctttgcatagcagacagagttagactgtgtatacttcaatgtgatcatggcaatggccaggtcgatttttgcggagtcaggaatttccttattttctgtgacaatatcgttaaagaaatctttgtcgatgttcagctcattccttccctgttcaaaagtgatgccaaacacttctttgcgttcgatcggagcaggcacataatccggatcaatctcgatcacattgtagttcccttttttcttttcgtttaagatctcaagcgcttccggctcatatcctggagcgatcactccgtcggaaacttctcttttgataatctttgctgtggctgcgtcacacacatcagaaagtgaaataaaatctccgaaagaagacatcctgtctgctcctcttgccctggcgtaagcattggcgggaggggtaaattccatatccatatcatccacccaatagattttcttttctacatctgacatgggaagtcctactgccgcacctgccggtgagacatgtttaaaggaagccgctgccggaagtccggttgctttcttcagttccttcaccagctgccagccatttaatgcatcaaggaaattaatgtatcctggctttccacttaacactttgatcggcagttctccatcttccatgtagatccttgacggtttctggtttggattgcatccgtattttaattctaattccttcatggtttcctcctattgattcttgttcacgatccttgtttcatattctcctgtttcgatattgatataccttacaaacagtgacactttattatcctcattcaggctgtcccaaatacggcctgtaaatgtctcgatgtcatcctccacaccaactaacttcggttctccttcaaagcttgggagcggatccccatcctgcatataggtatggatgaaatggccttccccgtttactggattttcgtaagcaaatgtatagcggttgcatgcattcggattgccgttattgctttttaaaatggacatggcataattgtaagttccattttccacgtgcatgatacctgaaatacgcggagtataattcggagcatccggctcaaactctcttgtgcgaagtgcctgttcaaacgtctgctgtttatccataagctcatagatcgtatctgtctgatctccgttagtcacaatcgtcttattcccaagcaccttcaccggggcatagatgataagacttgggtcgctcaacttggatggatcaaatgcctgggttcggattccttttccgtcctcaataaacacacggtttctgctgttctcacttcttcccatgataaagtatgcagttactgcataagttccgttgggtgattttccaatcacaatccctctgccaggatatgaattcccttttaactcgtcttccaatgacaacatcttcattgtcttacatcctccttttggcttgtttactttgcgtaccaaatgcgatttgacgtagtcaaatgattcctcacgcatttgtgttcataacgcccgcagggctgttttattccatagggaaaactatcctatagaataaaacagccgcctgggcatactaaataaaagttgcccaggcggccgacatgtctactaccgtgctccccgtggtttctccactatccgccagtcgcacagctttcaaaataaatatacactatgatccgccatttttcaagttaattttcagaaaccgtaaagcctgtaatccgcggataatcttcatctaaaactaaaacatctgtatcatcagttctgcggcagcagtatttgtaactgccggtacgttgtgtacatcacagacacgaagcagcgctgaaacatccggctcatgaggctgcgctgtcaatgggtcccggaagaacacaaccagtccaatctttccttctgcaatcctgccgcctaactgctggtcaccgccataaggtcctgacagatatcgctttacaggaaggccggtggcttcctccactctttttccggtagtaccagttgcaactaagttatactttgctaaagtctctttattcttttttgcaaattccaccatctcatcttttttcttatcatgtgcaatcaatgcaattatcataattttatcctcctgatgtttattgactgtaaagccaatctacactataggcgctattttttcaagaggaatatctttagatcagcgtttcagagactttacagaagaaaactgactatatattttctttttcctgactgtctgataggatctgaccttaaaataataccgctttttctttgttaatttaccttttgtataagatgattttttcactgacactgtcgcgatccgcttatacccagatgattttttcttggacatataaatctggtactttgtcacaccagagacctttgaccatgttattttgatcccctttgacccgctcttttttagttttttgatcttattggattttggaatcactgtgattttacaggatacttttttgccacttccacttgttcccgtaatcactgctgtgccgactttttttgctgtcactttacctgcagaactgatggacgccaccgatgaattggagctggaccacctgacggttggaaatgcgttttttggctctgtgtaacttttcagcgtataagaggaaccccttttcagcgacagcgacttcttactcagtttaaagctctttgccggaatgcttttgatcaaaaaattcagatctacatatccgttgattcccggaacatttcctttgtcggtgctctgccacataatgtaacttccagaataactacagacactattgtactgtgcaatccatctggggtacttttggaataacttatctgtcagtttcttctcaaaccattctttattagcatagattccgacattcgtatagccgtttgcctttaatctgtctgcaaaagcgcctgctatctgtgccactttggagtttgaaagtttatatatatcgttttcttccagatcgtaataaataggataggaaagtttcctgtcctgtatcaatcggatcacatggtcagcttcgctttttgctttttctactgtgtctgcataggaatagagataaactccatatggtatattcagccgttcacattccgatacgtttcgaagccattgatcatcatcttgctctggttgattcatcccatagccacaccggagaataacaaagtcaataccggatgccttcactttctcccagtcaatctttttctgatggtggctgacatcaattccttttgcccatgcacctggaatcgggctgccaagatcatttacaaacatcccgttgactttattccaggcattgctgtaacccctggcagatctgctagccatctgcccctcagttgagtaaatgggctttccatccttataacgccagctgtcttctttcccgctttctttcttttcctgctgtacattctgctggctgccatacactgtctgagcggcaggcgccagccccatccccactgccatgaaaacggcaaaaaacctattacatacctttatcttaagatttgccatgtcttctcctttcaataatcttacatttgtaggattattataccatatggataatggaatggctatatctattatatctcacatgaattcattcatgaaacagaaaaaagatcccctataggatcttctttctctattgcattgtattcttccttattttaacgttttaatgatttgacagaactaaaactgctgtaatactttgttttccctaccgttttgtatgaacggactttgaaataataacgcctgcctcttttcaggctcttttttgtatagctggcggattttgaggaagcagtcttaatccgtttaaaaccagaagatttctttttagacatatagatttggtattttgtcgtcccgctcacttttgaccatgtaatcttgatgcttttctttccgaatttcttgagctttttaattttattggtcttaggccggacagtgactttgcacgctgccttctttccgttagatgacttcgctgtaatggttgcttttccaactcctttggcagtaacctttccgctagaagaaaccactgcaactttcttattcgagctgctccatgtcacatttttatttcctgcattggacggtgaaatggactttttcagtgtataggaagatccatttttgagacccagacttgtcttattcaacttcacagaagaaaccgctgctgtatgataagcgtttacgttccaggatccaatcttaaagtttaaatctacatttgtaccaataccactgaccgtaccggtagaggtactttgccacatgtgataatctcctttataatcacagcggtaattatactgtgccacccatctaggatttttatcaaacacactgcttgttaaaagtgaggaaaaccaatatttattggcatagacgcctacatttttatagcctgcattgttcaatgtttttatgaaggtatctgcgatatccgacagttttttattggacaatcctccctggtacttctcatcctccatgtcataatagattggataagaaagcttcttccctttgatcaggcgtatcacgtgttctgcttcactttttgcttttgtagtgtttgtcgcataggaataaatataaacaccataaggcatgccgattctctcacattcagaagaattatatgcccatgtaggatcatcctggcttttaagattctcgccgtatcccactcttaggatcgcatagtcaatcccgtctgctttgactttgttccagtcaatctttccatcccatttgctcacgtcaatccctttggctgttgcgttaggaatcggatcgcccaaagaattcaaaaacactccatttacatttttccaagcattcgatactgcccttgcgcctctgctgtttacagaaggccctatttcttcctgctgctttatgggctttccatctttatatctccagctgttggccggatcattttcttccgcgctttttgtttccgccataatcggaacactgcttactgtccaaactccggcggccagcactaacactgaagataatactgcaatcttactttttatcccttttaatctcattttcctcctccttttatctctttgtgtagtatatcatttttctcatgattttccaaagataaaagagaagaaaaatttcccaagccaatgtgggcgggaccctccataaggtatttttaattcatcgagagatcttgaaaaccttcccaggaagaacaaagtgggcaagcccacttcatctccccagcccctcactctttgaggggcttgacaactttgggcgctaaatgcgatttgacgtggtcaaataatttcctcacgcatttgtgtgcataatgcccgtagggcttttttgttccatagggaggttcgaagaactttcctatggtaatgaaaaaagtgtgctgcatataaagtataataatgcagcacacctctctaatttctttttaaacacaacccatcctggacatctctctctttaatctcttgatgatttttttctctaatcttgaaatataggattgagagattcccattagatccgcaacctccttctgcgttttttcttctccatctttctgattgatgccaaatctcaactcaatgatctttctttcccggtcagagaggatcttcattgcattcagcaagagcttccggtccacctcgtgttccagatccctgtagatgatatcctcatccgttccgaggatatctgacaaaagcagttcatttccatcccaatctacgttcagaggctcatcgatggacacttccatttttgtcttgttgttccttcttaaatacatcagaatttcattctcgatacatctggaagcataggtggcaagtttgatctttttcgctgggttaaatgtattgatcgcttttatcagcccaatggtcccaatggagatcaaatcctccaccccaattcccgtattgtcaaatttttttgctatgtacacaacaagccgcagattcctctcaatcagttttgccctggcttccggttcctccgccgttccgagcatatgaatcattttttcctcttcctttgcctccagaggagccggcagtatctctgcacctccgatgtaatgaatctcttttcctttcgctaaaaatgtcctcttttgacatgtcacattaagtttcagcactgtacaacctcccattaccttacctgaccagatccggatgaagcaaaagctgataatgaccgtttcgggaaagcggctgctctgacagtcctatcagtcccctttgcactatccatgtctggctgctattcttgattctcatattagttacaagaactcccatcatcaggccgccctctttccctacggacctgtatggaatcattcttatatcttttagcttatgtttttctattaaaatggttaatgactcatccaaatatggattcagtgcctgttcttctatgacagaaaccgggagtttctctatgggctcataaagaaaatttcctgtgtccaggtaagcggttaccctgaccgtctttccaagcagttcaaatgatacttgatataaggaatccttctgttcccggatattttcccagactgcacagtataaaaaggccagaaggagaaatgcggcaaaacaaccgaaaatccagatgtggatggacagacggtatttgataaagctccatattcctcccagcaaagctgacagcgcaaacaaatatccggaacaaataagacttttcctaagggaaagcggaaacgccagccacgatgtggctgctatgcttgcggcaagaaatccaagcattacggcctggtttcccccagctgcccacacagtcagacacccaagtccgcttcctgcggccgatgcggtcaggatccttacaatcgaactggaggatttcagcgaacttcttaaaataagcagcagtcccagaagaaccagccactgttccaaaaacatcatcaaaaaaaacataagcttattataaaaaaagaagcgcacgtactttgtcaaaaaagagaagtgccagctacgtaaattctacaaaaaaagcccgtattcctgcctttcggctgaatacgggcttgtcccatgttgtattttattttcttctgctctttaacagaaactctggaatcacaatcttagaatcatggtcctctacactggcattctcgtgttccttgctgctgtatgtagattctgtactttcggccggctcacttttcggctgactgctatagatcggctgtcctgaaaaaacaggcggaggtgtaatacttttctttttaaagcctgtccctctggatgcggtctcagactgaatccctgtggcaacgatggtagcgctgatctggtctcccatatcagagttaaccgtaccgaagatcacattgacttcctgtcctgccgtatcctttaagtactcgactgcctgctgtgcttccagcattcctacatctcctgagaagttgacgatgatgtcggtagctccggaaacagttgtctccagaagcggactttccatagctgccttgatagcctccaattcctcgtccgcgacacccatgccgatgtgcgcgatacccttgtcgcgcataactgtctggatatctgcaaaatccacgttgatcagtccaggattgtagatcatatctgtaattccctgtacaccctgctgaagaacttcatctgctttcttcagggcatccggaatggttgtcttcttctcacagatctgaagcagcttgtcattggggatcacgatcatcgtgtccacctgatcctgaagacgggccacccctgctatggcattgttcatgcggggcttgccttcaaaggtaaacggttttgtgacaacacctactgtcagaatgccaagtgattttgaaatctcagcgatcaccggggctgcgccagtccctgttccgcctcccataccacaggttacgaacaccatgtcagcgccctgtaccagctgggtgatctcatccctgttctcctcaacggctgcttctccgatctcaggttttgcacctgcaccgagacctttggtcagcttttctccgatctggatctttgtagagcatttacataaagacagagcctgcctgtccgtattgatccctacaagttccactccctgtatattctcatcaaccatgcggttgactgcattgttgccggctcctccgaccccaatgactaaaattctggcttgtgtgctttctacattaggcataatctcgaccacgatgctcctccttcaatatctatctcaaattttcttacactcatccacattatcactattcttatattattatatgatacagtttttcacctaaactttcaactactttttcgtcttgaaaattgcgactggattgtcctttgtaaaatatttcatcgagatggttcccttcttccccttcatcttcgggaggatcccggtgagctcactgagctttaagtccagttcctggctgttccaaaggtttacggtgagttctccgctgatcagcagagcctttccgtccgcgttgaaatggatctggctgaccggaagctcgtacttgtcaatggccatggtaatttttagtatctgcataaatacactgcttttcttctccgggattttttccccaagcgcaatttctttgtaattcagccctgttaccaacggtacatcatcatagtgtttctcataaatttccagcgcgtacccttctttgtcgaagtaaacatacttgccgttataattcaaacaccctgcccttttcttctcattgacctgcactgtcacctgattggtcccctgcagtgagatatcaactgactccacaaatggaagcgtttttatcggtgagattttgttttgcagatataagaccagaccattccccacatatgtattttgtttcagtgccgctgcgatctctccttctgtgtaatggtcgttcccttttacaatcatcttttttgtttgaaaaacaccaaaaagcacgacacatacaaaaatcaacagagtaacgacacataaaacgattgtctttttgtggccaggcccctttttttgtttcttggcctggctgattgttatgatcttttcatttttatccataagcagttcctttacatccgtatttttctggatactgacagaaccagacccatctccgccatgaccaccaaaatagaagtaccgccgtaactgatgaacggcaatggaattccggtaggcggaattgtgtttgttacaactgcaatattaatgaaaacctgtactccgatatgaatcataaagccgatgacaaccaaggacccaaacagatcatcagagttcatggcgatcaaaagcattctccagatcaagagcataaacagtaaaataaggcacacagctccaaacagtcccagctcctcgcagatgattgaaaatatcatatcattatgggactccggtatgaatcccatcttctgcatactctgtcccagcccttttccaaacagtcccccggatcctatggcatacagtgcctgcattgtctgaagtcctttgggatgtgtctcaggatttttccagatcgccacacgctcatttcggtagctgttggaaaatgtcagatagagtaccagtcccgcgacgccggacagggcgattcccaagagctctttggtctttgggctcaccacaaaaatcatgacccccaccattgcagtcagtacaatggctgtactcagattctggtaagcaaccagtccgatgataggcagacagcgtacaatgactttcactgcggcggccatagttctcatcctatgggcattcttcgacaatatgtaagccaggtagatcacgaggaaaatctttgccacctcagatggctggaactgaaatcctcctatggaaatccagcgcaccgcaccctttttggcagctccgataaataacacgatgatcaaaagtgccacgctgagcccatagcagccgtaggctatgaccttcgtgttgaggatcctataatcaaaccacgtgagaacagccataaaaactgcccccactgccacggcaaaacactgcctgatcaaccagtgataagggttcccaaagttcagagtactcttataagaacttgtactgaagatcatgaccaagccgaatccaacgagaaacatcacgatgaaaagcatcggataatcgagataacgccgttttggcatgtatttttcactgactctgctcttcttcaaatcttaacgctcctttattctttttacacactccttgaagcggtcaccccttacttcataattcgggaacatcccccagcttgcacatgcaggtgacaaaagaaccgcatcacctgaaaccgcatgagacgccgcatactctaccgcttcctccagtgtatccacatacacgatctgagaaaaaccatgggctttggctgtctcaccgatcttctctgctgttgctccgagaaggatcagttctttaacttttccgtcaaaagcttcaatccagtcatcatactctgcctttttatcataacccccgccgatcaaaaatgtcgggcggttcatggctttgatcccttttatggcggcatcggtgtttgttccttttgaatcgttatagtaggcaacattttcaatggtatctacatattctatgcggtgttccacacctttaaaaccagaaactccctgtctgatcttttcggccggaactcccatataatgagatactgcgatggccgccagaatattctcatagttgtggtctcccaggaggttgatgtcctgctctgtacatatggcaaacgcagatccgttttctgccagcataaaggctccatctttaaaatacacaccttcttctaattcatggtgaaggctgaaaaatacgacttttgcctttgcccgcactgccatttccctggtgacggcatcctcatagttgagtaccatgatctggtccttggtctgattcattccaatggactccttggtcttagcataaatctccacagtcccatgccggtccagatgatccggggtaatgtttaaaaccgctgaaaccttcggacaaaagtcatgaatcgtttccagctggaaactgctgatctctgctacgatcacgctatcgtcttttgtatccaaggcaatgctcgtatacggtgtcccgatatttccaacaacatagacatcactgtaacagcatctcatgatctcgcccaccagtgctgttgtggttgtctttccattggtgcctgtgatggccgctatctgtcctctggatacctggtatgccagctcgatctcactccagacaggtttcccggcttccataaatctctttgaaaccggagcatttactgatatgccagggcttaacacaaggagatcaaacgcttctgtatcttctgctttaagttcacccaggatcagagggatctctctgttcccttcaagcttggcgtacacatccatcggtttaagctcttcatttccgtcatagagacttaccaaggctccggatcgaatcagaagattggctgaacctatgccgctttttcctgctcccgcaactaaaaccttcttatcttttaatgtcattttacgctccttatctaaatggcaaccaggccgatcagacataagatggctgtcacaatggcaaatatggcgacgactttcgtctctggccatccggacagttcaaaatgatggtggatcggcgccatcttaaagattctttttcctgttttcttaaaatatactacctgtatcataacagacagcacttcaatcatgtaaataaaggccacaagcggaataaacagcggaagacgtaacatcaccgcagttgcagccacaaatcctcccagcgccagcgaacctgtatcgcccataaatacccgagccggatacacattaaatacaaggaatccaagcagggctcccacagtggcgcaggtgatcggccacagccccggatcgttcccagcgattccagccccgatggcaaccaccgtaaagaaagtggcgatcagaacagtgacgctggacgcaaggccatccagtccgtctgtaaaattggctccgttgactgttcccaaaaggatgataaaaatagccggaacaaagagcgcacctaattccaggtattttccgtgtgagaacggaatcagcatggaagtgccgatatccgtatggttgatcagataatacgcaaacactccggtcacaatgatctggccaagcatcttctgccaggcccggagtcccagatttcttttcattacaactttgatgtaatcgtcaataaatccgataaatccaaatcccaatgtgacaaacagcactggaatgatgttcgggtagtcctttacataaaacagagaagccacgataatgccaagtaagatgatcaatccgcccatggttggggtccctgattttttcaggtgggactccggtccctctccccggatgaactggccgaatttcagcttctgcaaatatttaatcatcaccgggcttaaaaccacgctgacgaagaatgctattagaattggttttacgatactataattcatgttttcacctcatttgtttttcttatctttccagtatatctttatttctctgttttatcaaccgtataatccttggaaattccaagataaggaagcgcgactttgaacacttcacggacgaccggagccgcgatggttcccccataatacgtccctttcggctcgtcgatcataactaacgccattacggttggatgctttgcctttgaaaaacctaagaatgaagaaatatactttcctgttccacgaggcagcttttcactggttgcagtctttcctcctatggaatatccctcgatcttgcagttccttccggacccttctgacactaccgcctccaaaagctctctcatagtctcagatgtttccttcttgattacattcttcttttttgcaaattcaaaggtcttgactgtcttccctgacggtgccactgccttcataccgaaatgcggtgtcaccagagtgcctccattgactgcggcactggccgctctcataagctgaagaggagtgatctggaaggactggccgaaggacatggtggcaagctccacagctcccacattctttttattgtgcatgatggagttggcctctcccggaatgtcgatcccggtcttttcaaataatcccatcctgcggaacatggtatacatgccgtccactcccactctggctcccacttccataaagacggggttgcaggaattcataacgccctctttaaaagtctcagatccgtgtcccgtggttttatggcagcggatctttctgtcttccacgatcctgaagcccggacagctgaaatgatcggtcaccttcaccttcccaagctccagcccggcagtggcggtcacgatcttaaaaacagaccctggttcataagtatcattgatacatgtatttctccacatctggttcagaagttcctgtctcttcttccctgtggtcttgtcttttttgcctttcagcttaaacggttcatttaaattatattcaggagtattgaccatggcatagatttctccgttttggggattcatgatgatcatagacaccctcttggctcccttttcttttctgaccttttcacatgcctgccatacataattctgaaggtttacatccagcgttgtgtacaggtcattccctgctacaggctcatctctttcctcataggccccatcaatctcccgtcctccgccgtcggtgagtgtaaggattcttcccggggttccctgcagataggagtcatacgtcacttcaaggcctacgatgccctggttgtctcctccggtaaaacccaggacctttgaggcaagatcattgtacggataggttctcttatagtcctcatccaccttaaccccagccagctcgtattttctgatccggtcagctacatctttttctacattacttttaatcttttccctaactgaatttttataaaccttttttttgatttccgccttgtctatctcaagctccctggataggacggacacaattttatccttctgttttgtctgggaatggataacggatatggagtacaccgccttattggaggcaatcttcacgccgtttctgtcgtaaatattccctctgggagctttgatctcccgctccctctgatgcagatcctttgccagagccagatacttatccgcctggcctatcataagatagcaaagccttccccccacaaagatcaggcagaatgcaaagatgcctcccattaaaagcatccttcgtttataacttgttttcatacaaaactccggaatctataatggtaaaatatatgacaaacatcgaacaagtatgagtttttctccattgtttccagtcggctctggaaaggcctccttccaacaatgaagaaaaactcttagaggtggcgccttttgtcttgtagcagcctgctccagcagacattacgtccattttcaccagttcggaggccttgcattcgaagggtcgttagtttttcttcttgaagcaaagactcggaggcaaggaggttcgattcactaaattctcgcctcgcctctggctcacgttcattaagttccttcgaacgaccttcgcactaagtttagcctgcactttgtttgtcttcactaagtgctctaggtcagcgtcagcgagttccgaacgggccgccggagagactttgctgaaagttagaaaatcttacgtccctgagacagcaagccggagaactggtgaaaatgttatttggttgtttttgggacattcatgtcttttaaggattctttcagcacgtctcttgccatctccactgccagtcctgtgttgagctgtgaatccttctggatttcatcgatcaccacatagactacgacttttgggttttctaccggggcaaatccgcagaaggagacaatataggtttttgcacttctggggatcttctgggctgttcctgtctttcctcccacgctgtatcctttgatctgcgctttctttccggttcccttttccacggtctccttcatataagaacggagctttttggaagtgtccgcggagatcgtctgttttaccagctctgaatttttattgttcagcacatttccactatcgtccctggtctgctttacaacatgaggtttgtaatagtagcccccatttacgagagaactgaaggaagatgccatctggatcatggagcagttgaatgtctgtccgaaggaactggtcgccaggtccacattggtcatctcatctgcactgtacaaaagcccggaggtttccgcctccgcagggaggtcaatgccggtcttcactccgaaattaaaatctttctgatacttggcaaatacatttttcccttctttggccgcaatgtccatcagagccacattgcaggaatatgcgatactgtccgaaagagtaaggtttccgtgtccctcctgatgcgagcagtggattttatgctttccaacctgcttgtagcctttacagtaatatgtctcgtttccttttaaaatcccctcttcaagaccgcctgccactgtaaatggtttgtaggttgatccaggctcaaaactgttggagacgatcggatttttccagatttcattaaaagccttaactttttgcttctcagacatcccattgatctggctctgggtatattttgatagcagtgccttgtcattcctgggattttccaggtcataggtgttggaattagccatagccagcacttccccattgttgggatccatgaccaagatggaacttcccttgctgccgtattttttctcaaacttggccagccggtcttccgctattttctgaatgttgatatcaatggttgacaccagtgtctttccgttttcaggatccacaatggaatcatcctgttccagctcttcatttaaataggtatacttccttccgtccacaccgatcagggcgctattgtaatattgttcaatgcctgttgtacctatacttccgtcggacacaaacccaagaaggtggctcgcaagacttttatttggatatcttctcacatacttctcagaaaatgtaattccaacgacctttttcccgtctttggatttgagataatcctttaagtccgcaaccttactgtatttcatgtcctttttgtaaacagaataataggaatccttgtggtccttcaaatactccagcaggtcatcccggtccagattcatatatttggtcagcgcgtttaacgcatttttctgtgtctgctctgtccgcagaatatttttcggctccaggaccaggctgtacagcttttggctggtagccagggtattaccgtttctgtctaaaatatctcctcttttatatggaagagtctggctctggtaattctgctgggccaggaccttctttttatatgtcttgtttttcgccacactgaaataaaccagccggcccacaaggcctataaaaagaattgctatgagagccacaatggacaacgtcctgactctcatagcattgtttattctttttatctttttatatttttttttcttcaaaaacaccgctccttacttcgaatcaggtatcttattgtattgtcttacatagtcaacatttttactgtcatatgcaattaccttgttctgcgcaggttttttcatcccatattttttcatggcagtctcctggatcgcaggaagattaatgctctgttcaatttccagattcaaatcctcattttccaccatcagggtgctgagctccgatttttttgccgagaccacggcacgctggtgttccagtttcgtctgttccgataaataaaagaaactgaccactgcgatcactgcaattcccgccgccagggccctaataaatgcaaaatcaaactccagagctttattctgattttcctttgtctgaggtgttgtctttttctttgtgcggactgccggtttcttcttaggctgtaccgatggttcatattcaggcctcgccggtgctgcttccattttccgtgcagtgcttccgtaaataaattcatatcgttcttgtcttgtcttattcacttggctgttctccccctcactattttctctcaaacactcttaactttgaactttttgctcttttgttccttatcaattcttcttctgtaggtaaaatcggctttctcgtgatcaccttgccttttgactcatttccgcatgtacagattggaaaattcggcggacaggtacatgggttttcattttttctgaatgcccgttttacgatcctgtcttccagtgagtgaaaggtaatgatacaaagtcttccttcggggtttaacagctcgatcatctggtccaggcttgtcttcagaacatcaagttcacggttgcactcaatccgtatagcctgaaatgttcgcttggcaggatgtcctcccacagcccttatcttcatcggaattgcatgtttgatcacctcaataagctgccctgttgtctcaatcggtgctttttctctctccgcggctatgtgcttggcaatattcttggcaaacttgtcctccccatagtcacggatgatatgaaacaattcttgttcactgtattcattgacaatgtctcttgcggaaaacgactgtctctggtccatcctcatatccagcggtacatcctcccggtaggtgaatccccggtccttctcatccagctgaaaagaagaaacgcccagatccagaagaatcccatctacatgtgaaatcccaagatccctgagtacattcggcatgtttacataattgtctctgactatggtgactttatccttaaacggcgcaagccgctttgtactggccctgatcgcatcttcgtcctggtcaataccgatatatcttccctcatcagagagcctgctcaaaacatggtaagcatgtccacctccgcccagggttccgtccacatagattccgtccggttttatcttaagttcccttattgtctcatccaacaacacagatgcatgttcaaaatccatttgtctttccttccatttagatattcaaacctagttcctgcatacttccggcaatatcgtccatatcgtcataagcattatttaaaagccattgttccttactccatacctcgatacggtccagcatgcctgtaagaactacttccttatccatctgtgcaaattcacgcagtgtgcccggcaccaggatccttccctgcttgtccagctcacaggtggatgctccagctaaaaagaatctggaaaacttccgcgcattcttatcgattagaggcaggccccggagtttctcctcaaaggcctcccactctttcataggaaacacgaataggcatccatccaatccctttgtaattacaaattcactgcccagggcttccctgaactttgaggggattatcagtctgccttttgcgtcgattgtgtgattgtattcgcccataaacatggtaatcacctaccgtttccctgatcgggtgcgctccacctggtgttcaagcgtgacactttgtggtattttatacccactatccaccacttcccaccactactgtttccattctaatggattgttaacaaaaaatcaagaaaaagaaaaaactgtccacagaattccttctgtgaacagtttcttttccacaaccttaatgttttatttttctccactgatagaccagcaccaacagtgctccaatggccagaagtgccgcaaccacctgggatacagcgatctgcgtaccaggaatcagcagttggtctgtccggagtccctcgatccaaaaccgtccgatcccatatccaatggcataaattaccactgattctccatcaaacttcttgcgcctggacatgatgacaacgatgatcagcactgccagattccacagtccttcatataaaaaggtaggatgaacctgaatatacgtattcatgtggttcccactccctacaaagacagcctggtcatacagccccgtgtccacgatctccgaaagcctaccgtgcttcacgaagtaatccgtgggaatctgcatagccagaggaccgtctgtaaatcctccaaaagcctccctgttgaaaaaattcccccaccggccaagaatctggccgatcaaaagccctggcactgcgatatccgcaagcttaaaaaactctattttctttaccctgcagaatatcaccatggtgataaccgacacaatgatcccgccgtagatggcaagacctccgcttctgatattcaggatctccgtcaggtgattcttataataatcccatgaaaagattacatagtaaagtctcgccccaatgatcgccggtatgagtacgacgataacaaagtcaaacacaagatcaggattgatcccgttctttttcgccattctgctggcagccagcattccgagcaaaaaccccagggcgatgacaatcccataatatttaatctcaaatcctccgatcgagatgccctcccctacatgtttgagtacaatacccaaaaagggaaatcggatttcattttccatgttaccaaactcctttccgtcgtttcatcttatcccattttccttttcttttcaaggttcttatggtagacttgttttatcatattttagcggcttgacggctgagtgcgccaaatgcggactgccaaaggcagattattttcttaagcatttgcgggcatcctgcccgaagagctttattatacgcaaagatagtagaaaggaatcaatacacaatgaaattaggtatcgtaggattgccaaacgtaggtaaaagtactttgttcaattctctcacaaaagcaggcgctgagtctgccaactatccattctgcaccattgaccctaatgtagggatcgtaactgtgccggacaaaagactggacgtactgtctgaaatgtatcactcaaagaaggtcgtccctgccgttatagagttcgtggacatcgcaggcttggtaaaaggagcttccaaaggagaaggtcttgggaaccagttcctggcgaacatccgcgaggtggatgccattgtccacgtagtccgctgtttcgaggacgaaaatattgtccatgtggacggatctgtcagcccgttgagggatatcgagacgattaactttgaattgatcttttccgacattgaggttttagacagaaggatcgcaaaatccaaaaagggctccagaaacgataaagctctcgcccaggaagtagagcttttagagagagtcaaggcccatctggaagacggaaagcttgccaagacatttgagacagctgacgaggaggaacaggccattttggattcctgtaatcttctgacgatcaagcctgtcatttttgcagccaatgtctgtgaagacgatcttatggatgacgccgcttccaatgagtatgtaaatgaagtgagagattatgccaaagatgtggatgcaggcgtttttgttatctgcgctcagatcgaacaggaaatcgcggagctggatgatgatgagcggaaagagtttttagaagatctgggactcagtgagtcaggccttgacaagctgattgccgcaagctattctcttctcggtctgatcagctatctgacatccggagaggatgagacaagagcctggaccatcacagagggaaccaaggctcctcaggcagccggaaagatccacacagactttgaacgcggcttcatccgcgctgaagtcgtatcctatgatgacttggtggaaaacggaagtatcactgctgcccgtgaaaaaggccttgtcagacaagaaggaaaagaatacgtggtacatgacggggacgtgattgtatttaagttcaatgtgtaacattttccacataatttccgttcggctcttagaatgtctcactccaatcatgtgaaaaaaggataaaatatcttctggagaatccagaggatgtcacctgtgatatcttttcaaaaaggagggaccgcagtgtttcacaaatgtgaaacactgcggtccctttagttatatgtaaataatcttctctcgcttagtttatgatgcgcactgctttgcatggggtacggtatcccatgctggatactttgatgcctccgcgcggatatggtgcagagttgctggcgtggactacctgtccatttcctatgtacattgtcacatggttgatccgtccgcctcttttgtagaacaacagatctcccggtctcacattgctgacggagatggtacgtccgtcgtttgcctgggaggatgaggtcctgctgatgctgtaaccgaaatgtcccagtacctgctgggtgaatccggaacagtcaatcccgttggtcaggctgtttcccccgtagcggtatttatttcccacaaacttcagtgcatagttcactaccttctggcggctggtacctgaagaactgctctcgctgtcctgggaagaggatgtctcccggctgctctgtgtggaccgctccgtactctgggtgctctctgttgctttcggtttagacttcttcaccgttgacttggcattggtaaaataataccggatgctgacatagtcctttgcaagatagcctttatcaccgtctgcttttacattgacccagtctgcactttctttcaggatcttatagctgtcattctttgagaccagggtcagcaccttcgctttggtagactgtttctgccttactttcagcgtgtctgctttcaccactgccttcttcggaaaattatgctccttggcatacttgtgaatgttatttccccagatgagataatcattcttaacatagccagtcactttcccggaacggatctttgtccactctctgcccttttttaaaaccgttccgatgtttccctttttaaactttcctacgaccaggctggatgtacttttcttcttcctgatatttaacactgaacggacatccggcgctgccttgccctgatatgtagaacttgtgtattctggttcctcgttctgttttttagcctcggtctttggttttgcacttgttgtcttctgtgctgcggtagttgtggatactggctgtttctttacttctgtgatatgttttgcctgggttgtcttctccgccgccgttgtcctggctgtggtctttgttgttttactgtttggcgctgcctttttttgtgatgcagaactgtctgatcctgtgtactcttccatggctgccgcagagcctgcaagtccggtctgatactggcttgccttcgcatctgcaaacgtggaaactccgagaatgaatgccagtgacagtccggctgtcatcgtcccctttgctattatccgcttcatatcccttttgtgtctccctctccttccagtgtattgtgaacatattacaatattattgaaataaatttaacacattctatgcagaatgtcaataaatcgtcatattctcacaaaactagatgattctcgatgaaaatcgtaataaacaaaaaggaccatgtctctggcgctgacatggtcctctcatatgatctatatattcttgatccgttcaatagcttttacggtattttcgtagtttccaaacgctgtgagccggaaatatccttcaccgctcggtccgaatcctgatcccggtgtccccaccacattcgcctgctccaacagatggtcaaagaaatcccaggaagacattccctccggagtctttaaccagatatatggtgcattgactccgccggacacggtatatcccgcttcttttagtccctcaaagataacttttgcattgttcatatagtagccgacctgttctttcagctgggcttttccctgctctgtataaacggccgctcccgctttttgaacaatatatggtgcaccgttatattttgttccgtggcgtcttgcccataaatcatgaagttttacatctccgcatttcaaatccttcggaaccaccgcatatcccaggcgcaccccggtaaacccagcgtttttggaaaaactctttaactcaatggcacaggttcttgcgccttcacactcatagatggtgtgggccacatcatcttctgaaatatatgcctcatatgccgcatcatagatgatgaccgccccgtttttgttggcataatccacccagccctgaagctggtcttttgtgatcgtagaaccagtcgggttatttgggaaacacagataaataatatccggcacttcctcagggaattccggcgcgaaattattctctgccgtacacggcatatagatcacatcgctccatgtttcactctttggatcataggttcccgttctgcccgccatgacattggtgtctacatagaccggatagaccgggtcacagactgcaatcttattgtcctttgcaaaaatctcctggatatttcctgagtcacactttgcgccgtcgctgacaaagatctcatctgcctggatcttggctccacgtgatctataatcaccctccacgattgcgtttcgtaaaaattcatatccaagatcaggcgcatatccatgaaatgtttctgccgaagccatctcatccactgcaccgtgaagtgcctcgatgattgccggagccagaggctgtgtcacatccccgatcccaaggcggatcaattccttatccggattggcttcttgaaatgcattaacctttttggcaatggtagaaaacaaatagctgcctggtaactttaaatagttgtcgttgattttaaacatgatgtcctcctaatatttaatatgtatatgaatcccggatcatttttgccatctcaattaatccgaccccgctgttcatactgcggcgctggatgtattcgtgggcttcctgctctgtgatccggttatttttcatcagcagtgccttaacttcttctataatctccagttcttctctggtgcgctgtctcggtttatgcttcttttccttttgtctggccagcatggtgtctaccacctgtctgaccttttctaacaaaagctggggttttaacggcatgggcagatattccatcccctgaagatcaaaaaattcaagattcgtctggggagccaaaacgatcattttaaaccctgtcgggagatattccctcagttcactgctgaccatgtcaacaaacttatagccgcagacaactagtccgtcttccagactctccgcccgctgcataatctgggctcctgtaacacaggcagccgtcacttcaaatccatttctcacaagcaggttacggatgctccttgcctgttcttgtttcgggaaaagaacaaaaatattaaccaagcttcccacctccccgtatgaatgacgcctgccttctgccggttaaatcttatacaaatattcatcaatttcccactgggagacagtcttttgataggattcccattctccctgttttgcatccagataccggtcaaaaatgtgctgtccgagcacttctttcataaactgactgtctttgaacaggtccagtgcctccttcatatcccttggaagggagccaataccggccttaagcttagcccgttctgtgacttcgtattgattcttcgtggatgcttttcctggctggagcttgttttccaatccgtcgatccctgccgccaggctcactgccagcgccagatatggattggccgcagaatccggacttctgaattccagacgcgttccgcttcctctggcggtcggcacacggatcagcggactccggttggccggagaccaggagatatcgaccggagcttcatagcccggcacgatccgtttataggagtttaccaaaggattcgtgataagcgacatctccggtgcatgcttcatcaatcctgccatgaaatgatatgcctcatcgctgagacccagatcacctctggaatctgcaaatatattctgtccttctctccaaagggacatgttcagatgcataccggaaccgtccacgccggaaatcggtttcggcataaagcttgcgtaaagcccatggcgcttggcaatatactttacaacaaatttaaatgtgagaatattgtcagctgtgcggagcgcattgtcgtacttgaaatcgatctcgtgctgggccggcgccacctcgtggtgggatgcctcgatctcaaatcccatgttttcaagattcaggatcatatcccgcctggccgcctctccaaggtctaacggcgccacgtcaaaatagctggccttctcatgggtcagtgtggtcgggcatccttcctcatccgtatggaataagaagaattcgcactccggtcctacgttaaagttatacccgagcttcttgctcgttctgagcacttttttcaagatatagcgggaatccccgatgaatggaagcccgtcctgcccgtagacatcacagaccagccttgcgaccttgccgctttgggaatgccagggaaatataaggaaactgtccaaatcaggatacaaatacatgtcagattcttctatccgcacaaaaccatccacagaagacccgtcaaacatgcacttattatccaatgccttttccagttgtcttgccgtgatcgccacatttttcagtgttccgaacacgtcggagaactgcagcctgataaactgtacatcattttctctaaccagatctatgacgtcttgcttcgtatatcggtccatatcatcactcctcttttcttttttggcatacggcccggaatccagcctttgcctagttataataattttatcaagtaacattttcattgtcaattcaagaacatcacacgcctcatctaaaagaataataaaaaggggcacctttaatagacttaaaggtaccccgttgtacgtttaaatttgtgcgatgtccacaactgataaattttctctgcttcctgattccaggctggtcagcagagcatccgctgtatccaggctggtaagacaagtcacaccggtttcaatcgcataccggcggatcaggaatccgtccttgctgcgccctactccctgagaaggtgtgtctatgatcaaatctattttatcatctaaaatcaaatcaagcaagttgggagattcttcctccagtttattgatcggatgagcaggcactccattttcattcagcaccctgcatgtacttcttgtggagaagatctcatatccaagatccgcaaatcttctgccgatatccaccgcgtcgattttatcagaatccttcaccgtgaggatcatcttcttgtatttcggaagattgattcccgccccgaggaaagctttataaagcgcttcgttgtaatttttagatacaccgaggcattctcctgtggatttcatctctggtccaaggctgacctctgccccgcgcagtttctcaaatgagaacaccggctttttaatagcataatactcagattcatcctgaagacccggtttgtattccagatttttgatcttagctccggcgatcaccttagctgccaaatctacgatcggaatccctgtcaccttactgatataaggaacagttcggctggaacgtggattcacctcgatgacaaatacttcctcgtcacaaacgatgaactgaatgttgatcagtcccacaacgtgcagcgatttcgcaagctttcttgtgtattcagcgatgacacgtttcaccttatcacttaagttaatggaagggtagacagaaatactgtcaccggaatggattccggcacgctcaatatgctccatgattccaggaatgataatctcttccccgtcacatacggcatctacttccacttcccgtcctaccaaatatttgtcgatcagaatcggatgctcctgtgtctgacggttgatgatctcgataaaggaaatgatatcttcatcggaaacggcgatctgcattccctgtcctccgagaacataggatggtctcacaagaaccggatatcccagctcatgggccgcgttcagcgcttcctcacaagtaaatactgtcattcctttcggtcttggaatacaacattcttcgagaatctcatcaaataactcccgatcctcagcagcatctacattctccgcactggttcctaaaatcggaactcccatctccatcagagcctgggtcagtttgatcgcggtctgtccgccgaactgtacaaccgctccgtccggtttttccagatcgacgatgctttccacatcctcagcggtcagcggctcaaagtacagcttatctgccacgtcaaaatctgttgatacagtctctggattattgtttacgatgatcgtctcatatccagcctctctcaaagcccacacactgtgaacagaacaatagtcaaactcgattccctgtccgatacggatcgggcctgatcccaataccataacctttttctttttgctcagttcctctacttcgttttcacttccgtagatagagtagtaatacggagtgctggcctcaaactcagccgcacaggtatctaccatcttatatgctgcatggaggtcaaactgatttctcagctccttaatctcttttgcggtttttcctgtcagctttccaatgacagaatccgggaactcaaggcgtttcgcttcggcaagaagctctttgtccaattcccctgcactctgcaatttcttttccatctctaccagaacagcaatcttatctaagaaccaccggtcaatcttcgtgatgttgaaaatggtgtcatagtcaaagcctcttctgatcgcttccgcaatcacgtagattctcagatcatcgatcttctctaactctgacttcaattcctcatctgacatatccccgtagtttccgaagatcaggctgtccacgttctgttccagagaacggatcgccttcatgagcgctccttcaaagttgttgcagatactcatgacctctccggtcgctttcatctgagtcgtcagcgtcctctttgcatgaataaacttgtcaaacggcagacgcggcattttgacaacacagtaatccagcattggttcaaagcttgcgtaagtttttccagtgatcgcatttggaatctcatccagattgtatcccactgcgatctttgctgtcacctttgcgatcggataacctgtcgccttggatgccagggcagaagaacggctgacacgtggatttacctcgatgacacagtattcaaaactgtccgggttcaacgcaaactgcacgttacatccgccgtttactttaagttccgtgataatattcagggcggaagtacgcagcatctggtactctttgtcccctaatgtctgggaaggggccacaacgatactgtcaccagtgtggactccgaccggatcaatgttttccatattacatactgtaatgcaggtgccgttggcatcacgcatcacttcatactcgacttctttccatccgccgatgtaacgctctacgagaacttctcctacacggctcagtctgagtccattttccaggatcacctctaactcttctctgtcgtgggcgattccgccgccgcttcctcccaatgtataggccggacggcacacaactggataaccgatctcttccgcaaattctgcacccgcaggaatatcagttacaacccgtcccgccgcgatgggctccccgatcttttccatagtatctttaaattcctggcggtcctctgcctttttgatcgttgtggaagaggtaccgatcaggcgcacgccgctcttttcaagatacccgctctcttcaagctccatggcaaggttcagggcagcctgtcctccgagagtcggaagaatgctgtccggtttttctttttccacgattttttctacaacctccgcagtcagcggctcaatgtagactttatcagcgatatctttatctgtcatgatggtggccgggttggagtttaccaaaacaacttcgattccctcttcctgaagggcacgacaggcctgggttcccgcatagtcaaactctgctgcctgtccgatgacgatcggtccggacccaatgactaatactttcttaatatcttctatcctaggcattttttgctcctttcatcatttcaataaattcatcaaacaagtaagcggtgtcaaccggtcccgggctggcttccggatggaactgcacggtacggacattcttgtccttatagcggagcccctcaatgctcttatcgttgacattgatgaatgaaacttctgccagattctttggtacactttcttttttaatgacatatccatggttctgggaagaaatataaacgcgtcctgtcgcaagatctttgaccgggtggttgccgccgcggtgtccgaaacgcatctttctcgtatccgcaccgttggccagggccatcagctgatgcccaaggcagattgcaaaaatcggtacctcgctgtcgtataatttcttgatctctttgataatggacacacattctttcggatccccaggtccgttggacaacataatcccgtccggctggtccccaaggatttcttctgctgtagtaaatgccggataaactgtaacatcgcagcctctcttatttaaagacttcgcaatattgctctttgtgcccaggtctaaaagggcaaccttcagcccgtcccccggaaaatgctctttttcatttcttgttacagtctttactgcgtcttttacctgatatccttttaattttggaaggatctcatccaaatcgtaatctggatctgtagtgatcattccacccatgcagccttcttctcttaagatttttgtgatcgctctggtatccactccctggattccaggtatatcattggcaataagatatgcctccagatcctgctcactcctgaagttacttgcagttcttgataattctcttacaataaaagccgaatgccatggctttacggattctgcatcctcaagacatacgccgtaatttccaatcagcggatatgtcatgacaactccctgtccctgataggacgggtccgtaagcacctccagataacctgtcatcgatgtattaaatacaacttcgcagatcacttctttcttggcgccgaaactttttcctttaaacacttgcccatcttccaaaatcaaaaatgcgtccatgaatctgtttcctccttaaaaatgtgcataaaaaaaatatatccaaaaataaaaatcacgaatccaagcattgaggcgcaggcgcagttcaatgcaatatgtggtattattttagatatatctctctacaaattgtaaaaattctatcacaaataaaaaccttttgcaagggtttttgacaattaatttgcgttttttgaaaaaatacagccgcagaagctttgccggtataacccatacatttgtgacagctctacagaacgtttataaccattctttttcttaaaatcagacggcaggaactttacatgaaactgctcctccatctcctgtccgatttcattgagccattgtgcgttcttcatcggacttatcgtaagtgtggtggtaaaataatcacttcccagatcccgggccgccctggctgcctctgaaagtctcagccgataacaaataagacaccgtttcccgccctccggctccttttcatatcccttgacagcttcataaaactctttgggacgaaactcttcttttataaaggccacttcctccgggaattccatctctgagatcaggcgtctctgctcttcggctcttttttcatattcttcttcggagtcaatgttggggttatagtaatatactgtgatttgaaaatactttgagagatattccaaaacgtagcagctgcaaggagcacagcagctgtgcagcaaaagagaaggcctctcatcctgaagcccttctatgatacggtctaactttttctgataattttccttcatcatttccactcctgtcttttattatacacgatttcctacctaattcaattaagtacatcaaatatttacaaataacatttggtaataaaattctattgacaattcattcaatctattttattattgtattataacattaatacaaacaaggaggcacttatgggaaagaaattagttgcaccgatcattataactattttttcactttgcttcatgctattttattatggcctgatttttgcttttatccctctttcattctggataaaagcattgatcggtattctgcctctttctcttggcggagtctccatttttgtactcgttgagcgaataaaagagataaggagtggtgaggaagatgatcttagtaaatactgattacattacaggaaaagaattagaaatgatccagctggtaaaaggcaatacgatccagacaaaaaatgtaggaagggatatcacacagggatttaaacatctggtaggcggggagttgacagcctacactgaaatgatgaacgatgcccgtgctttggctaccaaacgcatggctgaggaagctgaaagcctgggagcggatgcggttgtcaatatccgttatgcttccgcggaagttatggccggggccgcagagatcatggcttatggaactgcagtgaagtttaaataaaaagatgccctggctttatagccggggcatctttgagctaatcctctacttttatagatgttagtatgtcctcaaactgctttttatactcagaatcctgataaaacatagataaagcaataagcttaccatctatattaaaaagaaaaccttggtatttcatctctccattgtcattttctgcgtcaaatgaaatgtactgtccttttaaatcattcactgtcttggctttagcttttaaatttgatttatagtaggggttgtttgctttgacagattttaaataagcatccagattttcctttttattaatatctaaattgggcaaatcaactgtctctacttgaaaagtaactacaacctttcctctttcttctttctgaaaagcaccctctgcttcttcctccattgatttccagctctttggaagtttatagaccagatccgttccttccacactgtactgttttgtttcctccctttttgttgacttctttgtcccacatcctgccatactaaaaactaatataaatacagttaaagctaataaaacttttttcattctctctcctcctaaatgaattgttttaaagttttgtaacttaattacacattaattatacttatattactgcttttattcaatctttttcgtgcaattttttccatatcctcacgctggtgtctacatcatccaaagcattatgtcccatcccttttttcgtactcaattgatctctggatttcaatggatcaattcctgcgaaatagagcatactgctcagatctagcaagggataaggtgcatcccattgtctccgttctctgtctgtctcaacacatttcaaaaaaagcctagtctctactggaaaaggaacatcagcgatacaataagttttctctttatatttcatccaaaaactccaaaagcaatccagcaactcttcctcagtctcaacttgttcataatctccaaggaccggaatcacattttctctcacccattgggttttaatctctttctggtctatttttcttcctatatagagagaatctatttcctttcctgtttcatctatgacaattgacgctactgtcaaaaaggaaccatataacccatctgtctctgcgtctacaaaaaaataacgaataggaatcccccttcctctgcgagtatcgatttcacatattcaatttttataataaaactatttcatgcattttgcaatcactttacatagatctggcatatgaggcattaaagttacaagcaatgctagaaaactaacaaaaagggcccatttgttccatctaaagccttgattaatactagcggcttcatatgcaatgttcatttgatccatcagcatttgcttttctttttcaatatacagtgcttctgctatcatgtcatacagttctattccctgttcctggcatgtcacctcaaaaaactgtaattgattttgaaaagcaatataatcttcctgtaaatctgttaatttctttgctgctctacaattcaatatgaacttatgttttttcaacgcatttgaaaaagctgcgattttccgctgaaatgatatgatagaacatctctgtgcaaggcataatgtgaccatctccgtataaatgactaagaatggattaacaactggggcatctatgtctttgtctgttgttgtcatacaaaagaacgaatgatgagtaatcgcataagcagtcccgtattcaatccagcgatcatataattgtttgtttaaaatttcttctctcatccgctctgtcggacatgaagttttatcttgacgatccacaaaaatcaattcatacaactcttgtttaaattgattgcatcccgctgtttttattaattgatttccactgccacaaaatttttctttttgaaggcatttggcaaaataatcatcccggaccaggcatgtcacgtacatcctatcatctaaagcagtagccagataccacttttcgcctgatgaatatttttgatccgtaaactttttttcggcctttttataattcagtatatcaataataaaagacgctatacaattataatttgcatatttatgttcatgtaagatttcatggctgcttccaaactttttacgaaaatcaaaactaaaggttcctatattctctatcgacacagaaagtaagtctgcacatatatctgaatccaaaaaaggagctgtgattcttcttccgtattcattaatatcttttacctctttaattgaaccatgttttctgttctcacactcaaaaattaaaattccaatgccagaattaaaaatttttaattttattgaatatagatccagttcatatacttttttaatcatctcattgttaaatttttcagtttttttaatagtataacacgcttgttgtctcacctcttttgtacagaactgataattatgtactacttctgagtcacctccaaaaatagcctgacagactggagtatgaaaatactgataagcctgataaagccatatccgacttttttcgtcttgtaaagcaggcgttgtatttacatttgaaaagtcttttatatccgttttatcccaataatggttactgtcaaaatatgatataatttcttcttgttttacttttatcccttcccatataaacggaaaatagaaagtatggtagctatatacttctttttcttcattcatgatataaccccctgctttcaaataactttttcatttcctctccttgatcttccatattaaaaatagaaataagttttccagattcatttatttctcttttcatccttattcgtattttcattcccacatgaaagaagtcagataattcgccctttgtcttttctacattcaaaatatttttctttttgactatagaataatttgcttctccaattctacactttaattgtcttccctggacctctatgacctcagctgaataaaggtttccaggttttaactcaattttgtttttaaccggcaccatagatccataaccaagatttgtctttgccccaatcccaagttcacacaaaagcttctgatacaaatccttcctgttcttttctgaatcttcaatcttacccccatcgctcattcttatgttaaattcaaaggtaatattaggccgcactttcagtatcgtagtgattgcctctggtgatttaaaaatactctctgccggatttttcttattgatatgaggagttatattatctgtatctataaactttcttccacattcttctgcttttgtaatataagcatcaaaaaataaatccttttctgcaaactccttgtccaaatccggttcaaaaacctttttctcaagctctcccagtttctgttctcctccgctttcatactcccacccaagccatttgcagatttcttccggaaacttcttaaatcctgatcggataattcccttaatcgtggatcctggaatatatggatatccggtaacatagtccattgacattcccatctggatatcttcgttttttccttttgttccatgtgcgtttccaatccctatcaacaggccaggagaacaggttttcagctgaaaagacactaccccatgtaattgtttcaattcgtcataactgttcgtatgctttttgaaatctgagtcaactaatcgatctttacatgtcttcatttgatattcagcttcctcatcagtttttaatagacatttataataatcaacctcaaataaatattgaagattactattcgttttctcccccattatctttttctcctatctccgcatcatccttcagtggatataaattcattgccagctttaatgcaatcgaataatttatgacttgttcctttaatacagcatatgtttcacgatattcaagacccttacatcctgacaaggtctcctttatatattcccaaagagtgcaatccggttgatccagcttttcctgttcattgatcattatataaatagctttcatcaactttgtccggtctacggctgcattccctttttcactataaaaagagactgcggaaattaaactgcccattgatatggatgccccgaaagctgagatctgagatttgtatccctttaagatcactggttctccatttatttcttcgacaatacctatttcattcaaaacatcataagcccgtgaaatggcctgatctacctttctcttattcacttctgtactcccccttctaaacacgtgatcttggtatatccatatcccacagaagcacttcctccaaactgtactatgttattggtgacaatttcattgaaataatcaaatttgtcacagtcatccgggtacaataccgtcatataaaacaggctctcatggggtacgatctgctcgtaccaaagatttttagacgttccattttccagacgatttcttgcaagaaccgggagatcaatactttgaaagatggatgaggatgcgatagcaagattatcagttagttgaagttcatctgggaacgtattatttattattttcttaaccggatacccttctatttcgataatttttgaagattccatgaccgcaaaatcataaccattttgaggtatttctttaaacaaatctttctcatttttttgagatccaaatatcttcatatgttctataaaggaatgcaggatttcattcgtcgtcaccatcgcatatgtagcttctccgcatgacactctcataggccttgcaagcagctgtgcctgcagaaatttaaaatgtccttcttttacaaccggtccgccaaactcattgccaaatatgtattctattatttccttgctgacgtccgtctgtgtcctaaaatgctgaagcagagagccttttattcccgaagaataaatggcaggatttccggtaaccacatctttttctacttcattatctataatattataactttcttcaccatttcccacatgcatgtttgttaaacactttaataaatatactgctgtcttcatttgtcatcctcctctaaaaacaatagttaaaaccagcggcctgcagccccggatgctgtataattttcagcaattcttttttattctctgtataaatcacacttccggcagaaatcattttaaacaaagcctcatcctttttaaaccgctcccggtaactgatattctttccatcctttgttgtcagtccccggtattctactgtctcaatcacagaaaaatcctgcagtcctttgaatttttcatcaaaatgcggcacatatgcatctgatataaaatatacaagcttatttatatccgtttgagcaaatacattttccatattcagatactgcattagcccgttctcttctccatctacttttaagaacgttacctggaacatagatttcccctgtcctatataagccagcataggtttctgttgtttccaaagttcggcttcggttttaacaaaacatccaaaagtaaaacactgatcttcggtttgctttaaatatttataaccttttttaaaaaagccagagttatccgtaccggcggctgttcctgtctctgctttcttaattccaaccctcgtatctgttccaaacaatgtatcatgcaatattttctttccagaatcaagatctacaaaatcctgtgtgattccttttttcacatcaaacgtttctggaagttttatacagccttccgttgtctcgtaagccgtctctgataactgaaaaggtgaatatattaatttctcattgtcgtgatttttaggcattggcagataaattgattttttatcttcctttttgctttgagcatggataaaaaccggggaaatccccaggatctttccatacctttctggtggatcctccaaagaaaaacttcgttctccaaccaactggttattttcttctttttcttcttgagtataatcaaaatcagattttacgtgttttaatccaagatatcttaatgttcccaatattgtagattgggaaggcatttccttcgactcagcataatatctgatattccctttatcaaatccaaaggatctttcgttccccagaaaatacggctctatgggatgaaataaaactttataaactgccactatgcatcacccctttcttcctggtaaaatttcatgattcggataatagcatctaaacattccagagcctcttgcttattctgattcaaacttacaatctcttttttcttttccagattataaaacaacattgtaatgtctcttatatactttctttcttctgtaagcgatgcctccatatcatccttgcccttaataaaaatacccctatgtctgtttgaaaataaattttccaccaaattttgtaggactttttcactatctcttttactgctcttttctaatgccatttttatttcctgttcatgcagggcaaatttttgtgtcaacgaacgcagaaacttctcatctaagttcctgatctcatgaaacaattcaagcatccggagataagtttcattcttagagaatctttttataaaaatcccatttgcctgccccgaatgtttcatcagctcaacagcaagtccgtgtttatctccttcctttgccttcattaatagcatataggccctatttagactttcatacaatggataaccttcatgatggatggcaaccccaaaagaaacagatagtccagaaggcattccatctccatcctttaaatattctttaaattccgttttaaagactatatctaattcctgtatcaggtcaaaaatagtatcctgctcttttccctccaaaggtgccagaaacagtaaatcatctcctcctgcataaatggtaactcctccatatttatgaatcctttctgccgccttttttgagtatcgaaaacatgtctttgaaaattcccggatagcaggatgtacttctttttcttgagaaaaatttattatatttcttagtatttttgttaaattatctccatcagactggacaaatgcataatattgatatttcttttttttgagtttttcagcgcccacttcgtttttcgcaatatcggagatattcttaatccttccattttccatcagctgccagttatccccctggactgcatctttcacaagaaaactttgttttatatagaagttcttccctttctcactgtcaccatcctcctttgccttttcattcaacattccctgattcacaagcatttttaatatgtagttttcgttttccttcgtgttgacagttttcatcaattccagcgcatccaatagtttccccagctgaagaatcggattatcattttccatgacggatgccttgactgcatgaatctgcaggcagctgttcataaacttctggtacttttctctctcctcaggatcacctttaaggttttcataaaattgatctgccactttagtttttatccactttacggaatcctgaactactttcatttcgccggcttttgctctaaaaattatacggtcatgaaaaagtcccacaccctgcgcttcctgccgtatttgttttgtttcctcatccactacagggcagacaaattctgtttcttctatcccagctgcaatcaatttttctgttaaatttcttgcaatatatgaaaaaaaataactggctccccaaagtcccgccggagatgatgataacatcagagtatccacaatagggccaatcgtgattcctatgtaatctgaactattttgtatttccatcagtttatctccttatattaatcaattttttctagtttaaattgttttttgtttttactataggaatccagcatatctctaacatcatactgccctttatcaggtattttagccacgaatttattctctccattttgaaagatgatctctaaagaatctgctttttcctggagcttatggacagctttcatatcaaacaataaatatacatttttatagtcgattgccggaataaaacggatcggagaaggaaatctaaattgaggacgctctgttccattttcagttacttttagcttaaaatcaccttttttaggacggagataggagtaatgttctgcaaatccaagtaatcctctgatataccatatttgttcttctccgtttagtttttcattttttaatagcatatccatagcatttttttcatgtataatgttacctctttccttataatgatattcatccagcataaaagatggctttccattcaaaccactttttatatcacagttaaaattcttaatcaaatctaaacattctttgtagcaactttttgttccttttaatttgtaaagctgaaatctaggattctctgagcaaaggaatgttttcatatatttcttgatcaactgatcttgcaaatgtttattttcttttacttcctctgtcaaaaagtaaccataacctttatcctgcctgaatccaaatgttgtggttgccaaaaactccggaaaaacatgatggattaactcttttaattcatgatggctgcaaagaaattcaataattaattccgtgctatatgaattgaatctaggatcttcattggtccaaaagtatgcgccataggccgtatttttgtttctcttatatgtctttaatttatgttggtttttgactaacttaattctcaatttataatcatatgcgataagttccagttttctatcattatcttgcgctatccaactttcatcaccataagccaaccatttgtgtttgatttctttatcgttcttttgaatatactggcttatatatcgatctagtttaggtttcatttccgtagcacggacagtccttcccgactcatctttaaaatggattaacggagtcagctgccataatctgaattcaagcttgctcccatctaaaatacttccactcatcatcattcctcctcttttgaaaaaaagacagaaattgcacacttgcaacttctgtctaattttttggacgcagaatatccctattaaatttgtagagtttcattatattcaagtaaataggaatcctttttgtactccaatttattatacaattatacccacataaatttgagatgttctgatctatcatgtttatcacttaatccccatatcattctgtttacattttatacaggttacagcacattatttatcctgcacctcctacatccaacggtaattaacaaacccagctccgcgggcattgatctcccccagcccagttcccaatgtcatataactaagctcctgagacaattcattgtccgctactttgagcgcaatcttatcccccagcagctttatcttcttataggcaactgcgatgggcgctctgttctgtacttggatcattcggataaactcaaaatcttcatctatttttgtactgcaaaaattgttatatttcttaataagatttaccgtcagccttttttcatattcctccaacgaaaaaaatcccctccagtagcgttctgctttgacaatcaccggggagatagaataaatcgtatctataattttgtgtttcttgggaatgattttatattcacaggtcaatgcctgcatctcttcggaccgctcattctttaattttcctgaaaaaacttctgcaagtcttggatcaatcgtgcggatcgtgatcacatacactttgtccttcttatatagtttgtctttttccagtggatatgggttgccgaaagaataatttttgaattgatttgtctcatgaaattccagaagtgcttcgtctctgctcaggcaaatgtcgatcagcgcagccgtctttttttgaaccgtatctacaggtatatcctttaataaatatacctttaagcggacttcaaatacttgtaaatccactttcccaccccttccttttgctttaccctcatatcatgtgtgttttgatatgactcattagtttcctttatatatgaaccattctattgttctattttactatattttagaaggaaatacaacttattataggtttttctaacaaaatatatcattaaatcatattattagaatatatttaataatttcacatttggaatccagtcttcggggttgtccataaggtactctaaagtcgtttcttatctctcattatatctctaaatgtagacagattcaacgcttccgctcagatttcccggacaattagcttctcagtcatccgggaaatcaggcttacgttctccaatatattctacagctatttccggtcaaaataaggtgacttgccaagagcagaaagcggtatcccaagaacaattttaacctccggcccaagcaatccaagtgataaagctccctttcctatggaaaacatgatacggttatccactcggttcatggatgctgtgctgactgctgatcccaatgcaattcccagatcgatgggatcaaatacacagacactctggttctcgcggcatccctgacagtctgtctgattacaatacccgcagcattcattcagtcctctctgctgataagttacacctactaagaccacagcctggctttttcttaagttttctgcatctctaatataaaaatcctgcccttgttcttttcccaatctttctgtctcatccgcaagggctgaaagctcttctccggtgacaaccgccgtgtggataaaatccagccctcttgtcttcggtgcggttctggcagccacgcaaatctgccttgcggcctgaagtactccttccatttctaaatccttttcctcataaatcatcttcatatcctcctatttcctgcaattcttccaagatctccaacaggctctctacctgcgtttcccccagctgctgcctgacctctgcctggattttatcccacaagggttccgctttttctaaaagctcttctcctgacggcgtcaaaactaatctgcggtttctttccctggtcttagagatatcttttatgtagctgctcttttgaagaggtcttaagtttctcacgagagtactcctctcaagcctcatactcttagccagttcactgacacttgctgattccagctttttaagatgtgccaaagctgaatattggtttaccgtgatccccgcctcctttaaaccggcgtcataatagctggtcagagtattggctgcccgccgcagacgtatgcacacacatgcttcctttttcatttccgcctcctttccgtgtatatacaacaattatatttgaaaatccttcctttgtccagacattccttctaaatatgtttcttctatattaatataactataagcagctgccctatggttatattttcgactcgcccgcatatagtaaaaaaaaaggattttttaaatggcagacaaaggcaacttaaaaattcaagtaaactctaccattggatatgttccggtccggaatgctacaatatcgatttcctacacaggtgaatcagatcagattcttgagcagcttaataccaatcaagacggacagacggaagagattgcactggatgcccctccggtagaatacagtctttctccaggtgaaacccagccgtattcagaatataatctgcatgtgacagcacctgactacgagccaattaccatttccggagcacagatcctggcagatacaaacggcctgcagaatgttagcttaattcctctggaaacggcagctacgaactttgataacatcgtcataggcccccatactctgtggggtgagtatccccctaagattgcggaagatgagatcaaaccggttgatgaaaccggtgagattgtattaagccgtgtggttatccccgagtttgtgatcgttcacgatggggctatcggtgaccaaacagcgcaaaattactatgtccgctacaaagattacattaaaaatgtggcggcctgtgaagtttattctacctggccccgggcgaccttggaggcaaatattcttgcgatcatgtcctttaccttaaacagggtttacaccgaatggtacagaaacaaaggacacgattttactatcacttcctccacagcttatgaccacaagtggatgaatggaaagacaacatatgattccattaacagcattgtggatgagatatttgccagctatctgtcacggccaaatgtgcgtcagccgatcctgacccagtactgtgacggcaaccgggtgtcttgtccagaatggatgaccttatagtaatagcgtattaacttttttcttcctattaaatataaaagcccggctatacgccgagcttattttttattcttcgtcagtaatgataacagttttatcaccgttatttttaattgttattgctgccgttaaagggtcctttgaaattctatcctttgacaatgcgataatggcatcttctttctccattcccgcgctctcatttaatactttcattccttttttcttacacgcttcttttaatgcatctctttgttccttttctgtattcatataacctcactttcttataacaactctatactaataatttttattgttgtttctaatggatcgtcttttcgctcaataatatcaaacacatagttgatccaatcactgtcggttaacttgatactataagatccctccggaacgtctcctattccgtcccagatttcaccgagagttacttccccccctgttctacatcaggaaggttgttattgtattgatctattgtctgcgctttttctactatgctattcatttttctacctccatattttcttttatcttaacatgttttttgttcttattccacattgtcataaattatctctaaagccctgatactttttgattttaaatcttctgcacagaattgattttttgtctgaaattctaatatgccttttataagcatttttttatattttctatgatccataatttctccttctccgggagaaaacctctcccggtcagttattaaaaatctctatttgattgtcttaacaacccatgctgaaaatttttaccattcccgaatctagatttcccattccaaatccatacaaatccttctggtgcggttaatgctccgtttagtgcgctccatcctttcggcatttcgttataaactaaaacatccatttcgtttcctccctttttatttgatttattcgtttcctttactgtaattacattataccatacgtacgtaattaattctactgacattttgcacaaatttacgtacgtattgttgtttatttttattatgtacgtatagtctattatgtgatagtatgtatatgaaaggatgtgataaggtggcatacactaaggaacaaggaaaatatagcgttgaatacgcaaaaaagaaattgaaaagaatacctctcgatgttcagaaggagtattatgatgaagtaattgttaaagaagctgaaaaacgtaaaatgtcagtgcgggctttcattctttctgcaatcgaagaaaaaatcgaaaacaacaaataagcattgacattattacgtacgtatagtataataaaattagttaagggataacctttaacgaatcgccgggcaggcggagaaaggaggacaagatggaggaaatgacaagacttgaacttcttacccttctatattccatacaagcccttatggacaccgggaatacagaaaaagcaaaagagattatcgagaaggtaatcaaagaggctgaaaaacagcaataaaaaagccggcaatataccggctacatacgacaaataagagaagggcagtcctgtcactgctcttttcttaaactcattatatcatccacgctttcaaatttccatcatctttttatcgattccattttataccacattcgcgacacccaaacatatgtttacttttttacgatattgagatataatatcatcaaaaacaaatgttctattttcttatggaggtataatatgaaattgataaacatgtcagatgataaaaagaatttttggatctgtgctatttcagggacgaaaagatatgaaataaaagaaattcttttatgtaaacaggggaagtctactgatcattccggaaaaaaatataattatgtagaatacaaaatccgggttttggtaaataaatttggcacatatcgcacttataaagctagatacataatcagcaaaaatagttggtatattatggacagctgcgctgaactcatatcagaccaagaatgggcagcgaatagttatcaatttagataattttcgtttcttcatcatttgtatccatgattttccatgtcgacacatggataaatatgttattatatataaagtaaataaattacataggaggaagcataaatgagaagtacaggaatagttagaaagcttgatgagttaggacgtattacgttgccaatcgaattacggcggaatctggatgtggctgagagggatccccttgaaattttcaccgatgaggatactatcatattaaaaaagtataacccagcagacatctttactggtgaaatggataatctcattgaatacaaaggtaaaaaagtttcaaaaaattctatcattgaactaagcaaacttgctggttcaagtattgaagaataaatctattcccaggtgttttatcctgggaattttttagaattaaaaaaggccgggatccctcccggcctgatcctatctttttctgttcttgtacagcgccgtgcaggtcttctttcctgcatagctgcctttcttccagccgagttgccgccagtatgcttcaagtttagactgcgtcctgtgaccccagatgccgtctgtcacaatattctcgcccggaaccaggctgtttaatttgccttgcagccagcgaattgcatttttgccggaatccttttttaccgctgtgtacttctttgcggcagatttaacaccgattgcatttttaaaatcggaccagcatgaatttgttgcgccggcccatggctctgggcaggctttcccgtttacgtcccaatgtcgaattacatgtgatgctggaacgccatatttcttcattagaaatttgaccagttcgactgtctgctcccggacattccccggcaccttcccggcactgttgcacatctctatagacaagctgtttgcgttcgtgcattttttgtaataatttcccgctgccccagacgtagaataacacccacccacggaccaggccacccggtttactgctacagacttatagatgtactttccgccatcgacaaaataatgtgctgacgctcccctggatgcaccctggaagtatttacagttgtttaaagccgtatcgccgctattcccggtgtaatgtattacgatataatctatatcctttgtgcttcttttgccgccgtagttgcttttatgagcaaacttctttttaaattttaatgacatttgcttctccttcccgaaaagaaaagagggcgattattcgtcctctccctcctgatctttatttaccattttatccgcaacttcaagccctttaataaggattgcaggaacattaaatccagcttcaacgaaattctccacaatagatcgaatctcatttacaaggagtgacgccaggacaaaccatcccagtaatgtagtaataccaaggtcaactccaattacttttccaatttctataaacactgcactagatccgaaagcaaccataatcatcaaccagtatcccaacttctttaaaacacctttccacccctctgcagagttctcccttcctgccatacggcttttcatccacccggtaagccaatcaactgcattcagagcaaaaaaagcaacaaataaaatccagtgttctcctaatatatagcttaaaatcgccaccgccgctcctgtaaccgcattataagtatcaatgatgttgtttcccattttcttcatgtacctcactttcctttccaattatttatttcattattcgtttattgcataataaaaagaccgtttccggtcctgctcgtatctccattttccctccacgttgcgatatcgcaacaaaaaagaaccttgcggtcctaaactaaattcctatttacttcgcaaaccatcctgaccaggatccgttaattttaactcgtgtatataaacctccatttaaattccccatacaaagcacttgtgaatatcttccacctgccgcaaatactattccataataattttcttttcccggtacatcacaacctccatagttatcgtaactatttatgtaaaagataaaatttccattgttttcatcaagtgaatctattatttttctatttgttggtagtactttgtatggaagtgattccttaatcttatttaaatttaaatcagtactatttaaatccgcatttaaatcttcaattctttcgtcaagatttacaattgagtttttcaaactttgaatctctcctgcatgtacctgatattgctcgatgcttaccagacccacagagtttacatcaacctcaaacggtgctgtatttgaagttttgattacaaagtcccatgtgatagaaaaccctggtccctctgtcgcagaaggaatatgctttgcctctgaagcctgggcaagacaatataaaatttctccttcctccggatcctgcgcgtaaatgccaatctgccagagatcatacccttcttccaaacctatattctctaacaacactggaaggatagttttatctccttctattctaactggctgcaaggtaatttcttttccgccatctgtcacatttgtctgctgtctcaggttcaccacaggaactttggcacccccgctgaccacctttgtaatatgtaaagtttgtccgtccacaagttttgcctgcagagctgtccctttgtctgttaaaactgcattttcccaaatattcatgataatacctcctgatataaacgactgtttcacagaagccatccaaaaaactatggctatgctgcctttttatttctttagatcatgatctttataaaaaatatagcatagtgccctggggcaatgtgggcaagttaatgtagggacaattgagtttctaaacatatgttatgtaactaaatttaagtgataatacttctatacatattaaactcctattttttttagcagaaccctaaattgtttatcaaccatatgtgttgtactgttgcaataaacccgtatctctttaggatctagtatggtaaatagcctactaggatcatttgcgttattaaggccatatcccccacgccacgattcatataggacctctatagcaacaacaatacaattatcttgtttaaaacccgatggatattttagatttgtaaaaccagaatttgtaataaaagttcccgttactgttgtaaaatccgcagttacattatgtaaatccgcatttaattcctcaattcttccgtcaagatctacaattgaacttttcagactgccaatctcagctgtatgaacctgatactgctcaatattcaccagccctacggggtttaaagtaatatcaaatggtgcagtattggatgttttaaaacaaaaatcccatgtgatagaaaaaccaggaccttctgtagcggaaggaatatgttttgcctccgatgcctgggcaagacagtataaaatctctccctcatctggatcctgggcgtatatgccaacctgccaaagatcataacccttctccagttctttattttccaacaataccggaacaatcatcttatccccttcaattctacttggctgcagggtaatttcctttcctccaccggttacactcttctgctgccgcagattcaccactggaaccttcacagccccagtcatcacccttgtgatttgcaatgtctttccatccactaactttgcctgaagagctgcccctttgtccgtcaatactgtactttcccaaatattcatgttttttctccttttaattaataacaaaacctgcaagcaagaatataacatgatgcccaagggcaatgtgggcaagttctatttggggcaattacttccataaaagacagcataaaacaaagtggcaagccacttcaaccctccaacccctcacgcatttgtgtgcatagtgcccgcatggcttttttgttccatagggaggttcggggaactttcctatgtaaaaaagtgtcttcgacacttcaactcccctgcccctcactcatgaggggttaaggcttttcttttgtctctttttccttcataatagtcctatgaatatattacagaaaatcttttgtgaccattatgaagaaatcaaatatactctccatcctcgtccttctgtcatccaaaacattgaccgaatgcttcattgtggcgacccttctttcggtggtgccatgtatggatgctccaaatgtggcaacttaaagtttgttccttttcgttgcaaaagccgtttctgtcctacctgcggtgccaagtattccattgaccgcactacttctatggcttttaaaatcatcaacgtcaaacacagacattgtgtttttaccattgcagatgaacttcgctcttacttcctccaggatcgttctcttcttaactgccttttttctgctgtaagaagtgtcattctccgcatgttccacaaggataatcaaacagaattatttactcctggtttcattcttgtccttcatacctttggcagagatttgaaatggaacccgcatattcactgtctcctttcagaaggtggtctgggcaaaagtggcctgtggcaggcaaaatcacattttaactatactttcatgcgcagctcctttcaaactgctcttttgaatgaacttaagaagaaacttcctcattctttcaaagaagtggtctctcaggtttacaaaaacagcagggatggcttttatgtctatgcaaaaccaaaccgctgtaagccaaaacaggtgattaactacatcggccggtatctgggcagacccgtcatcgccacttcccgcattgatctctacaactctattgatgatacggtcacgtttcattacaaccgtcatgaagatgatcactatgtggaagaaactcttccctccatggacttcatcaaaagactgatccgacacattccagaaaaacattttaaacaagttcgttactatgggctttatgccagatcccatatagaagattacaaactccatcatgcgatccattcatcaatgcataaattttatctttctatgaacagatggcgggactgtatcagtctctcttttggatatgacccgattcaatgcccatgctgtaaccaaaaaatggaattgctcgaaatttatcataaccacaagcgcgttcctctcgatgaactttatcgaaaagccaaggaaaaatatcatggtccttaatctttactcccacagcctcctccgctgtgatatactgaaccaaacggaggacaatcaaaatggatccaaaacacatcgaggaactcagacaaacgtatatgcagcatccacctgaagggatgaccacgaaagacatcagatctatgagcgatgatgacttactggatatggattatttcctgcatgaggaggatgatcttgatgatgaaatcggagaagaaggtttttatctcttctaatccatttcatctgtttgccatgcccatcttttgatgggtatatttttttattctaaacacccctttataggaaacgacaagtttcctataaaggaacaaaaaaacagctcagacccttataaataagggcctaagccgtttcttacgataagctgatgacgggagttgaacccgtgacctcctcactaccaatgaggtgcgctaccacctgtgccacatcagcaagaccgttattaaatttatcatacacatcgaatcttgtcaatattttttcatatttttatgtaaaattctttctggtcattcagtctgagacagcctaagttttctccgtaagcgcacccacagtcaatggcgattctccggtcccacctagttatgtgaaatgccgccgcctgttccctggattcctccggcagatctttcgcataataaagcagcgcacctgtaggggtgtgcccaaagatgacggtatacggacaggacaattttgcattaaaaaactccctgcggatccataaaagggtgtcacggtccatagcagcaatctgttcctccgattctcccctggatacgtcaattcctgcatgtactaacagatactgcttcccttctaccgagatcatacggtacaggggaagattttttacaaactcaatgcaccgttcctgctcctccttcggaaaggacatcagggaagctaaagtgactcctcccccgttaaaaagccatgtctcataccaggattcctcatcattcatagttctcaacatcatatcctcatgatttcccatgagaagaaccatattcttctgccccctgatatattccagcagcttgatgccgtccggtccccggtccaccacgtctccgatgatatacagtttgtcttcggaggaaaactgaatcttctcaagcatctcaaaaaaagcccggctttggccgtgaatgtcagacagcacatagatcttctgcatgaatactccccctttaggttatggactttcttcccctaacttcctgcggatcctctggatcgcattgtcaattgattttgtcggcttgtccagtttcctggcgatttctacatagttctctccgctgagataaagctccatcacatctttttcaaatccgctgagtttcgtctcgatcttcttatagtaatcagatatattttccttttgtattagaacctgttccggattcgtatcctcttccatgaactgttcttcctctccatgatcattaaacagcgaaatatagttatttaacggaccatgtttttttctcttggaagcggtcactgtcgtataaatctgacgtttgacacaaagggatgcaaacgtggaaaatgacgcatttttgtctttgtcataatttttaacagctttgaaaaggccgatcatgccttcctggatcaagtcctcctcatccgctccggcaagaaaaaactttctggactctctgcgcaccagtcccccataccggtttaacagaaaatccatcgcctgatcatctccaagtttaatttcatccaacaattcctggtcagaataatctttaaatattttcatagcacctctattttagaagtctctgtctcacaatttcataagccagcacaccggcagccacagacgcattcaatgaatcaatatcaccattcataggaatggaagcaatataatcacagcgctctttgactaaacggctgactccgctgccttcgtttccgatgaccagcccgatgggcccagtcagattctggcggtacatgacttccccttccatatcagcacagacaaaccacagtccccgctcctttaattcttccatcgtctttgaaaggttggtcactttcacgaccggtgtatagttgatggccccggcggaagttttggccactgtcgatgtcagccccacagctctgcgcttcggaatgatcactccgtgggctcccgcaaggtttgcagtccttatgatggcccccagattgtgtgggtcctcaataccgtccagaagaataaagaatggatcctcatttttttcttctgccttgcggaaaagatcatcaagctgtgcatactcataagccgcagccatggctaccacaccctggtgatgctcatttgtcagctggtctaagcgttccttttctacaaaattcagaaccgcatccgtcttttttgcttctcttacaatggttctgataggaccgtcttggcatccgtccaagataaagatcttgtcgatcggtttgcctgccctcaacgcttccagcacggcattcctgcccgccagcaaatattcttcgtagctcattcattttctcctaaatctaatcctatttttatcaactccacagcacgccccatcttcccggacaaatacaaatatcccatcagggcttcaactcctgtggccatgcggtattcaacgatggaagcattttttgcggcggtggcggatttagcgttccgccctcgcttatagacagctgattcttcatcggtcagcctttcttttattctatcataaacccgggcctgtgcggaagcttttaccatgctgctggacttttggtgatacttattgacactcatattcccttcagagatcaccagagtcctgacggcgagttcataaaccgcatctccaatgtaggcgagccccagaggagagtaggtctttggatctatttttggcagatcaagcccctgtatcataaattcaattaagctcgtttccattttacgccttctcttgtatcctttaaaatgattcctttttccaacagttcgtctctgatctcatccgctctgccaaagttcttatcttttcttgcctgatttcgttcttcgatgagctgttcaatctcctcatccaggattccttcctcctgctttgtctcaatcccaagaaccccgcataaggtttctaacgtttccaaaagcttcttggcgtaggcactggagccctctttcaccgttgtgttggaaagtttaacgatctcaaagatagcggaaatggcatctgcggtgttaaagtcatcctccatggcttcctcaaacttagcggtcagcttcccagcctccgcaaggttttgctcttcctcactgctcaactctgtttccggcatgcaagcccggtctctcaaaagatcaatggccgtcaagatccggtccaggctgttctttgcagactcaacaagagtatcactaaaattcaacgggtttctataatgggcgctcagcataaaaaacctgatgacctgaagcgggtacttttcactgatctcccgcaccgtaaaaaagttccccgccgatttcgacattttctggttgtcgatatttaagaaaccgttgtgcatccagtaatttgcaaaacattcgtcattgcaagcttcactctgggcaatctcattttcatggtgtgggaagatcaagtcctctccacctgcatggatgtcgatggtgtcgccaatatactttttggacatctcagaacattcgatatgccatccggggcggcctttcccccacggggacggccatgcgatctctccctctttcttcggtttccagagcacaaaatccaacggatcctttttcccttcttctccacggactttaatgtccctgtggccgccttccaaatcgtctatattctttttggaaagctttccgtatccctcaaatgaacgtgttttaaagtaaaccgttccgtttgattcatatgcgtggcccttctcgattaaagtctcgatcatacggatcattccgtctatctcttccgtggcttttggctggtgcgttgccggttttacattcaaaccttccatatcctttttacattcctcgatatagcgctctgcgatctctgtagcggacacaccttcctcgttggcctttttaataatcttgtcatccacatccgtaaagtttgacacatagttgacatcataacctttgtattcaaaatatctgcggacggtatcaaagatgatcatgggccgtgcatttccaatgtgaatgtaattataaactgtgggtccgcacacatatatccctactttgcccggatgcaccggtacaaattcctctttttttcttgtcagtgtattgtagatcttcatcatttatctcctttcgctgcatcttccactcgtttgcagtgctccataaaaatattcaacgcacttctgagttccgcattttccttcgccaatttttcgatatccatatccactggatccggaagatcaatctggttgagttccagactctggatccgggtgccgtctcttttgatcactcttcccggaacacctacgaccgttgagttaggcggcacatcagagaccacaactgagcctgcgcctatcttagaattcttcccaatcgtgatcgatcctagtactttggctcctgcactgatcagtacattatcctcaatggtcggatgacgcttgccagtctcatttccagtaccacccagcgtaaccccctgatagatggtcacgttgttcccgatgatcgtcgtctcgccgatgacgaccccatgtccgtggtcaataaaaaggccttcgccgatctgtgcccctggatggatctcgataccggtttttctggcgatcttctgtgaaatctttctggctttataaaaattaccttccttatacatctgatgggtgattctgtaccaatacagtgctttcacataaggatacagaaagacttctctttggtttttaagggccggatcccggtccttgataatctcaaactggctttttgcaaaatctctaaagcccatacttacctccaaatccatatttacataatgcaggactttttattctatagggaggttctgtgaaccttctaacatagaataaaaaaactccgtctcaaaaaagagacgaagttatatccgcggttccactcttacttaaaacatccttgggatgtcttcccttaagcttccgttaacgccggccacgtacagggctactgctgcttcgtcctgtctgctcccagaggcattcccaactcttttcctaaaaactgctttcagccgatgacagtttctctctgatagttccggtgaaggtactggttctgttctgcgcatttcacttaccatatagtttatgcgctttcccctgaaatgtcaaccggattatttaatatccaccgctttaaaatgcatggcgccaaccactgcagcggcggtcagaaatacaatacctgtcacaattcccgtaacaagatccgcatttttcattccgctttgaatcagtattgacaacgtattgccaggccagtattttgccagttccaccgaatgtccgaaaagctttgtcagccccatatctccgtataaagccaccgtgccgatcacatccaccccgatgatagccaccggcaggataaattgggttttccttatgagaaatgccgccatgacataaagagaagtgatgcttaacaccaggatgtattttgtgaaaaggtaggcggccgtttcgcttatgactgccccgctcacatccccggttttccagtagaacgctgccgtaatgccaacgacaaccagactcagcacaaaataaaccgttgcaaggcccatgctcaccagccatttggatgcaaagattttgcttctttcgtactgtttggaggctaggttcttgatagtgccatatgtgtattcacttccgataaacagagaaactacgatggacagcaggatgaggtaagacgtatctgcagtctgtatcctggatatgaccgtcatctgccctcccatgcctcctcctatcttctccacaaggtgatatagaaaattctccgttcccgacaacaacagaagcagtaccccgcaaactcggaatgaggttgattttaacaatttataaatatctgtccggattaaatttaacatgctgcacctccaactgtatttaaaaagtatttctccagatccattttctccacgtagatttcctgcacctttatccccttctgcatcaaggcctgattcacttcccccggctggtccaaaaatccgtagatctttaattcttcatctccggtgatctggcattcatctgcatcgaattgctccttcatcacttcacatgctttcatccgctgctctttgggcacctttacggtcaggttggactggctttgtttgaccagttcttcctctgtgaactcctggatcagctctcctttatggatgatgccgtatctcgtggccagcttggataactctcctaaaatatggcttgagatcaatactgtgatgtgatgctcctggttcagttcctggatcaactcccggatctcccggatacctaccgggtcgagcccgtttgtgggttcatccaagatcagaaattccgggtctcccaggagggcaattgctatggccagcctttgcttcattccaagagaaaaattcttcacttttttctttttcgtattatcaagtccgaccttcgtgagaacttcctcaactttccttgtgtctttcattccacggagcttcatttctactataagattttcttttgccgtcatgcccggcattaaggccggatattcaatgaccgttccaatcttttccctggcttttaccggatctcctgaaccaaataaggacaattccccggaagtaggttttgccagccctgccatcatccggatcatggtcgtctttcctgcaccattctccccgatgaatccataaatatctcctctttttacttccatgctgacgtttctgactgctatttgttttccaaaggactttgtgatgtcctccgcttttacgacaatatccatatagacctccctgtgttatagtattattgtactgatgatttaatacaatagtactataacacaacaatgatgtcaagaataaaatctttttgcttaagggaactgtttcaatatcaaagtgggcaagtccgcttgcaggattctccgcctgcggcaggtcgctttgaagacatgattccttaccgccgcagtgcgacccgtgcggagcgtttttagtaccataaaaggacacagaaatttttatttccatgtcccttgtctctatgatactgctgacgcagtttttttcactgtctggcgaatactgtttccaaccgcagcagccagagcaatttttatgagatcaccaggcaggtaggggataactcctgctgccaggccctgcatcggcgtcaggtgtatctgtgtacaaagccatactgttccaaacagatatgctgccagagttcccaggatcatccctgcagactgtatgctccttttcccttttgaacggtcgatcatgaatccacagatggctgctgtcaatataaatccgatcagatatcctcctgtaggacctgcaagctttgataatcctccggaaaaagctgaaaataccgggagacctgctgtcccaagcagcaggtaaatcacataacttaccgtcccaagcctgcagcccagagcataagcagtcagatagattgccaaattggtaagtgagatgggcaccggcgtaaacggcagcggaactgtgagcggtcccacaacacagatcagcgctgccatcaatccaatgagtgtcatctgtttgatttctagttttttcatcatcctactcctctttctagtttaatgtatatccaagctggatcaataattgtctgtctccctctgtcttatttcccgacgtggtgagcatgtcccccgttatggctccgttggccccggatagaaatgctttccttccgttttcctccatcacattgcgtcctgccgccagacggatctccgcttttgggtttaaaaaccggaagacagcaacagttcggagaatttcttcttccttaagcctctgccgattttccaaaggggttcccgggatcggggtgagtacattgatgggaatcgaatccactttcagtcctgccaggtcaagagccatggatatcctgtcctccattgtctcccccataccgatgattcctccagaacagatctcaaggcccgctttctttgccctttgaatattctctatcttatcgtcatatgtatgtgtagaacagacctgagggaaaaaccttctggaggtttccagattacaatggtaccggttaactccgttttcctttagctttaaaaaagcttcatgcgataaaagtccatgggaagcgcacaaggaaaggctgctctgtgcagacatgccacggtatgcttccaaagcttttaaaaaatcatctccgccaatgctttttcccgcagtcacgatagaataacggtgcacccccttctgctcctgcgctttacaatcctttataatttcagctgcgggcaaaaaggcatattcttctgccctagtctgatgataggaggattgtgcgcagaacctgcagtcttcgctgcaccttccgctttttccgttaatgatcgtacacagatctccgtgatctccacagaaatacttcctcaacctgtctgccgaacggcacagctctgtcagatccgaatccatcaagatcttcagatcctctgtttcaaaaaaaacctctccccccgagaggatccgttctgttaaatccttcagcatattttctcctttcatttccttgcttagttatgaagtatgagtatttctccattgtctccagtcggctctggaaaggcctccttccgacaatgaagaaaaactatcgtaggatgaaaccttctgttcagccgtcatccttatctagcagacactacgtccattttttacaggcttggagtgaggcattaagagccgaacggaaatctcgtagaaaatatcatacctttttcgctccctattgtcaacttatatttctatttaagtttacaatcaagttaaataaaaacgcacagactgaagtgttcttatctacagcctgaacgtctcatgattttatgattctttttcttccaggattcccagctctttgatgcgttcctcaatctttttcatagattcctcataggtgagtccgtctatcgcagccttttcctgtgtatcctcacgtttctccaaaagttcatcaatgtctttgctgaacggatgattatctgtcacttttgtcaaaagtcccataggtcttcctccttaccttcctgatctccctttccattgaactttattttattcattttaaccgcttcttgtcaatatattctttttctctatttgactttcgtctcaaaaaattgtaccatgacattgcatcagcaaagaagaaaggggtgtttgatatgaaaacctataagatattattagattccatagacagcgtaaaggattttgtaaacttaattaaccgattcaaatccgagatcgacctggcatccggccggtatgtcgtcgatgccaaatccattatgggtattttcagcttggaattatccaaaccgctgcttgttactgtctacggtgacgaagaacttgacgagattgaatctgcactacagccattcatcatcgattaactgcaaaactgccgtatcctgtcttttcgcaggaacacggcagtttttattttatgagttatttaccactatttccgtcgcgcttttgaaatgcgctcctccaatagtggtaaataactttcgtggagcagccccttttgactcacatcaacctacattttatataccttctgattagtacaattcaaaagaacaacagccatccccagcagacattacatccattttctacatgattggagtgaggcattctaagaaccgaacggaacggaaatcatgtggaaaatgtcataccttttaatgaagattctgtttcagtacacggttcagatattgaatgtccactggttttggcacaaatccattcattccggcttcaaatgcagcttccatatcctccttaaatgagttggccgtcatggcaataatcgggatactctgtgcattagcatggctgcttttcctgatttccacagctgcctcataaccgttttttcgaggcatcttaatgtccatcaggatgatctggtaccacccatcttcactcgccaaaaaccgttccacagcctcctgtccatcgaatacccgctccgtctcggctccttccattcgcaaaagttcctgcacaatctctgcatttaaatcgttatcttccgccaaaaggatccgaatcccctgaaaatccggaagtactgatacatcttcctttttctgatctttatcttttcctaaaggcagccggattaaaaagaaaaattctgctcctttacctatctggctgtttactttcagctggcctcccatagcatgaacgatacttgcactgatcggaagtcccagcccagtgccttcactttttgtactgctagcgcccagctgctcgaatgcctcaaatatctgactttgcaattcaggagcaattccaactccggtatctttaatggaaaagaagtactccgccgtccggtcttccgtgcgttcttcacgcacagtcaatgtcacactgcctccaggttttgtaaatttaagtgcgttggataaaagatttgtgatgacttgtcgcaggcggatggaatctcccataacccattcgtgctcaaattcttttataaacttaagatccagctgtttctcccgtgcctgctcctccatcatttcgtgtaaaccatccaaaagctctgccagtgaaaattcttctgtctcaatggtcatcttaccattctcgatttttgacatatccagaatatcgttgatcagtgccagcatgtattgggaagatgcatgaattttttgtaacttttcttctacgcctttcggcagtttttcctccatcctcacaagatcagtaaggccggtaattgcattcataggagtcctgatctcatggctcatctgagagagaaattcactttttgccctgcttttcgcctcagctttttccagctcactctgcatcagcttatttctcatctttgatctcaacacaaggatcagacctgcagcaacagccagtacgatcgtgctcagcatacctaccgaaatgatcggatttgcatagatatagtcctttaaagacagagatgaccccagcgataccagattccggttcaggatggtgctcttatcttcctcagaaatactgttgatggacttattgaggatcgtgaggagatgaatgtctgcgggacttggcaatgcgaaagaaacccccatatcattgttgaccccggtgacaggtaccacgttcgcataccggtgattctgcatttcctgttccagtgaagatgccagtccatagataaaatccacctcaccgcggttcaatgcggtgatcagttcctttgaatcagtataggtgatcacttctctggcttttattccgtccggaagtgatctgccggcaagtatccctgccttcagccctccagatgggtaattcactgccttattcctcaagacaatattatttagtttaatgtaagcgctggacaatataaaattctcctgctttgcattcttctccgtatctaaaaaacatcctagaatatctgcctttttgttttgaacaagttcaattgcttcctcgtaagtatctgccgtcatataagtataattcagtcctgaaaattcagacaccttctctaagatatccggaataattccatcatggtgatcttcttttcccacttcgcagtaaaacggatgacgttctgacacaaccaccacagacactgttttctttttcttaatatacttcctttcttcctggctgaggtagacagaagaaatcgattttaaccctttgaagttcttctcataatgttcttctccgaattccggatcagcatctaagatcttctccatagccatattcaggccgtctagtatttccttgttgcctgtattcgttacaatataatatggctgtgcgtcaaaggaagctgcaagccggaaattcttattgttctccagttcgttccccatcagcagatcgacttctttatcctctaaaaagctgtagaggtctccttttcttgacagatcctttgtgccgtaatattttaatttgcagttcagaccgttaatctttaaataatctttcagtctgcggatcttctcttccgccttatcgaagactccgatcgtctttccgtttaatgtgctcaactcataactcttgatcttattgttgtctttcaaacagagcagcgcggctctgctgctgcccatactatattttggataagcaaacaagctttccagttcttttgcatagtaagtaccgcccaacacttcaaactttccagctgccatatcctgcataaaggtttccccagtagtaggaacaaattcatactcccagtttgtatatttggcaatctcattcagataatccacggtcagaccagtataattcccatattcatccttctcgcacagaccagtcgtctctaaaaaaccgactttcacaacccgcttcgactgtgttttttcttttttcccggaggcagctgaagttaagctattccccagacagagaaaactgatcaacaatacagccaaacagacaacccctctgccaaacagcttctgtctcgattttttcttcatactttcccccttctttcaatgatcctatccccttttatattctattctaatgcttttcctgctttctgacaacaaaaagggaccgatttcaaacgaaaataagaaaaaggtcccttaagggttttatttagaggattcggatcttcatccgaatagctttcagcagctggatcaccggaaggttcgccagtgccaatccataaacagtaaataactgctgcatagtcagagtctgtactttaaataatacgtgcagggacggtattaccatgacacaggtcataagaatgacaccaagtataaaagccccgatcagatatatgttatcaaaaaacttattagtaaataacacaggatgattagatttacagttaaatccatgcaccagcctggaggtacagagggttccaaatgccatagtgctcgccagaactgcgttctggtcccggtacccgatcataaacccgatcattgtcataacaccaatcacaaatccttcaattccaatgttcgcaaggaaatcttttgtcaggattgattcattaaccggcctcggcttctcttccatcacctgatctgtatgaggctccagacccagggcgatagcaggcaggctgtccgttagcagattgataaacagtaagtgtaccggcgcaaacggaacaggcaatgctgcgatggacgcatagagtactacaaggatccccgcaaaattaccggaaagcaaaaattgtatcgcattttttatatttctatacaagttgcggccattttccactgcctttacaatagtagcaaaattatcatccgtcagcaccatggaagacgcatccttggagacttcactgcctgtgatgcccatggcaacgccaatatccgcctgttttaaggctggggcatcgttaacaccgtctcctgtcatagaaacaatatttccttttctctgccacgtctgtacgatccgaatcttatgttccggtgacacccttgcatatacagagatgccttccacaaacttctcaagttcctgatcagacatatggtcgatctcagctccctcacaggcctcactctcgtctttcaggatgccgatccgttttgcaatggccgctgccgtcaccttatgatccccagtgatcatgatcgggcggattcctgcctggatacactgggccaccgctgatctggattcccttctcggcggatccatcatagagatcagccccaggaaggtatatccattttcatcctttggcgtcagcctctttcccttttctatggtcttataagcaatggccagaaccctcagcccgtttttggaaaattcctggttgcaggcctcaatctgttttttatcccagttggtgataggtaccgctttatcacctttttgtatggataccatacggtccagcagtacatccactgcccctttcgtgatcatcgtatagccattttccatatcatgtactgtagacatgagctttcgctcgctgtcgaacggaatctctgccactcttggataaaagcagcgaacaccttccgccttccgtcccagcttgtccccaagattaatcagcgctgtctcggtgggatctccgatctcttccccgtttatattggtagaatcgttgcagagcatactgtagtccagaagctgcttttgagctgcctttttcaggtcgatatgggccgccggaatccgaacgcctcccacatagtaatcttccactgtcatcttattctgggtcagtgtcccagtcttatcagaacagatgatggatacacttcccaacccctccactgcctgaagttttcggatgatggcatgttcctttgccatcttctgtgtaccgaaagagagtacgatggtgacaatggaactcaatgcttccgggatggctgcaacagccaacgcaacggcaaacataaaggcatcgccgatatcctcgccccggatcacactgatgccgaacaatataccgcagaatactagaatcagaagggacagcttctgtccgaactggtccagattaacctgcagcggagttcttttctcctctgtatttttcagcattccggcgatctttccgacttccgtatccattcctacgcctgtcacaaggaacttacctcttccgtaggtgacaaagcttccggaatataccatgttgatccgatcccccaaaggaacctggctgatgatcacactgcttgtcttttctacccccaggctttctcctgtcagtgcgctctcatccaccttaagactagcggactcaaggatcctgccatctgccggtatggaatctcctgcttctaagaggacctcatcccctaccgtaacttctctggacgggatctgtacgatcaccccattcctcagcacctttgccgtaggggcagaaagctgttttaagctgcttaaagactgttccgcttttactgtctgtactgtgccaagaatagcattgaccgttatgacgaccaggatgaccgcagtactctccatatctcccagaaaaccggatacagtggccgcagcgatcaggatgatcaccagaaagtctttaaactgttccagaaaaatctgtacgacacttttcttttttccctcaacaagctcattatacccatactgcttttgatgctctgtgacctgggcagctgtcaagggctccatagagccgttcagctgcttcttgacttcttctgctgtttgttgataaaactccttcatactcatcattctccatttctctaagtattttctttcctcttaggatgaaagattttcaccagtggaaatctcacactgtgtgcagctaagtcccaaagggcttttttatttcataggagacactttcccatgaactaagataaaatcccgcttgtgggattctccgcctgcggcgggtcgctttagcgacatgattccttgccgccgcagtgcgatcctcgcggagcgttttttatttcacgggatgcattttcccatgaaacaagatagaatcccgcttgtgggattctccgcctgcggcgggtcgctttagcgacatgattccttgccgccgcagtgcgatcctcgcggagcgttttttatttcatgggatgttcccatgaaataaaaaaacaacgggacttttactgcatctttcgtgcaataaaagtctcgctgtttcattacgatacggatgaatttcttcatcgagattgacgacaccgcaaacgattcactcgccagctactcccttttatttagatataatcatagcgaattctttccggcttgtcaactaattgttgtcgacacgtcccccgaatcctgtcttataaatgttttcccgtcaccttaagccttgccatggccctggaaagggcagctttgctgtgataatactctctctggctctctttctgcctaaggcgctcctgggcgcgttcttttgcctcgttggcccgccggatatcaatttcctccggccattccaccgtatcggccaggagaaccacgaactcgggcatgatctccacgaatccgtcacccactgcagcctctctccattctccgtcgactttaaaccttaattctcccgccttcactgcagtcaccatggattcatgattgggcaggattccttgttcaccgtcgatcgccggaaagatcatcatctcacattctccattataaaacctccggtcgctggccgtaatctccagataaaaggtctttcccatactcatccctcatttctatgcttccttggcagcttcactctttgctttctcaatgacctcatcaatggtccctaccataaaaaacgcattctctggatattcgtccatatcaccattgataatggctttaaatccgcggatggtctcactgaccggcacatactttcctttcatgcctgtaaagttttcagccacatgaaacggctgggaaaggaatttctggatcttccttgcccggtataccgccaccttgtcatcctcatccagttcctccataccgaggattgagatgatatcctgcaattctttatatttctgaagtaattcctggacctgcatggcaacttcatagtgttcttctcccaccacttcggcttccaggattctggaggtggactccagaggatctaccgcaggatagattccctgctccacgatctttctggagagtaccgtggtggcatccagatgggcaaacgttgtggccggcgccgggtccgtcaggtcatctgccggcacatataccgcctggacagaggtaatagaaccgtttttcgtagatgtgatcctctcctggagctctcccacttcattggccagcgtcggctgatagcctaccgcagacggcatacggcccagcagtgcggaaacctctgaccctgcctgcacataacggaaaatattatcgataaacaacaacacgttctggtgctcctgatctctgaaatattccgccatggtaagaccggtctgtgccacccgcatacgtgctcccggcggttcattcatctgcccgaacaccaatgccgttttgtcgataacaccggattcgttcatctcggtccacaggtcgtttccttccctggatcgctcccctacaccggtaaagatcgaatagcccccatgctctgtggcaatgttgtggatcagttcctggatcaaaactgtctttcctactcctgctcctccgaacagtccgacttttccaccctttgcgtaaggcgccagcaggtcaatgaccttgatgcctgtctccaggatctccaccaccggactctgctcctcaaacgtaggaggatctctgtggataacccactgctcctctccttcaacctgctcttttccatcaatattctgtccgagcacgttaaacattctgccaagagtctgtcttcccaccggaacagtgataccggcacctgtggctgtcacttccatatcttttgacaagccctcgctggaagcaagcaaaatgcagcggacaatattatttcccatatgctgggccgcttccatgacaagttctttcccatccagttctactgtcagcgcgtctttgatcagcggaagatagccgccgtcaaattccacatccactaccggacctaaaacctgtacgatttttcccttttccatatcttcaccacaattctttctatgttctatttctatgatttatttcttctgaaacgcttttgcgccgcttacgatctccgtgatctcctgtgtgattgccgcctgtctggcacggttatacaaaagagatagttccttgatcatgtccctggcgctgtccgtcgccccctgcattgccatcatacgcgcattctgctcgctggaaaatgactctacaagcgctccgtatatgaggccctttacatagttcggcaccagatggtccatgactactttcggggatggagaataatccgcgatcttgtgatatttctccagttccacattcatttcctcaaaactctgccgtttcaacggaaggatctgaatgatctccggctccgacttaagcggagttatcatctttgtatagatgatataaatctcatccaggttctccttgcggtaaagatcaaccagtgtctccgcaatgttcctggccctccacatgcttggatcctgggccgtatagaggaattctccgtcaatcctgaccttcttcctcataaaatactgccgtcccatctgaccgatgacaaataatgtattgttattcccctttgcaagtttctcttctgcaagctttaacacattgtggttgtaagcccctgccattcccttatccgcagtcataaccacatatcccctctttttgtcctccggcttaatctttttcctctggtcaaaaaaggtatggttaatgtccggagagtggaacaggatatctttgatagtggactggagaagctcaaagtaaggtgccgtggcatccagcttttccctggccttgcgaagctttgtggaagagatcagatacattgcgttggtaatcttcatggtctcctgaatactcttcattctggaacggatttctgtcatatttgccatgtatgctcacctactttttaaattctttcaccgcatttacgatctgctttgccatctcatccgtcaaaacttttttctcatcaatctcgttgaccaggtcaccgtatttagcttccaagaacattaccagatcctccgtaaaggacttgatctcattgaccggaacgtccataagcagccggttgtttgccgcacataaaaggatcacctgtttatgcaggctcatcggatggtacagcggctgttttaataattccaccaaacggtttccgtggtccaaaagttcttttgtctgaggatccaggtctgagctgaactgcgtgaaaacttccatttcacggaactgtgccagatcaatccttaaacttccggagacctttttcatggctttggtctgagctgccccgcccacacgggaaacagaaagacctacattgactgcaggccggattccggagaaaaacaaatcactttccaagaaaatctgcccgtcggttatggaaataacatttgtcggaatatatgcagatacatcgcctgccaaagtctcaatgatcggcagcgcagtgatggatccgcccccgtgtgcctcatccatcctgcaggagcgctccagcagtctggaatgcagatagaacacatctcccggataggcctcccttccaggcggcctctggagaagtaatgacattgctctgtatgccactgcatgttttgacagatcatcatagacgatcagaacatcttttcccttatccataaaatattccgccattgccgtgccggaatacggtgcaatatactgtaccggcgccacatcgctggctgaagcggatactacaatagaataatccatagcgtcgtgttttttcagtgtggaaacaattttagccagagtggatgccttctgtccgatggcgacatagacacagataacgtctttgcccttctgattcaaaattgtgtccacagcaatggatgtctttcctgtctgacggtctccaatgatcagttccctctggccgcggccgatcgggaacatggcatcaatagcgagaattccggtctccataggaacatctacggattttctctcaatgacccccgccgcctctctctcaataggcagataggcatccgtcttgatcggcccgttaccgtcaatcggtgctcccaaagcattcaccacacgtccgaccagaccgtctccaaccggaactccggcacgtttcccgcttcttacgactttggagccttccaccagcccatggtcgcttccaagcaacacacagccaatggtcttcatctccagattctgtacgatccctctggtgccattctcaaactccaccagttctccatacatcgcatgatttaaaccatgtacggtcgcaataccgtcaccaatctggatgactgtgccttcctcctgcacttgaattttgttttcataatcttctatctcactttttaaaactgagataatcccttccggatttatattgcccaactgtttcacccccgcacaaggctgttttgtaattttgcaatggaagcttttacacttctgtcatatacatcatcacctacggtcaagacgaaaccgccgatcaaagacgggtcctttctaagccgcagttctacgcctgttttatgatatttttggcagatcatgtttttgatgtccgtaagccttttttcatccggcttagtgacataagaaaagactgccgtagctacttcttttttgtctaaaactatttcatcataggattcaaaaatgtcatagacgctgtctgcctcaccattgtcagagacaaccttcaaaaagctttgtaccggtcccggaatcaccttctcaatgaccgcatgcttttcttttcgtgagactaccgggcttgccagtgcagccaccagttcggggcattcacagcacagcctttttgtctcgttgatgtactcttccgggattgccaagtcaaataatacctttgcatagttatccgtcagcccgttcatttgcctgcacccgcttccttcaaaaagtcatccaggatcttctcattggccgcctggtccacattttcctgaattaccttagaagctgccgcaatggccattcccgcaatctcattctggattccctgtatcgctttctctttttgcgtctcaatggttttatttgcgtccgcaataaccttggatgcttcttcattggcatcctttaatatccgctgatattcttctttacctctttccttggccgtctttacgatccgcgctgcctcctggttggcattcttaagttcgccttcgtatttctcttttaacagccccgcctgggtatttttttgttctgcatcctggatctgtccgtttatcatctgttctctcttctcgatcattcccataacgggcttaaaaaggatcttttttaagatcagaaaaaatacaataaggttcacaaacgtccacaggagtcctgagttaaatgataacacctacaccgcctccaagctttttaaagtacaaacatgataataatcgcaacaaccagaccataaatggctgtggattctgccagtgcacatcccaataataaggtcttattgatctctccagttgcctccggctgtcttgcgatcgcatctgtcgcacctgatgttgcgataccgataccaattcctgctccaattcctgataatactgcaattcctgctcctaatgctactaatgacataatctacatctccttaaactattatttttcacttaatttgttcctttgttttaatccatcagttccttcataaagatcgctgtcaggaaaacaaagacatacatctgaatcaatccatcaaaaacgtcaaaataaaaactgaatgggatcggcactaaaatcggtgccacgatcttcaaaagttccatgatgacaaacccgccgaggatatttccgaaaagccgcatacacaatgacaacggccttataaagacttccagcacattgagcggcgcgataaacggaaccggctccgcgaagctttttatgaatccttttaaacctttttggcggatccctgaaaactcgatcaggataatactcatgattgccagccctgctgtcacattgatgtcctttgtcggcggcgtcagtccaaccaaaccgctcagattggaaaggccgagataaataccgactgtcgcaagatatgggatataaccttttccttcatccccgagaatcccatggaaaaacccgtacacccctccgacgaccgtctcgatgcaggcctgccttcttgtggggacgatctgaagatttctcacaaaaatcagacataatacgatgacaaaagccataatgccccacgtgaccacaaccgactgcggcactgggatcccgccgaagataggaatggtaaatgctgtcttgctcacaagctcttccatcaacttctccgataaactcatcgaacgctcctcctttcctaaatttgtagtgagtataatactctggatttgctttgtcaattctaaaaatcaacctatttttttggtattttttctataaaaattacttttttgccacttgaaaaatattttttgttggtccttccaatttctattgtgcacttcttccattttaatttgtatttacccggatttattgtgcatgttataccacctttaagctaccaacaaaaaagaggtcagataatccgatttcttcttattaaaagaagttcctatttctggcctcgattttcccggttcctgcccagttccttgtcttctgattcttagtatatgcagcccgattaaaactgataattcactattcaattacaattatctgatactttccaaaatcataaataatggcctgtaaacctctgttctgcagttcgcatcaactccatttcgctcacaacatcactctcatacggatatgaccttacctgctcttcaaaccttctctttattttctccgctttttccacatccctttcaaatagcagcacgtatacatattgggtccggatcacagacgggaagttcttcatggcctgcatgaattttctttgctgcctgtcccgcatatagtctatccattcccggccgctgccctttataagttcacaatagatcctgtcacagatcagcagactgcggtgcaggcccgcaatcccagactccatacgaagcagatgctctattaattgttctgcctcatcaaacttatgtgcatccatcatacggtttgcggcgctgacacccatgacagcagtcatactgtttcgcatctcctcatcggacggtacacgaaaccactcttccggcatatcctttatacggattccgttggtattctgttcattgatcttcagctgtgtccaaaaggacctcacggcctcaggattttctcccaatgaaactgcattgaacccatcgttatctgcgctgctaaaatggataggaatcccattaagaaatgcacagacaaaaccgacaaggcttgtaattagtaaaaacgcagataaaaacggcccggttttaaagaaaatacagcctcctaggagaatcagagcaaagaccgtgttcataatgcagcctccaaggtgatataagataaacggtatcttccctccttccatatcgggaggactcatcagacattgtccacccgtccctgcaagagacagtcttttcaaatgtatcccctgacggttcttgatccagatcaggtttccaatccggaacgacgaaaaccgatagccgctgagcaggccgaatacaagatgaccgaattcatggatgagaatctggacaaaaaatcctgtgtacagaaaaataactgatgccatcaataccatggcatatcccccagacgtcatcttcatctccgagaacgttttcatacagtcagccgccaaggccccatacaagaccgccatcaataaaaagagtactgctccggctcttcgcagccacaaaattattttcttttgatctttatcaaacatggcctttctccatagtcaagccatcagaattctcatcttctataataattttaattgctgaacactttcctccgttgcatcggctctccgatacgctgcacgcagccacccccagacacacatccataagcgccttgaggaccactttgtctcctggcttagaaactggcgcctcaacggaaatactgccgtccctgcggattctggtgcacataaacaggttgaccggcgtgatgcctgtcctgtgtctgtttaaactgttgttaatatgatccagacaatttgaatggccttttccgtttccgtaaaaaaactcatacatttcctcccggcagcacgggtggatcagatcatgttcccctacatcatcagccacaagctgaaacattggacggtaaagattcgtgtaaatcgtatcgcctacattcagccgcagcgactcattgcagtcgatggtcactccggctgacaaatattcatttgggttctgccctgcctccgcaaagaaatcagcaacctgctccccttctatgtcaatgaccgtgataaactggccttcttttacatgaatcgctgccccgctgcaggcgctgactaaatactcacttctcatatgcatcttctcctccgtctattctctttttctatatcttatcacagctatgaggatgtttcatggtaactctccataacaggtacaaattgggcaaacccacctcaccacccgctcactctttgaggggcttggcaactttgcgcgccaaatgcgatttgacgcagtcaaataaattccttacgcatttgtgtgcatactgcccacagggcttttttatgtcataggaggttccgtaggaatttcctatgacataaaaaagcacatcattttcagatgtgcttttaaactcgtattctgttaatacaatcttgactgcccgtaagctataatgcggatgacaggaatcgaacctgcactccgaagaactagatcctaagtctagcgcgtctgccagttccgccacatccgcataaaaaatgtcatctatcataaattgtatagatgacgaagtgagcgtgcggggattcgaaccccggacaacttgattaaaagtcaagtgctctaccacctgagctacacacccatactgggctagctggattcgaaccagcgaatgcagcagtcaaagtgctgtgccttaccgcttggcgatagcccattatctccaggaaatccagtaatcctgtaaatagataataaaaaagggtgggtaatgggattcgaacccacggcctccagagccacaatctggcgcgctaaccaactgcgctatacccaccataaatataaattatttcaaaaaggcgaaataaaaacgagcctgaggggattcgaacccatgacctacggcttagaaggccgttgctctatccaactgagctacagactcatacatataactgtatatatgtttggctttgtaaaaccaaagcgggtgatgggaatcgaacccacgtgatcagcttggaaggctggagttctaccattgaactacacccgcaaagtcggggtgacaggattcgaacctgcgacctcttgatcccaaatcaagcgctctagccaagctgagccacaccccgatatgtaattccttcttgaaagactttccaaaactgcttttgtttggctgccgtctttctcacaagcaagatttattatactggacaggcggacaaaagtcaacatcttttttatatttttttaaaactcccggaaacggcttaaatactgggcttaaagtatatttaaccacaatggataacaaaataatttatatttttattaaaaaaataatgcaataaatctttttattcaacagaaaaatgcttttctggtaacatgaaaaagaggacattcctcaccagaatgtcctctataagattttattcttcttcctcttttgctgataactttatatcatcttcatcttcaaagaaatcatcatcaaaatcgtcatcgaaatcatcgtcaaagtcttccatataatctggagtcagatacttatagactgcgtatgcaattcctgctaccgctgcgatcgcaccgatgattgccagtgcccagacaattttattatcttctttgtctttcttgtgcataatgtctgatacctttgccgcacttagtaaatcgtcaaaacttttcatgtcattcaccctttcttatgtgttttttttattatatcacttatcccgtttcattactaatcttttttctatttttgctcggttttctttaattttgcaaaggatgcgaacatcttttttacaccatgcgattcaaagtccactgtcacctcataatcgcgtcctccagagacaatttccttgactgttccagcaccaaatttgatatggctgacccggtcccctacgccgtaagaaagagaatcagattttggttctgcaaattgccgtttctggaatggctttctgaactgggtcctccggttggaagaaaaaatatcatgatccggccgcttatcgtttaaattcacaccgtaatccagctttaagagctcctgagggatctcatcgatgaaacgggagactttattaaactgcgtccttccctgcatcattctgcgctttgcggcgctaagataaagcttttctttggccctggtgatcccgacataacaaagccgcctctcctcctccagttcttcctgatcctcagaaatgatcgtcatatagctcggaaagatcccgtcttccataccgctgataaatacatatggaaactccagtcccttggcactatgcagcgtcatcaaaatcacccggttatctgaatcttccagattgtcaatatccgccactaaagcaatttcttccaaaagaccggaaagtgtcggttcctccgctgtctcttcataagccacgatcttatttaaaagttcgttgatattctcgattctagccagcgcttcctccgtaccctcagcttccagtccttttacatattcagtctcatccacgatatagtggaacaggtcttccaggctgcctttttgtgcctgctccctaaaatcagaaataattccggcaaacttctcaatcttctttttggcattggcaagagtttcaatctgccttgcgtcaaaacaggcatccagaaagcttatattctgctcaatggcatatgtctggaccttatcgatggtagttgccccgatacctcttctcggcacgttgatgatcctcttcactgccaggtcgtcaaggccgttgtctaccgctttcagataggagatgacgtcttttacttctttcctctggtagaaattggtccctcccacgattcggtatggaatattcttgatcataaatttctcttcaaatatacgggactgtgcgttagtccgatacagaatcgcgatgtttttgtactccacaccttcctttgccaggcggccgatctcttccacgatctgtcccgcctcttcatattctgtcccatactggtgaaatacaatcgtatctccgtcatcattttctgtccagagcgctttttctttccggcccttattatttctgatgacttcattggcggcattcagaatgttttttgtggaccggtaattctgctccagcttaatcactgccgcatctggaaatactccttcaaagtttaaaatatttttgatatttgctccgcggaacttatagatagactgatcatcgtcacccaccacacacagatttccgtactttctagccaacatactgatcagctggaactggatcgtatttgtgtcctggtactcatctaccatgatataacggaaccgttcctggtaatagtccagtatttccggctggaactggaacaactccactgtcttaaataagagatcatcaaaatccagggcattgtttgctttcagctgcttctgatactctttgtagatttctgcgatctttttcttcttaaaatcatagttataccgggtctcatattctcccggtgtcataaattcgtcttttgcggatgagatagcgttcatgatcgaacgctccggcatggccttggtatcaactttaaactgcttgcagatcccccggatcaaagacttctggtcatcactgtcatagatcgtgaagctgttgtcatagcccagtttgtcaatgtgcctcctcaatatgcggacacatgtggaatggaatgtactgacccagatatgctcccctccggaaccaaccagagcatccactctctctctcatttcctttgccgctttgttcgtaaatgtaatagccatgatgtggtagggattcactccctcttctatcagatatgcgattctgtgagtcagaacccttgtcttgcctgagcctgcgccggccagcagaagcagaggcccttccgtacaaaatacggcttcccgctgctgttcgtttaatgtatcatatatgctcatatgtaatatcctttcttgctcctgttctacttctgtttaaccttcctttccggtaagactatctatcattatactacatccagatgaaaaaagaagcgataaatatgtatcgtaaccacttgtcatatagtataaaagaccgtataatgtagttatcatacaatcaaggaggacgatgtatggaagatttgaaaaacaagctttccgaatggctggaattagactatattcttccggaagatatcccgaatatcgacctgtatatggaccagatcacgacatttatggacacagaattaaaaaattccacacgcttcgagggcgataagatctttaccaaaaccatgataaataattattccaaaaatgatctgttgccgccttccagcaaaaagaagtattccagaaatcatatgattcttttaatatatatttattatctaaaaaactttatgtccatttccgacataaagtctctgctggctccgttaaaggatcatttttatgacgatgacagggagctttcgttttatgatatctacgaagagatctatcagctggaacatggacaaaaaccagtgatcaaagaatccgtcggtgaggatctggaaaaggccaaggaatccttttcctttgtaaaagataaagaagaccgggaactgcttcagaccttttcttttattacacttctctgctatgacatctacgcaaaaaaacagctgatcgaaaagatgatcgacaatctgtatacctttgatccagaggaagataaaaaagacaaaaaaaagaagaaatagactgccgtctatttcttcattcttttaaataccagatcgtacccgtcacttccatagtttagagaacggttcaccctgctgatggtagccgtggatgcgccagtcttctccgccacttccagataggtatgcttttccctgagcattgaggctacttcaaagcgctgtgccagggattccagctcattcaccgtgcataaatcctcaaaaaaagtgaaacactcttcctgcgtctccaacgtaaggatcgcctgaaacagccgtttcgcggcctctgtttttatctttttgctcataatctgctgctccttttcctgcttcgacatctcgatgcttaattagttttaatatacaacatcagtgcgttaaagtaaagaagaattgcaccgtttttttgattccgcatattctattaaataaagtattttttaggagtttttatgagagtaaaaaaacttgctgccgtctttctgtcttctgtcatggccctgggtgcactttccggctgccagacatccaaatccgaagaaaagacaaaaaaactcaccaaggtgaccttaaatgaagtcacccactccgtcttttatgccccacagtatgtagccattgaaaaaggctatttcaaagatgagggcatcgaactcaaagtcgatacaggattcggagcagacaagagcatgactgccttgatctccggaaacgcggatatcggttttatgggaccggaagccagcatctaccagtacaatgaaggaaaccaggactatgcggtcaactttgcccagctgacccagcgtgcaggaaacttcctcgtttccagaaaaaagatcaaaaacttctcatggaatgacgtcaaaggaaaagaactgatcggcggacgaaaaggcggaatgcctcagatgatcctggaatatgttctcaagaaaaagaacattgacccgaaaaaggacgtaaaaatggttcagaacattgactttgccaacacctccggtgcattttccggcggaaccggggactttacggttgaatttgagcccaatgccacagctctcgaaaaacagggggccggatacgtcgtcgcatctctcggagtggagagcggttttgtcccttacacaacgtattgcgctaaaaaaagctatatcaaaaagaatccaaaaatcattcagggctttaccaatgccattaaaaaaggccaggagtatgtaaacagccactctccgaaagagattgcagccgtcatcggggaacagttccctgatgtttccaaaaacgatctgattacgatcatcaaacgttacaaagaccaggatacctttaaagataatccggtatttagcaaagacggctttgcgcttctccaggatatcttaaaaaatgcaggtgagctggatgacaccgtgccgtttgataagctggtggataacaactttgccgaaaaagcaaaataacacttacctgttacctatcttcagaaaaaatggaccgcagacgataaaagatcatcatctgcggcccattctttttctgtcaatttctaagcagtccgtttctgcttactcaccagcatggcggctgcaaacagcgccagaacaaaccctgcctggatcaggattccctgcagaacaggccatatatggctcatatccattacttccagctggtcaatcagcttatttgatttaatataccagtaagtgggaatgaatcttgatactgtcagcactgatttccccatgtattctattggtacaaaaaccccgcctaaaaaggcacttcccaatgacacaacatttaccactccctgcagtgcatcgtcgttggtcacaagcagccctacaaggaaggacactcccgctgccacccccatgaaaaccagactgttcagcataaacagccagatatttccctggaagatctcgtttcggtacatcactactgccagcagaacaaacaacagccagcagcccacggatgtggtcagcgtacccagagctagctgaaaattcctggacttatccgtatccgcagaacactggtttcttctccggatatcctttttaaagaagaccataaataccggactcaccgccacagtgatcatagcgataaaaatataggcaagatactggaaataaaatgcggtactgctctgttctcctgcttttttgcttcccgcaaggctgatatccaccgatgactttaatgtattctctgcccttgaaacggcctgctgctctgagaatcctgccgctaaataactcctcaccatcttcgtaaacttacctacctgctggtcgatcatatagccgctggtggaattcggcacctttacatttttaatttcagcctttttattcccgcttaacaggctgtccccgaatccctccggaaggatcaggatgtattctacatttctgtaaaacagttcatcctgcattgtcctcttgtcatctttcataactttcacattctgctcttttgagaggaagtctttcaaagctttggatatggtgctctgatcgtgatccacaatacctacctctatttttgtggccttaaatccggtgtcactgctccttccaaagttggagaacataatggtcagcgcaataaaaacagatccatagaccaccattgaaagttttttgctcctgacaatcttaaaaaaacatttaaatacttgcatattttttcctcctcatcatgaaaaagcttccgaggcagagcagcatagaaatgaccgccagtgaaatcaagcttctgagatagactgtcagatcatcatatatattcagactgtaaaagcagtctgtgatcaaggccgccggattgatcctgttgaagaccggaagatttttttctacgatatctttcatatttccaaccatcagtccgctgaaaaaacaaaacagcatactgatgcccacgcagagtccgctttttgtatctctggccatccttccggcacaaccgataaacattcccattgacacccctgtgacacagccaaaaaatcccgccaatagtatacgtcctgcctggtttcccagatcgatcttcaagatcagccacatatagccgatggccacaaggaaagctaaaaactgcactgtgacacctacaaggaagtctgccgccgtactcttcagttttccagttggagacactgcttttctggctgcgatatccgacaagttggcctgggcgtgaagggcactctgaagcccgagaaaacatccatacagacacaccatggcaagcagcgcataaaaatactgcaccatcatattggcgtcttcatttccaagactgatctgcctgttctccaccatatcctgtgacatggctttcaccagtttttgcattccttccggatgttccttcatggtctgttctaccatcttgctcatttggatatattggtcgctgacctcttttaaaatcgtctggttcacgccgttttccttgactgtcagccttacattgtctcccagagtataaaaaccgtcgattttttcatccttgagcagttttttcgcttccttcaaggtcgtattcctgactttcagcagctggtcatcaccctttttagacagctgcgctgcaacttccttaaaaccctctgcattttttgtggccttcatctccacaaccgctaccggaacgggttccagcttctctgactccttcaaaagattcccaaatgcaaaataaaagagtgtcgccagtatgagaggaaacgcaaaacaccagaaaatagccgatttatttcttatggatgatttgaaatgatatttaaataaatgccaaaacatattctcgccccctaatccctcagctgttttcctgtgatctccaggaatacgtcatttaatgtgggaagctccgagtatactcttccaaaagatatctccctgtcagacagatatcccagaagattgaccagattatggcttcctccgctacactgcacatacagctttctgtcagaatattttgcctggaatacatgcttcatattttgaatcgcctgcaggtctttctcctttaggtcaaagacatctaccgtaattttttctcccatcttgatcatctgtttcaattcttcctttgttccaatggccagcggccgccccttatccatgatcagaatcctgctgcagatctgttccacttcctccatgtaatgagaggtataaataacagttgtcccctgccggtttaattccagtattccctccaggatcttatttcggctctgtgggtctacagccaccgtaggctcatccaggaaaatcagttttggcttatgtgcaatgccgcaggcaatgttaaggcatcttagaagacctcctgacagctttgggggataaaacttgcggaattcatccaactctacaaactggatggcctcctccacgagtttttttctctcctttttatctctcacatacagcccacagaaataatcaatgttctcaaagactgtcagttcatcaaaaactgccacattctgcatgaccacaccaatctctcttttactgtcataagagtcagcctccatcggttttccgaaaacctttatttcccccttgtcataggacagaagacccaggatacagttgatcgctgttgtcttacctgaaccattcggcccaagaagcccaaatacttctccctccctgacttccatattcaaatgatccaaagccaccaggtctttatagcgtttcacaagattttttatttcaatgatagattgttccataactccacccctttcttttgttatctttactatagcggatctcatccacttactacagtgccgtttgtcaagaaagaagatgacatttgtcatatcctacgatagtttttcttcattgtctccagtcgactctgaaaaggcctccttacgacaatgaagaaaaactatcgtagaagatatcttctattttctggtgaccgcctctttgtcatctagaaaagtaactgtcaaaaatgtacgaaagttatttatcactatcggagaagtgcattttaaaacacggtgtgccctatacaaatgacatattccacatgatatccgttcggctcttaaaatatctcactccaatcatgtagaaaatggacgtaatgtctgctggagaagggcttctgtcaaaaaaaggtgccacttttcgaaagttattcaccactattggaggagcgcatttcaaaagcgcgacggaaatagtggtgaataactcattcccttcgggtggacgtgcttcgcacgataaggtataccctctggggcataccgcattttatacccttcgggtggacgtgcttcgcacgataaggtataatattttaagtgacttttgttttaggagggcgttatgtccgtactcatagataaatctattttattattatttaccattcctcttctcctgcgggagagtggtatggtgcctgtcattgcgtttttgactgggtttactgcttcttgcgttctttccctgaaagatcatgagaagctgtctctatctgtctcatgtatgtatggcattctcagtatatcatttccttcttttgagttgtttcttcctctgttttgttatgactgtacacggaccagccggaagttttccggggcacttctcgttttgtgttccattccctttctgacgtcccacccgctgtttcttcgtatggggctgatcctcaatcttttgctctccatttttttatctgtacgcacacagaaactggacggcatgagggaagaattcaaaaaattaagggatgacagcacggagctgaatctgctgcttaataaaaagaaccgatatctgttggaaaaacaggaaacagaaatacaccttgcaactctgaaagagcggaacagaatcgcaagagaaatccatgacaatgtgggacacatgctctcacggtccattcttcagcttggtgcactgaaggctctcaaccaggaccctgctctttctctgccgctttctgagctgcataagacgctgaacacagccatggacagtatccgtacaagcgtgcacgggcttcaggaatcttccgtcagcctccatgacactgtatcggagatcagtcggggatatccagattataatgttgattttgtctacgatatctcagattctcccccgcagaatctccaatactgttttgcggccatcatcaaagaagcatttacaaatacgtcaaaacacagcaatgccaggcatatccgccttgtcctgagagaacatccatccttctatcagctgctgtttgaagacgatggaacgatcgagcccggctcctactcgtccggcatggggttatcgaatatgaaagaacggatcgaatcatttcacggaacgattcatatttcatatgaacatggttttaaaatatttatcacagttccgcacaatacatcatcttatcaactgggaggtaatacatgaatatcattatcatcgatgacgacaagcttgtttcatcttctttaaaaaccatattggagacgtctccagatatcatggtcaaggctttaggatcagatgggacagaagcgatttctctatatgacacctaccgccccgatgtactgttgatggatataaggatgaacggcatgaccggcatagaggctgcgagagagatccgcagaaagcatcccgatgctaagatcctgttcctaaccacgttttccgatgatgagtatatcatcgatgctctgaatatcggcgccaaaggctacattctgaaacaggattttgaaagcattcttcccgcccttcatgccgtagaaaatggccagaatgtatttggcaatgaaatcatctcaaaaataccggatctcattgcaagcagacagcagttttcttattctgattacggcatcaatgcaaaagagctccggctcatagaatacatagcaaaaggcatgagcaataaagaaatatctgaatgcctttatttgagtgagggaaccatacgaaattatctcagtgttatcctcgacaagctggaattaagagaccggacccagcttgccattttctactaccagcacagatagccggtcctttcataaggccggaaagacaggcaaaacttgacacctggccgtatgactagtaaaattatcgtaaccacatatactataaacaatttaggagggattttatttggaccccagtgtcatattaagattatgtatcttaattatcttattagctctgtcggcatttttttcgtcgtcggagacagcgcttacaacggtaaacgttcataccatccgtgcattagtggaggatggcaataagcatgcaaaacgagtattgcagttgatcgagaaccctgcatctatgctcagcagcatcctgatcggcaataaccttgtcaatatctctgccacatctctggccaccacattagctattgacgtcttcggaagcgccggagcagggatcgcaaccggtgttctcaccattctcgttttaattttcggagagatcaccccaaagacctatgcgaccatcaaaaatacaaaccttgcgctgcgcttcggcccgatcatatattatgtaacaaagatcctgacccctgtggtcatcgtcatcaataagctctctacgggccttcttatgcttctgcgcattgacgccaagcagtctagacaggtcatgacagagcgggaattgagaacgattgtagatgccagccacgaggacggtgtcattgaaaaagatgaaaaagaaatgatctataacgtatttgatttcaaggattccatcgctaaagatattatgatcccgaggatcgatattacctttgtatctgccgatgcttcctatgatgaggtcatggagctttttatggctacacagtattcccgcctcccggtatatgaggagagcaaggacaaggtcattggaatcgtttatttaaaggatatatatttttaccgcactctgcaccgcggtgaaatcttccatattcaggatgtgttgagaaaaccgttcttcacctatgagacacagaagatatccagtctgctggctcagatgcagcaggaaaatgtcagcttttcgattgtcctggatgagtacggtatcaccgcaggactgatcactctggaggatatcttagaggaactggtgggagagataagagatgaatatgacgacaacgaattagaaagtttccaggaacttgaggacggttcttatctcgtcaacgcttccctgaagcttgatgatctgaacgacttgatggatacagagatcgagtccgaggactatgactctgttggcggttatgtgatcgaactgttggatcaccttccttctgagggagagaccgcgtcagacgaatcttttgattttaaagtccggaaagtagaaaaaaacagactggaattgattcagatcacacgcagggccgaaaaagcctgacaaaaaaggaaagcataagatgttcatgctttccctttttattatcttcttttcttttcatatttcattttcgtcttaatgaaaccttccagctctcttaattttcttccccggtcttcgctgtttaatgggaaatccatggacagaccaatggaatccaggacagtctccgagatcctgtcctcatatcttctcaaaagttccaggcgttcctcattgctctcagcgtccagaaaacggatcagcagatcctgctgctctttttcatgtgtgtgttcctctggttttggttcctttttctccggtttcgggtgttctttctgtatctccggttcctttcgttcgatatgccgttccaggatgtcgttgatctggtggagatccgtgatgttctggtatgtctttacatctacgcgctcaaaacggtatttggcgctgaccccaggatatttttcacggtccacttgacttaaaaacattggcagcggtctggcataagttttataatccccgtataaggcctggtaaataacaagagcctctccagtctccgaatgttctgctactgtgacaatctgatacagcttatctttgaaatgtttataaaaatcccccggtctgggtattgctctctgctccatatgcattgactcccttctattactttctcctcttcccctctaaaggacggataaaatccgacacactgctgtctttattatacatcttttccacagaaaatacatggagatatttctttgccctggtcattcccacatagaacatgcgccgttcttcctcaagttcttccgtcttcacagcctttttatatggaatcacaccttcgtttacatcgatcaggaaaaccctctcatattccaagccttttgcgctgtgcagagtactgatgatcactccctgcttttcctgatttttttgatcggactgggctttcagctcttctgtatatgacctcataaactcaaaccattcttcataggtatcataggctctggccgtttcctgaagctcttccaacacgtcggtgagttcttcctcttttagtttccggatccttgcatactccgccagatatgcgttgtaccccacagactttcttatgtaggtgattgcaaggaacggtgtcatatccttcagaagcctcagatcttcctctaactcctcgatatagtcatacagccattctttatcctttgtcttttctttcagttcctgaaatgagatctcgggctgatccagatactctctgctgatataacgcttggggcggttcatgatacgcaggaacgttcctctcctgcggtctccaagtgccattctgatataatctatgatatctcttgcgatccaatgctcaaacaggctgggaatcccatccttgacggcaaacggaatattatactccatcagctttccaatcatagtcctggctcccaggttggtcctgaccagaatggcattctcctcgaacgggcagcctttctcgtattcttccctgagctttttggccacataaatacattcttcctgctggtctttaaatgtcctcaattccaccggtacctgcgcgcctttgcaggacctgatctcctttgcaaatcgctttttatttgcctttatcactttctgggctgcgtccacgatctccgggctggaacggtaattaatgtctaactgaattttttttgagtctttataatccctgggaaatccgagcatgatctctggctttgccccgcggaaccggtaaatagactgatcgtcatctcccacgataaacaggttgttcttcggcgctgccagcatctttatgatctcatactggattggtgaaatgtcctggaattcgtctacaaggatatactgatacttgttctgccatgcagccagcagatcttttcgttctttcagaagctgatatgtatagaccagaatgtcatcaaagtccatccattggtttctctggagctttttattatactcctgataaatcagctggaaaatactatccgcacagctttggctgtgataatactccatagaaagcagctgtcctttcacgagactgatctcactgatcagggaacgaaggaagtcgggttcatcccctgtttccagatcccggtccgtgatgatttcccggagcagtccatactttttgtgctcaggcaggatgcatccggcctgaagccggtacgcatgctttaaaattgtaaaaaatacagcatgaaaggtcccgaaagaaactggcagggatctccctgccagcttcataaaccgttctttcatttctgctgccgctgccttagtaaaggtaatgaccaaaatattggagggatttacctcacagtgctccacaagatactttgtccgttccgtgatcactgtagttttcccggatccagggccggccaggaccatcatcggaccatctttatgggtaatggcctgtttctgggcctcattccattctgtcatgaaagctctgcctctaacttttcaacagccgcatgcagtcttttcacagactcttcctttcctaaaatctccatgagctcagaagctcctcccggtgtcatctgttttcctgacacagcagtgcggaccggccacatgacgtagccatttttgacctcatggcttttagcgaatccaagcagggtctgatacagtgcatcgttgctaaagtcttcctgggcctcaaaaaccggcaggatctctttcaaaacttccagcgcggactcttttgtagtcttcatcttcttgtgctgatacatggaactatcatactccggcacttcctcaaagaaatcaatatgatccttgatctcagtgaacagctcgatccttgtcttcaccatagataaaatcttttcaatgtccacatccttcgtgatcacttcccggacatacggcatcgctgcagccttaaagctttcatcgtccatggctttgatatattctccgttcatccatgaaagctttgtcatatcaaatactgccggtgtcttggacatatgatgatagtcgaacgcctcttccagctcttttaaggagaagatctccctctcccctcccgggctccagccaagcagtgctacaaagtttacgatcgtatccggaagatatcctgcctccagcagatcctcaaaagaagaatgtccgcttcgtttgctcagcttcttatgctcctcatccgtgatcagagggcagtgcacataaacaggcttttcccatccaaatgcatcatatagacggttgtacttcggcgtggaagaaagatattcattgccacggacaacatgggtgatccccatcagatgatcgtccaccacatttgcgaagttataggttggataaccgtcggacttgatcaagatcatatcatccaactctatattgtccactgtgatctcaccgtaaatctcatcggtaaatgtggtcgttccttctgttggattgttctggcggatcacatacgggattcctgcgttcagtttttcttccacttcttcatcgctcagattcagacagtgcttgtcgtaatggcttacaaccacatctcctgacttcaccttgaggctctccaggcgttcctcgtcacagaaacagtagtatgcctctcctttttcaatcagcttcttggcatagtccagataaatacctgccgcctggcgctcactctgaacatagggcccgcagcctccgtccttatccggcccttcatcgtggacaagccctgctttcgccagtgtgttataaataatatccaccgctccttctaccagacgctcctgatctgtatcttcaatacgaagcagaaaatctccatcttcgtgttttgcaatcaaatacgcatataatgcggttcttaaattccctacatgcattcttccagtagggcttggggcaaatcttgttcttactttactcatctgttttaaatcctttctttcgttatcctgtctattatctcaagaaccctgtctccggtcaagcctcccgccgtattttcaaagtttcagcggctctaaactacgttcgaggattcctttcagttctgcgatcaaaacaccgtaattgacgatcggcaccttcgctctcacagatgaagcaatcctgtgtttcatctcctttggattcagcgtacagcctccgcagtgtacgatcaggtcataaccgcttaagtcttccggaaaggtactgccgctggatgtttcaaagttcagcttctttcccgtatattctgtcagccaccttggaatcttcacggttccgatatcatcgcactggcggtgatgggtgcatccttccgcgatcaaaatcctggatccgtccttcaactgatccacaactctggcccccttcacttcctcttcaaggtcgcctttgtatctggcaaacagaatggaaaaggatgtgagaggaatatcctccggcactatagcagacacctgttcaaatgcctgcgagtccgtgatgatcagcgcaggagttcttccaatatcctggagggtttgttcaagttccgattccctcactacaatggaacatgccccgctctccaaaatatcccggatcgtctgctgctgtggcaggatcagacgccccttcggcgccgctgagtctataggaactacaagtaccacaaaatcccccggtaagatcagatctcccacgatctttttgtgcttgtcttcctggggaatcagctttccgatggcttccttcagctcataaattccttcctttgtaatggcactgacaaaacaagagttttcctggtctctgcggctgtcactgccggttacgtctgccttattatagacgatcagataaggaagcttccgttccttgatcagatcgagaattccatcttcaaactctgtaagccctgtcccggcatcggcaatcaccagcgcaatatctgtctttcggagaacttcctttgccttgtccaccctcttttgtcccagttcgccctcatcatccaggcccggtgtgtcgatcatcaccaccggccccagcggcagaagctccatggccttataaaccggatcagttgttgttcccttcacatcggatacaatggctagttcctggtccgtcaacgcattgataatactggatttccccgcattccttttcccaaacaatgcgatatgagtcctgtccccccttggtgtctcatttaaacccatcgtctgtctccttttcctgttccttagttcgttattttccttttcagtatataccaccgaaacttttgaatcaatagaacaaaaccaatgaaatctgcatatataacaataaaaggcaaaccagtccaatgactgctccgccttttattttaaatgagtgaaattatttattacatgttaaacaatcaattatcagaaaacaaaagtcgccgccttctgacagtgaagaaaaactcagctcatcaacagtggaatcatggctcctcctaagctgtacactatgatcgtcaccggtcttcccagaataagaatggttaaaaactttctccatgacatgtctgtcagtccggcgatcatacaaagtacgtcgtcaggtgcacatggaagaagaattgccgccgtaaatactacatcaaatcttttcccagtcaaaaatttttctctcgtcttttcatacgtctcatcacttacaaacagacgaataaatttttctccgtattgtcttgcaagataaaaattgatgcaggaaccgatgaggattccaatggcactgtacaaaaatccataccacggaccgaaaaagacaacccccgccagacaggtaagacctcccggaatcactgcgatcaccacctgagcaacctgaatgagtataaacaggagcggtccccaaaaactgctgtgccggatgaacaactccatctgctgcctgtttgtaaaaattcctttttgatatccatatatagagaatatgatcaacgctccgatcaataccagagttgtgagatttgtcgctttttttacagcttgtctgctcataaactgccaccgcctttcttttactatctctatcatagcggacagttctgaaatccagcggacaaaaaagtaacaaatttcttacaatatcaaatcctatcttgaatggatgtacttctctatgacatctgcagctcttttaatctcctctgcatccgtcacaaagcgctcatactcactcatcataggcagccccatgctgacatctggtttgcggtattccatctggctttcaaccgtcttcttgcctgacatatgaaacgcctggaaaggggcttctttcaaaaaatcttcaatgacaccggcattcactcccgcaccgaccatgacagtgatatcttttcctgccacttccagaaggttctttaaaagttctttaccctcggcacagcaatttttctgcccagaagtgagcactgtgtcaattcccagttcaatggcttcgatcatcgcctcataagggttgacacacacatcaaacgctctgttcagtgtgacagacatccccattgttttctgcatcagactttccatgcgtctcatatcgagcctgccatcctttgtaaggcatccgaataccacaccgtctgctcccagctcccggaaatgatggatctcacttctcataagcacaatctcttcttccgtgtataaaaagtctccaaatctgggccggatcaatacgtggactgggatgtcgagacggatcttgatcatctccaaaagctttgaactcggcgtagttcctcctatcatcagatcactgcagagttccagccgttttgtcccggcttcttttgcgatcactgcagactcaaatgaatccacacagcattccaacataatctctcccatagtcattacctcctagaaaaatgacagctgctccgcctgaaactgagcattcttttcttttatgatgcttccgaaatccgcctttaccttgtacttagcgcggacctctgaaatgatttgatacagtttctttttatagtccttataatctttcccgtagcaaaacaagtttgtcagtgcttgctcatactgtggaaactcttctcttataaattgaaaaaaaacggcacgagtcggtccctttaagtttaaatttgacgttatcagatagtggatatctctatgctttgtctcagaaaatacagcctccagattctctctggtgcttgtgagatatggaacaatgggcatcatatggacacctgtgctggcgtttgtcttccggaattctcccagtacttcaaacctccggctggaagaaacacctcccggctctaatacgccccttatatcttcatccatggttgtgatcgtagccgcaatattcacataggctactctggataactgatcgatcaagtcgtaatctctcagtattaaatcagacttggtagaaatgattgccggattctcaaatcggattaaaagctttaaaagctccggcatgatcttatagtgtgcctcggcaggctggtaattgtctgtaacacctccaagattgattacctggcggtcccagtttctgctctttaactgccgttccagccgttctgcaatgttcgtcttcacaaaaatctcactgtagaaatcatctgactccatgtattcatgggaataaagcgcaaaacagtattggcagcaatgggcacagcccctgtatatattcaaatcccaatggtagggaaaccgtccgcggacacggttgcaggccgcggaacattgaatctccttataagctctctctttcattcccgttatcccataaggaaatctaaaatattcattccatcggaagtctggctcctatataattcagtaaaaccgcagcgggtacagctgatggtaataaactttttattctgtacatcaaaaattttagcaaaattccctccggtggcctgaaactgatcatgctcaaaggaattgcatccgcacttgggacatacgaactgttttctctccatattctggtccataaaattctccttttttcactttttcgtaactgtcttcttactctatattataatcaaaaaaatgaattgcgtaaacaaatttgaagaactttccaatggaataaaaaaagactctaaggagatcccccttttaatgggaagatatctccaaagagtctgtaaaaaccaaaagcctagcttctagctctttcttctaataaagcttttacttctgcttctgtcgttaactgcataacttcatctgctaaagccttagcttcatccatagtccataaggacatcacttttctcgtagcgagaattgcggttgcgctaacagagaattcgttcaatccgaatgcaagaagtaccggtacaagcaatggatcactggcagcttctccacacataccagccatgattccctctttgtttgcagcaccgatgatgttccggatagaacgcagcactgcagggttatatgctgaatacaggtaagctacatcggcatttcctctgtcggctgccattgtgtaaccagtcagatcgttggtaccgatgctgaagaaatctgcttcttttgctaaaatgtcggcaatcaaacttgcagctgcggtttccatcataactccgacttctacgtctttgttgtatgcgacaccttctgcatctaattctgccttgatctcttcgatcaaagcattcactgcacggagctcatccacacatgttacaagcggaaccatgatacgaatctttccgaacgcactggctcttaataaagctctcagctgaggtctgtagatatcaggacgctgcagacagaaacgcactgcacggaaaccaaggaatgggttctcttctgtctccagtccaagatacggaagtgctttgtcgcctccgatatccagagtacggataatgacaggttttccttccagagtctctgcaactgtcttatatgcctggaactgctcttcttctgtcggcacgctgtcacggtccatgaataagaactccgtacggaataatcccacaccttctccatcacactcaacaacctttgcagcctcatccggtccgccgatgttggcaaccagttcaaccacatgtccgtcagcagtctgagacgcctgtccgataaacttggacagagcagctttctcttcaagatatgctgcttttttagccttgtagtcttctaaaacggaatcctcaggattgatgtaagcctctcctgttgcgccgtctaatacgacaacatctccgtccttgacggtagagacaatgttttcaacactaagtaccgcagggatctccatagaacggcagatgatggcagagtgggaagtctttcctccgatctctgtcaatacaccttcaacgtttgctggattgataccggcagtcatagacggggtcaaatcctctgctaccaggatcgttccctctggaacggcgctgatatcaacttcttcaactcccaataatattttgattaaccgagttttgatgtctcctaagtcagatgctctctgttgggttaattcatcttcagccatggcaaaaatctgtgcaaagaaatcacatgcttcttcgactgcggcttccgcattgatcttttcatcatcgatctttgcgtcaatctgctctttgatggcagggtcctgaatcatgaggatatgtccctctaagatctcagattcctgttctccagcagtcaccttcatggcctccaccatcttggttgtcttgtcgatgaacacttcgatcgcttcgcctaatcttttcttttctgcctcagcgtctgcaatagtctccttcttgtaatccaggctctgttccttgatcacaactacttttccgatgccgattccagcagatgctccaatacctttatacatatgccacctgtcccctttgtaaaatgagattaattattcacctaaaccagattcaattaattctgtcgcatgcgctaatgcagcttcctcatcaggaccttcacagacaagttcaatctctgaaccacatttgatacatgcaccgatgatgttcagaaggctctttgcattgattttcttgtcttcgaaaacgatggtgacatcagattcaaactttgttactgcctttgctaaaactcctgctggtctcatgtgtaatccctgctcgttttcaattacaaacttcttagataccataataaaatctccttcattctgtaaattttagttaataaatgacggactgcctgaaaaaaaacaaaaagaccccttaataaatgcgcgaatatctgcttacatctatcaaaaaggtcttgcctgccttaccagtcacaatccaatattcaatgtctaaattttatcaaaaacctgtcctgctgtcaactgaaaccaaaacaaattcctactggatcccagcttctaaaatcaggcgtttcacataaatgatcaggtacattttttcatccacggacaaagtatagccgtaatgcccctcaatgtgttccacgattttctggctgcatatatatgcctccggatattttttctggtttctctcgtaaaattccacatcgtcctcttcctcttccgcggaatgggattctccggacttaatactgttctccagatattccagatgtgtgataaacctttggtaggccggcatctctgtccgaaagctaatttcataaaattcttggatgatggccaggacctcctggataaatggacttttttccctctgatccagcgtaaagatcttttcgatctttgtcttgtccagttcatcccccgcctttttgcggaatcctatgccctttcccatgagaatcacctcatggttgttcgtgtcataggtactgaccacattattgttaatcactttctgtattatcatacgtcctcctacaccattcctaatatttcttttggtatataagcctccacgtaaatgccgtcatcccggtattcctcttttaaaagctggccgtggtttctgatggcctggatctttcccgcctcgtcataaccgtattttttctctaaataaattttctgtctgctaaggacgtcttcgattacatttaagagatccccggttccagtaccctctttggcggaaatctttacagtttcatccgcatggacatccttcaaaaaaatgcctttatctgcctggtctatcttattaaatgccgtgatcacaggcgtatccttgatgccgagctgatttaatgtctcatagacagcctccatctgctgctccatacatggattggagcagtcaaccacgtgaaggatcacatcactgtacttagcctcttccagtgtactcttaaatgcatctaccaaatgatgcggaagctttctgataaatccaaccgtatccgtcataagaatggtctgcccgctgtttaacacaacactttttgtggtgggatccagtgtggcaaacagctgatcctcttccaggactccggcatccgtaaagtaatttaacagcgtggatttcccggcattggtataaccgacaatacagaccacaggtgtatggtttctctgccgctgctttctctggacttccctatgtttgatcaccccggaaagttcagcttttaaatgggatatccgggtgcggatcaggcgcctgtccatctcaagcttcttttctcccggccctctcgtgccgattccgccgcctagccttgaaaggcttactccctttccggtcagctttgtggcgcggtatctgagctgggccagttccacctggatctttccctcttttgttctggcacgcttagcgaaaatgtccaggatcaccaatgtccggtccatcaccttgatatccagtatctgtgagagatttgcaagctgtgccggtgagagttcatcgtcacacacaataccgtctgcctctgtctcaaataaaagatcccggatctcctctatcttaccttttcccacataagtaccgggatggacctgttctctggcctggagaatgcttccttccactaaagctcctgccgtccttgtaagttcttctaactcttccagggattcctcggcttccctcggctctcccagacacacacccaccaggatcactctttcttttttctgctccagtatttcttccattctgttcctttcctgccgctttgcttctaacaataaaaatttaaatatttttcacagccatcgtcaatgctttttcctttggagtcatttcttgttcccctttttcatacagcgtctgcttctttttcatttcttcctgctctgttttatattttgcgatatccatgccaatatactcagaagcggtcccatggctccattccattccagctccttccgccgacacagcatcaatcacttttttgtccttgtctgcagcaaggatcactatatattctttgttaaaaacggttcccttacacaacccaaacccaatctgataatcttttccataggtctccctgaaatctgcatacagttttctcacctcatctgactgctgcttgatcatataagaatatccgataaatgccagtatagcgatcaccatgacaaaagccactgcaattttcatccacataacaaaccctccgtaataaattcttcaaagtatatacatccaaaccgcgaaaaaatgaaggattcctcccatcgccaggaccaaaggatagacagggtatatcctttttccccgcaggctgtgtatgactatccctaaagtgcataatacattccctgctgacagcagataaaatcctatacgccctatatcattgatgtaaaaagccgcacaaaaaataggaagccatgcattcactccgatgcagattccccagacactgtggaatcttttcatattaatagatgcaaaggtgattcccagcacggcgatccccacaaggatgccaaacagactccatgcgcaagccgcgtgctcttgtcttaaaacacctaaaaacaatggaaaccatccaaagactggcactaggactgatatgcagtgaaggagcacaaggaatacgttttttcccttacaaggcttgagcccataaaagattgatgcagcaatatgaaacaagatcaaccccgccccataaagacaggaggccaaaattctgctgccgctgccagctcccgctgactgaatcacacacaataccaatgccgtaatactaaacagaacccctatgatatgaaaaatcatataaaatatctgcttttttctttccatcacgttcacaaaatattgatcctttctcttttgctgttcttaatgattataagataggcaaaaaaaaataacaatacatatctattgttattttacagcagtttccttataatggtattaaagaatcgccaaccgtgaaaagaccgaaaggagattcacattatgaaaaaagcatggatcatatcagctccgattttgtcttatttttcagcatttctattgatagaggcagaaactagggatctagtcaaccctgatactgtaataacaacattcatactaaaatgtaccttctttatattgacaggatttcttgtctgcctgttttcaaaaaatgtggcactcgttataaagcacagatccgtaaatatcatatgcgcagccgaaatcctgataccggtcataatctggagatttctgaccagccaagaatatatgggcaatttagaatattttctttgtacctattttatttttctcggcagttatcttcatgctcttgttagctatcttaccaaaaaatccggatgaaatatctttttgatatctcatccggatttatgccgtgattgaaaatttgttgtttagcctcttgttttaccgccggccacgttgatggttactccatgtacataagaagatctctggcttgccaggtacacacacatgtctgccacttcagaaagctttccagatcttccaagcggtgtggtggatgtcttgctgtatcctgctcttaagtcctccactgtgatccctcttgtgtaggcaagagctgattcgtatgctaaggtccttaagcctgtggcttccatgatccctggtgccactcctactacgcgcactccttgttttcctaactctttcgcccagcttctggttagagaattcaccgcgttctttgtcgccgcgtacacgctctgtccctcagaaccttccagtccactctctgaggacatattgatgatgacgccctctcctttttccacaaggatccttcccactgcctgagcacagaagaacactccttttaagttgacgctgcacactttatcccacactgcttcgtctaactcatactgtccttttggctcgttcggatctaccaaaagccttgggatgttgattcctgcgttgtttactaacacatccacggtaccgtatgtatccaccacttctttgaccatggcgtccacatcttttgcgctggtcacatcagtcttaacataatggaacctgccgtctgctgcctcgaacaccggtgcttccggcgccatatcagagacaacaacattacatcctacatttaaaaacccctgggctgctgctttcccgatcccggatgcccctccggtcacgatgacggtcttgccgtcaagtcccagccatgattcattcataataaaagccctccaattcaaagcttaaaacttatatcttatcttctgccactgactgttcatgttctgacagattcttaaaggaatcccattttgtagaaaacagcagcaggaacagactgtcgatcactgccattgcagccatcctggtaaagctgacctgatcgtggaacacctgctctcttgtcgctgtcacgatcgtgtagtggctcgcctctgcaagcggcgatttggcctgattcgtgatcgccacaacttctacgccgttttcctttgcgatatttgccatgttgagcagatgcctggaagctccggaggctgagatggcgatcatcacgtcgccttttctcatggtcctggcataagcttcctgggtttcccagatagtagagctgactgccggaatccccagctggttaaacttataggatccgtccagagccacggggatcgtattccccatagcggtaaactccactacgtttgcattcaggatcaggtctatgatctctctgagcatctttccgtcgatgctgctcagcgtttccttcagttcttccatcttgctggccatgatatttttcagcgactgttcaatgttgtctatgctgatctcattggaaaattcatgatcatcctgctcccgcatctcctttgccatcttgatcttcagatggtggtaaccgttgcacccgatctttttgcaaaaccggacaattgtagcctgacttgcttcacatgcagcagccagctctgatactgacatctcgatcgccttttcctgatggttcatcagataatctgccacctttttttcggcatcaaacaaactgtcatacgcggaaaatatctgattccttaccgttgcttcctttgccataaaactctccctttcaaatctctggagcgttttctaaaaaatatgtctctgcttccgcgctccataagtgaccgtgtttttccagaattggacggagtccttctattattttattgtcacttatttcacccaggttgtcaacttctgtcaacggaaattcccggtgtgtgtacacaacctttttccctccgttgagctttggaagctgttttgtcgtttctgccacctgatccagtcccagaacatgggtggcgatttttgccacattgacaatcttgttttcgatcagttcaatagactgtttcatatcgtccgtatttccgccgctggtacctataaagtgtgtagagttatagtgcacattgtagaagtttaccggagctgtaaatcctgtatcggcaggcccagaaaagaagttcagacagccgtcaaatgccagcagtttttctccctgtgtcaccatctgttcattgggcgcaaatacaaacacatcatcaaatccgcgctgatcctctgtcatctcccgaagcggaacactgaagtcttccatctgttttgtattgacatagacaagcttcactccctggcgtttggcctcttcctctgtgtaaagttttcttgccagatccagcttggattctgtccttcccgtgataaccagcagacctggtttcttcggtccatgcagggcaaagtcgatggccaggaatcccatggggccggtagcccctaagattgccagatttccgccctctttgatacccatgacatggtcgtagctgtacatttttttatgatgatactgggcgttaaaggcccctaccacacaggagagcggctccaccagagagccttcaaagaaggactccccgttatattttaaaagagaaccgttttccatgatctgattcatcagtacgatcttagtggcatctcctcccgcataaggataggaatatcccggcgcaaaaccgttcttcgtcccaatgttcggctggatgacaaacttatcccctgcatgatactggtctttccacttttctcctacttccaggatcacaccgcagaattcatgtcccagaatgattggattttctttgatgtcttccggcacttttttatgcttttctccctgtatggccgctttatagctggacatacacaggctgtctgtgactacctccgcaagaatctcatcctctttgatcggaggaagctcaaattcttccagtctgatatcttcccgtccatacagtctcactgcttttgtcttcattcttcactcctcccagagaatctttacgctcctaaaatacctaaaccataaccgatgataccaactgcaaataagatgaagatgatcaggatcgggctgatgtttttctttaacagacggcagacaactaaggtaaggacaagtcccagcagtcccggcagtaactggtctaaaatgttctgcactgttgtgatggttgttttaccgtttgctgtaaccttagatacaaccaaaggcacgttgatggtggtccacttggatacgagggcacccatgacaaacaatcccaggatagatgcacattctgtcaccttctgaagcatgttgcctgcaagattttttactaaatccagtccctttttatatccgaattccagtccaaaatataacgctgccagacggactgcattaaacagtacgaagaataaaagcggtcccagcacatttccagtcaatgccatagatgcaccgatggctgccgtgatcgggcggagtgttccccagaagatcggatcgccgactccgcacagaggtcccattagaccaatcttgatacttccgatggttccctcgtcaatatccgctccgtttgcttttgtctcttcaagagccgctgtcacaccgagcaccggtcctacacatcccggtgttacgttaaagaatgtcatgtggcgctttaatgcttctgactgctccttctttgtatggtaaagccgtttgattgccggcaccatatcaaatgcaaacccaagagcatgaattctctcaaagttgaacgaggcctgctggaagttgctccttataaacatgttgacacggtctttttttgtcagagtattttctgtctttttcatatcttcactcatatcttatttcctcccttttcctaatctaactcatcgtctaaatcgtcatccaggtccgcatccactgatgccccgcctgccggagccgcggctgccacagctgctttcggcatattgaactttggatttagctgtatgtaaataagtccgaacacgatacccatgatgccaaaggcaactaagttaaagtctgtgaatgccgcaatgacgaatcccaagaagaaaaacggcatcaggtatttcgctcccatcatgttcaataccatcgcataacccacaacaacgataaatccacctgctacggaaagtccggttgtgatcacgtcagggatcatgttgagcatattctggactccggaaggatttacgaccatggatactaaaagacaagggatcgcaacacgcagtgcctgtactgccagagcagtgatatggcacacatcgatcatcctgaagtttgcatcttctgcatacttatctgctgcatgctggaagaaaatagtgactgtccttgccaatacggtcagtacctgtcctgcaactgctaccggaagcgcgatggcgataccggctgatacagactggttaccaacgatgaccagaatggtggagatgacactggcaagagcagagtccggagactgtgcagctccgatattcatccatccaagtgcgatcatttcaagagttcctccgagcatgattccggtctttacatcaccgaggatgattccgactaaggtacatgcgatcaatggtctgtgtgtctggaatgaatccagtacacttcccattcctacgatacatgatacaataaacagcaatacaatttgaattcctgataatcccataatagttcctccctttcttttcctctatcagattttggtcattaagtcgattttgttgtctgtagctaccggacgaatctccagttcaacgccaagttcatgcattctccggaacgcatccttgtcactttcatctacagatactgctttggtgatctgttcttttccggtcttgaatgccattcccccgatgtttacacttgtgatcggaactcccccttcgatcatcctcaatacgtcctgcggacatgtgaacaaaagaaatacagtatcattttcatactttggattgttgtagacacgaattgcctttgcgatatccacaacgcttactttgattcccggaggccccacctgtaatagtaaggtctttctgatatcgtcctttgccacctcatcgctgcaaacgataatcctctccgcatttgcttcctttgcccagactgtagccacctgtccgtgaatcagcctgtcatcgatcctgcataaattgatcttcattataactcatcctcctcttcttcttcgttcttttggtttaacagagttttacatgattttatgtaagtatcttttccaagtttctcatacacttcccatggacgaatccctgtaacagtctccctgatgccaaccacatcgaggagcatcggcaggctcagaccggaaatcacgtctgtgttctctgtctctgccgcgatctgaaatgccgcattataaggacttcccccaaacagatccactaagaacaagacatcttctccctccgtcatatgttccctgtatttttgtttcaggtcgtctgcgttttcacctggaacaaaagtaacagccacggcatcttcaatttgaccgaataccatgtttgctgaattgactgcttcctgtgccagttgcccgtgggcagcgatgatcagtttcatacatttcctccttcaaagtaactttattttgtttcataatcttatgtgaaactttattttatgtttatattttaactataaaattttattttgtcaatacatttatgtaagaaacaaaactttatttcgcacaaacctgacagatgaaatctgtgcgttttgcacaaaaaaaacgtatgtccccaattggaacatacgcccttatttatcttgtctctaaaaatgtagcttctttctttcctttctcatcctttggataagcttttacatattctttggcatatcggtaggctgtcttgaaatcaaactttgcctcatatagactgatccttgcaaacatcagctcttttttctttgtggaaagcttctgctttaaggccttatttacaacagcaagccccttgtcgtactttttctgtttcgccaggattccgtattttgcatagtagctctctccctcagaaggaagagcggcgatgccttcgtcacacacctcaagagccttttcctcctgcccaagccccacataacagagggctttccactcataagctcttccctgcggcttcttttctatgatctggtcataaacatggaccgcgtccttataccgtttcagctggtagagtgattccgcctgataaaacatcacatcgtttttctggctcgtccacaccagtgtcttctttccgcacgctttttgaaatgcctcatatgctttctggtattcgcctttcgtgaggtattcaatcccttcattccccgaaagccgctgtgttacatattcatatccaagaaatcctgctccgccgatcacaatgaccagcaccgcaatcaggactgcctttagttttttatccatataaattctcctttacacttcaagtcattatgattttaacacaacatgcgcaaaatttcatctgaaaaagctaattgacattatcctgcgatcgttttctgatactttttgtacaaaagaatcgctgccaaagctgccgtcgtctctgctatgggaaaggagacccatattccattggcacccatttttgaaaccaggatcagggacaggatcggaataataaaaaactgtctcagggtagaaactgccagagatgcagttcctctgcccagagcctcaaatacaccggaaaacaccactccagctgctgaaaaaataaagccgatgctgatgatcctaaaggccataactcccatttccatcaaagagcctcctgcatggaacaatcccatgatctgtgttggaaaagcacagaacagcacagttcctgccgccatgatcccgcctgtcaccaacaggctgaaacggattgtctcttttactctcttatcctggccggcaccgtaattataactgatgatgggccgcatgccctggatcagtccattggacggcatataaataaaagtctgcaccttaaaatagatccccaggactgcaatacccacctctgagatccctgccagtatcccatttaaaatagaaatcaggatggaaggcagagacatagtaatagcagagggaaccgctaccatatagatcctttttagcagagctctgtcaaaggaaaatccccggaatctgatgtgaatggagtgttctttgcgaaacagcaggaaaacagcaagtagacaggcactccactgcccaatcactgtggctatggccgctccggctactccaagtctcggaaatatcccccagccgaaaataaacagaggatctaatatgatgttaatcagtgcacccatagcctgtagtatcatgggaactttcatgtttcccatggcttgaaaaatcttttctatggccacatggacaagggacccggcagacaagagaaccacgatatatgtatattgactactcagtgccaatacttccggatcttttgtaaacatgcccagataggcacggattcccaaaagcccgattgcgataaaaaataaagcgtgcacaccggccagcaccagtccgtgaacggcagcctgatctgccttttttgtatctcctgttccgtggctcatggcgatacacgcattgatccccacgccaagcccgactcccaccgataagatcagattctgcaaaggataggccagagaaatcgccgtgatggcattcactcccagcctggccgcaaacatgctgtctacaatattatagagggattggatcaacatggagaccatcggagggatcgccatggagatcagcaggggaaataccttttttgtacccattgggtttgttgcagtatccataatttctcctctcatcatcataaaaaaagctatatatttttctgtttgtgaatcagaaacagaaaaatatatagcttttctaaagcagagtcagaatatcatattggaaaagtacctgtcaagtgatgaagaaaaaatatttaaaatccttatacggttttgtgtctatccatcttcatttgaggaaaatgatacctagaacaactttatctttcgtgagtgtgttactttttctattttgactgatccggatatcataatccccttaggaattatattacatatgggcatatttaacaagaactacataaaaaatactatcatatcatttacattactttacgatccaaagtcccttttgagaggaaccctccctttgtaaacttccgttattacgcatttttttcatataatattttacggtgttcaaattcatatttaacaaacaatccagttgtttttgtgacaaatccggtctctgtttaagcagatcaatgatagcctgctctgtagtttgattagcttgggtagtggcttgaagaacatctggccctcttcctatatcaaatgagtagccatcatctaagggtacaacaatacgaaatacatcaccctctacaaattcaggctcatttccagaatagtatttacaatatttaaataaattccgcacaccagacccaagttgatcggcatatccaatattcctaaaaaacgatgcaatgacagggttcttcggatttggttccagattttctggtgtaataaatgcatcctgagatgccctgtttgcgttttccacatacatttggtttctttcaatcacaagctttgcctgataagaactggtaaatgtctctgtaaatttaattactattcgggcagactgtccctgacacaaagtttcccataccccacctgcgaatttggatatttcgtaaatcctggaagctctctagcccctttctgcagatatgctttgatcttctccccgtataagaaaggatcgtttccttttataattccccactccatcaaaagagcggcactgccagtcacaaacggtgtggccatggatgttccactcatccttgtgttccctcctcccggacttgcccccaagattcccacacccggagctgcgagatcaggtttttccatacaaatattcagatctcccctgccggagaatgaagcatacgaattattatacgcatcataagcaccgactgaaatcacacttcttgccgtagacgggatcgtcagggtaagatcaaggcttggctccagaaatctggtcccctcattggtccccgcagacacaggcagccacatatagtaatcccctcttaccacctgcacgggttctatgtaaagcagccactgtccgctctctatctcttccctctggggtacaaacgaaaaataaatttcctggagacggttgtaaggcgtgggagaaccatagtagacatacactgtggtagccccgtaacggtaatcggtccttcccgtctggtccaggatctcccgccgttcccccgaagggcttgtaagccagatcctgaatcgatccacataatttttccagagctgaagattcaggctctgttcatatggcgcaacagcaaaaatcacttcttctgactgcctcagacatccctgccgatgcctgcctgaatctccttcgtttccggtgccgatgcagatggctgtctgccattggtttgccatctgggcaatatacgtctcaagaagagaatttccccggtggtctccataattatttccgtagcttaaattaatactgaccggtttgccctctgcctcggcataccggatcacaaactccagagcagtcatcagctgggtcgtttttggaaacccctgttctattgtaactcctaattttactacaatcagagaggccctgtctgccaccccctgtcttccggcacagatagaggccacatgggtcccatggccgttggtatccctgctcggaacaatctgtcttgcctcggaagatggtgcatgcagcgcgcggttgatctcctccctgctatagacactcccctctaaaaaaccttccggcggatttcccgggatggtctggtcccacaacacttcgatcaccgtatctccctgggcatcggagaagtccgggtgaaaaatatcaatgcccgtatcaatcactgccacataaacaccctcgccgcgcagaccgcttcttccttccctgacagacagaatacaggaagccgcgatacccgcctggtcgctgagcagaaggcttttgggtttttccatataaatgacctggggcagcctggaaaatgcatcgatgtcctgttctggcagataaaccacggcatactcattgctcagtttttctatacggcctccttccggcaccggcagttcattgatatctccaatatatcgtatgatcaattcccacagattctgcgccctgtcgtatcccacatccagatctctgctcttttcccgttcttccggtgttaaactcaaggaaagattcagctggttttctaatttttcatccataataatctccgcaattcccctgttatttaaatctatgaaccgtctcatctcttctatttatagtttttatctattaatactactgaaccggaggttttccacccatttccaaaacaatcggctcctttctatttgcttttcatataacatagaacatttatttcatgtaaagtagaagcatcaagaaggaggaatgttatgagaaataaacaattatttgctgtactggctgccgcagtcctttctgctgctgtcctgtccggatgcagctcaaaagacaaagaaacatccaagaaggaaaccaccacactgaccatctccgcagctgccagccttacggatgtaacaaaagacatcgccaagaaatataaagaaaaggagccccatgtaaagctcaatttctcttatggaagttccggcgcccttcagacacagatcgaagaaggcgcagaggtggatatctttatgtcagccgcccagaaacaaatggacgccctctccaaaaagaatctagtcaacaaaaaatcacgtgtggaactgctggagaacaaactggtgctgatcgttccaaaagacagcaagacttccatcaagtcctttgaggatctggcaaaatccagtgtcaaaaaagtggcgcttggtgagccaaaggccgttcctgttggacagtattccgaaggggtcttccaaaaactcggaatattagataaaattaaagagaaagcaaactatggaagcgatgtgcgccaggtcctcacctgggtggaaagcggcgaggtggactgcggagttgtctacatgacagatgctaaaatctccgacaaaataaccgttgtctgtgaagctccaaaaaaggctgccgatcctgtcatttatcctgtcgccgtattacaagacagcaaacacaaggacgaagcccaaaagtttgtagattacttaaaaactgacgaaatactgaagctgtttgagtcttacggctttcaaagggtaaaataatgtttgatttatcaccgctgtggatttcattaaaagtagccctgctggctaccatatttacctttatactaggcatctgcgctgcccgggcagtagtaaaactaaaacatggacaggctgtcattgacggcctgttcactctgcctttagtcctgccccccacagttgtaggcttttttctgttgctgttcttcggaaaaaacagtctgatcggacaattcttttcccggtttgacttttcctttgtattttcatggcagggggctgtcatcgcctccaccgttgtcgcatttccgctgatgtaccgcacggtccgcggggctctggaacagatcgacccagaatacctgtacgcagcccggactcttggtatgacagagggaaaaatattcagaaagatcatcattcccatcgcctggcccgggatcctggcaggaacaatcctttcctttgcccgggccctgggtgaattcggtgctaccatcatgatcgcaggaaatatccccggcaagactcagacaatgtcagtggctgtttatacggcagtacaggcaggcgaccgtgaaagcgcatatctttgggtcattgtcatcatctgtttttcttttgtaatgatgatcgccatgaacttctggacatcgttccaggtacgtttagcccgccggaaaggatggaaaaaatgagcctttatgtagacatcgaaaaacgtttccctgagttctgcctgaaaacaaagtttgaggctgaaaacgaagtgctttccattctgggtgcctccggctgcggaaaaagcctcaccttaaagtgcattgcaggaatcgagacgccggaccggggacgtatcgtaatggacggcagggttttatttgactcaaaaaaacggatcaacctgcccaccagggaccgaaacatcggatatctatttcaaaactatgccctgtttccccatatgacagtaaaggaaaacattgcatgcggacttgtctccaaacatataaaagacgttagctgctggattgaaaagttctatctgacaggacttgaagatcattatccggctcagctgtccggcggacagcagcagcgcacggcccttgcaaggatgctcgcctccaaccccaccctgatcatgctggatgaacccttttctgcactggatgactacctgaaatggcagctggaacaggaacttaggcgcaccatccttgcctttcccggcactgttttgtttgtctcccataaccgtgacgaagtctttcgtatgtctgacaggatcgctgtcatgggaaacggccaattaaaaaccatgcagtcaaaaaaagaactgtttcaaaacccgaaatcactggaggcggcgcttctcaccggttgcaagaatctgacccatgcagaatatgtggatgaacataccttctttgcttccgactggaatattacgttgacatcttccgttccagttccaagagatatcaaatacgctggattccgggcccattatttttctattgtgccggacggatctctttccaataccatggagtgcaggatcactgacatgattgaagataccttttccatgatccttttattcagggagacgcacaatctgaaaacgggagactggacaggtctgcggtttgagcttccaaaaaacatatggcgcagacaggaattcaaggatacactttttctcagattccccgaagaccggttcttatttatgaaagaggacccggcgcaatgaccaaaaaaagagaagccaggcaaaaacaaacgtttgcccggcttctcttttttgtctgccttttatacgaagtcgtctggtgtatcaatgtcctctgtctcctcttccccggcttcaaataagaaaacgtcctccggatgccttaagactacctgctttcctccccggtcaccccggatggagagcagctctcctgcgtagcggctgtgaaacacgcatggatttttaggcgtaccctgttttgaaacacatccgatccctttcccgctctcgaaaaactgacagagaaatgcctttactgttgccattttaagtctcggctggtccgctgtaaaaaataagtaataggcttcatcctccagccttgcccggagcccggtctgcatggaggaggagattccctgttcgctgtgatggttgatcagacaggctgccccctgccgtttggcttcctcggcgatctcctcatagcgggtgacaacagctgcatctgcctcctcaaactctccgaccagctttaccatgaggtccatggtgtgccggtacatggcttttccgtccaccgggtatagaagcttgttggatccgaatctgctgccgaggcctgcagccagcaggatcatatgaatcttcatatcttagatcctctcaaaaagcactctgacatgtccaccgcacaccattccgaggctggacgcatctttggcggaaagatcataatccttgacctgcacatccgatacccgcccggcatcccggcacgcagtgaattccacattgccgcccccgatgcttcctgctgtctgtccgccatccgctaaaaacatcttgcttccggttcctctgggagaagaaccacttttggagaggatcgtcaacattactccgtgctgtcctttaagaacagcctctgccacttccatatcagcaaacccagtataacggcggttcttttcctttacgatctccgccatgatgctcacggcaatctcctcaggcagctgtccgcccaggggaagtcctatgggcgaatgcatagactctatcttttcttttgagaaaccttctctcagcagagcatcttttgtgatctgtacttttgtacggctgccgatcatgccaaagtatgcaaatgggtgggacagcactgctctggcacaggcccggtccccctgatgccctctggtcaccgctacataaaatgtattctcatacgcaaacagttcctccggcaggttgccgaaatcacagcacagaagatggtctgcccacgggaaacgctcctttgtgacaaactcttccctgtcatccacaacggtgatatcaaatcccaggattttgccgatctggcagacaggcaaagaaacgtggccgcctcccaggatcagaagccttggcgctttcagaaacagttctacaaaaatctcccgttttcctatcctgacggtctcggtctgctcaatcttttgtaaatctggcagaaagtcattccaaaatggttttccgtgcatctcattttctgtgtaaacacatttctctccagccatagggcctgagactatggtcgcagaaaatacctttccccgttccttcagtatcttaaataacaattcatatgcagacaaacagacacctcctaatatgccaacacttcgtaccccgtttccgtcacaaggacctggatctcccactgggcagaaggaagaccatcggccgtgtagacactccagttatctcctccgtcagtgtaaacctcatctgttcccatattcaccataggctcgatggtaaagatcatgccagggaccaggagcatctccgtccccctctttgtcacatagctgacaaacggctcctcgtggaactccaggcccacaccgtgtcctccgatctcccggactaccgtgtagccgttctccttggcatggtcatggactgcctgacccatatcccccatgaagccccatggtttcacctgttcaagacccagccccacacattcctttgtcacgtccacaagctttcttttctcttcgctcacatcgccgatacagaacatcctggatgaatcagagaaatatcctttatagatcgtggaaacatctacattgataatatccccatccttcaaaacgatatcctcagaagggatgccgtggcacacctgttcgttgatggaggtgcagacgctctttggaaatccttcatatccaagcggagcaggaactccggaaagctccgttgtcttgtcataaacaagccggtcgatctcctccgtagtcatgccttcccggatatgttcagccacatagtcaaggaccgcgatattgatctttccgctttctctgatcccctcgatctgttctttgttcttgagaataaatctcggcggcacaatatggcctttccgagcaaatgcctctattttctcatctgaagccatatggcaggctttgtattttttgttgcttccacaccagcaggcatcatttcttcccaatttccctatcattttcagttcctcttttctagatttgattttttcttcctatattataccattggaaccttccggtgttaagaagggatcttttatcacagaggaagatctctcttttgaaacctgtatttcccaagttcataaaaagcaatcccgatcaaaagcaggactccggacataaccaacgctctgatttctccctttaacagagcatcgccgtcaaacaaggtaaacactgtggcatatttcaggttctccagcttatcccccatattagagagcatctggatcaaataaaaggccagaaaaactcccactccaatgccggtggacctgcggctgtcgttgcagatgcaggacataaagaagaaaaatccgctgatgcagatgtgaagacagagcaggccggcattaagccttaagaattctgttatatccagatctccgggaaacatagcttcagagcagacgatcccaagcaccgtaatatatgcgatcatcaggcacacactgacagcgagaaagaatccctgtgtgcgcacggtctttcttctggaatggggtgcagcgaggatcagtgccatagaacccaggtctacataccgggctaccagcttatttgcggcaaacaattcatagatcatcggaagcacaaacaaaaagaatccgtataagtatgtttttaaaaagctttgaagtgttgtccctggattggtcatccctgcggcggacataagtccgggcatggccttttcaaactctgaaagcattttccccagttccggctcgaacatggagatcatgacgctgacatacatggaggccactgctgcgatgatcagaaacactttataattcgattttatctcccgtttcaaaagcggcaaaacaaagaatctattcattagaatcacctccgtaaaaatgtaaaaacaagtcctccaggctctgtctctgttctgtcaggcttaagacccggtagttgcccaggcagcggatgaattccgtcatctctccctttattcctatggtgacctgggtttcttttacttccctgacccctttgatctcacctgccagactcagggcttccgcttccgatgccaatgtgacatggaaaatcttctgcttgtttttcttaagcgtcttcatatcttccacggccacgatttttccctctttgatgatggctgtacggtcacaggtcctttccacttcctcgaacatatgggaggacatgagaatcgtagctccacgctttttttcttcccggatcagatcaataaactggttctgcatcagcgggtccagcccgctggtaggctcatccagaatatacaggtcgggggaatccataaaagcacagacaataccgatcttctgcttcattcctttggacatttttttaatttttcccctcgaatccagagagaacatttctataagttcctgcattctccccatattcttcatccccttcatgtccgccatgaatctcaggaactgttttcctgtcatatcgtccataaatgcgatctctcccggcagatacccaagagatctatggattgtttcggcctccttaaaacagtcctttccgctgatggtacagacccctttatccggggtagaaaagcccagaaggtgccgtattgtagttgtctttccagcaccgttaggacctagaaaaccaagcacttctccctctttaacggcaaaagagacgtcaaagatccccctttgatttccgtagtcctttgtcacatgtttcatctccatcattttcataaatactcctcccgatagacactctttttgacccatcccatccagcgttcataatccttacatatccggtccaggtcaaagtcaggccggtgtacggcgtcccgcatgtatccgtctcccagataatataaaagcataaagacatcttccgggctgacttcctccctgaattttgaaaaatccacctccggaaaccagcgtggaaacatctcctctaaaaaaatctggtttcttctgtccaattcctcttttacagcctcattttcctcatattttgctttcaatataaaaccattgatatagtgatttttcttcatcagttcagatttcacacggatggacagcttaaacagttcaaagaagtcatgcacatccttaaaattcgtagcttcgatgagttttataatggtatccattatgtggtcatataaaaaaagatacaacgttttcttatttttgaaataataaaacagcagtccctttgatatccctgccagtgcggccatctggtctgtcgaggcatgcttatagtcgttttcggcaaaaacttgtatggcgccgtctatgatcttctgttgtttttcttccgacaggtttaagaacttttcattcaagatgccacctccattgactggtttggttaatgattatgtttgattatattctattgactgaaaaaaacaacccctcccccgggacattgtaaaacgttacagggtgcggtacaatatattataaataatacaaaggaaaatcaggtgaacctatgaaaaagaaaaaacgaaccataacaaaacgtattctgctgctgatcctgatcgttatactttacgaagcagtcggcgcctgcctgccctttgcttttcaaaaaccggtcagtgactcctataaaaataaggtggatgtccaagcctttcggggaacagggaaaacaaaggaacgggccggcatcgtggagacgaacaaaggtgcgctggacacaaggctcgccatgtttaaagaggcaaaaaagagcatcgtgatctccacctttgacatccgtgaggggaaaagtacggacgatacgtttgctgcacttttgaatgccgccgaccggggtgtcaaggttcaggttcttgtggacgggctgtacggaatgcttcatatgaacggaaagactgtcttccaggcagccggaagccacaaaaatctggagatcaaattctataacgaacctaattttataaagccatggaccatcaacggccggcttcacgataaatatgtggtggttgacggttctctcctgctgatgggaggccgcaacatgtttgattattttatcggagatgacagccgcggcagtatcggatatgaccgggaagtcctgctgtattccccaaacgagggattcgaaggaaacgccattccccaggtactctcctactttcataagctttgggactcctctgactgcaaaaccgtattcagcggatcttcatccggggaaaaggtggaaacagagatcaaatatctctcctcccggtacgaaaagattaaaaaacggatccctgaaaggacagactggaccaggaaaacggtccctgtaaaaaaggcctcctttgtgaccaatcccacccatatcggaaacaaggaaccctatatgtggtataccatgcagcagcttatgctcacagcaaaaaaagatgtgactatccagaccccgtatgcagtcttttcgggggacatgtatcagggtatggaagagctcacctccaaggtccccaatgtagaaatgctggtgaattctacggctgcaggcgacaattttatcgcctcctccgactataccatgaaccgtccaaaagtcttaaagaccggtgctaaggtatacgaatttttcggagaccactcttgtcacggcaaatccatcgccatcgacaatgacctgtctgttataggatcttataactttgatatgcgcagcacctatctggatacagagactatgctggtgctggagggagaagaattcaaccgggaactccggggacatatggaccatctgaaatcccagtcccttaaggtgaattctgacgggacctatgtgccaaagcaaggggtagaaaaaaaagagctgtcttcatcgaaaaaactaatctttaaagtcagctctgtattcatacagcttttccgatatttagcataagaacaaagcagccttccttggcacatcgtgcgcatcatgcccggagggctttttcgttccatagggggaactttcctatggaacaaaaaagaaagcagggtttatgttctgctttctttttctttgcttctattcttttttttcattcctttgacgccgttatagagcctgtagaccgaagaaatcatcatgatccctccggataccgccatagctgtgatcagcgttctctgtccatagagtgtaaacagcccccagttctttgccaccgcatagttcatggtgtaatataactggcctccgggcactagaggaatgatcgcaccgatcaaaaatatggtagccgggctttttgccagcctggccagtccctccgcatagatggttgcggccatggacgccacaaagtttgggaaaaatgtgctggtggtcgtggatgctatgaccagatagaccgtccaggaaaccagtcctcccagacctgctaaaaataacttcttccctctcacattaaataaaatggaaaaccccagcgctccgataaacgaagaaagcacctgaaccgcctgtgttatcataagatacctccccataataccaaggcagtgaaggagcctgccgccagaaaaacagcggtcaccaccacctcgcaaagccgtatcatacctgccatcacatcaccgcctatgatgtcccggatggagttgacaaatgcaacccctgggacaaggagcatgatgtttcctataatgatcgtgccataatctctggtaacacccagatgtgcaactaaataagcgatgctggcaaccataaaggccgccgcaaaatcagagaacatgatgttggagtccagcttctgaagacctgccatcagccaccagaccgctgccccgcagactgcgccgatgatcccttccacaagcccgcctccgaaaaagaccgaaaaagtacctgcgatcagagacgcgatcagacactggattggcaggctgtagatccgctccttttgtatctttgaaagcttgtcctccaaataagaaatgtcgggtttttcccggcagacatatctggacagatcatttaactgatccagcttatgaaaatctgtcttataatatttaatccgttttgtctgtgtgaacacatctccgtccatcgttgtcaccgtcacgacaatgctggacgtgatggtaaaagcctctacttccctggctccgtacgccaggcagatccgctcaatggtatcttccactctggagacacctgctccgctgatcaacatcatttttccaagatccatggcctggatcaacacctgctttaaaaacatggcaactcctctatcgtaagatcaccggataacagcagtcgaaatatgctcctatctcagccgcctttttcttaagctcttctgtatcacactggttcagcagaatcgaaaggtttgcatccggatattgttttctcagcattataacatatccttcccggatcagacgaacaaaatcttcacatttaacaaaatgttcacatgatttttgcagaagagtgcacgcaagctccggccgatggcatacttcccctataggacggcccagggcactcaaacctgccacgacaagaatatgatccgttccctcaggaatgaccggttccgtgtcattcctcgctttcaaaggaagtcttttggctccgtccgcctccacgatcgtaaggtcagcatattttgggatctcccggaacacattctcagaaagtcccttcatcttctctccgtcccttaagccggccgtgagtacccgccccgggatcagacattttttgatctcttccagctccccggaaagtacggtgtcatcccctggtatctccatatgtgtagtggttgtcaccaggacttttttccctgctgccgcctgctcatcagcaatgagaaataccgaggtcgtctttccgccggccccggttactgcaaggattccgtctctgattccgagagcctcagaaagagaatcctttttccctaaagtcttcaattttagtttctcctgtttcttatattctaacctccattttactatattcttcaattggattaaagctgcttttttctgaagaccagcacagagagcagcaagaacataaggatcatcccaccggtaacagcaaaggccgtataaaagccagagagtttcaggcttcctgagatcaggccggaaggttctgataccaaccggattggattgtacttctggacttttggtacaatatttacaagaaacatcactgccacgaggccgccggtaaacaaaaggctcgtataactgctcttggacagaacacttcccaaaaggtcagaggccagaagaagtacaccgaacagccagacacccaggagtgcaggcatcaaatttttgatttcatctgcgttccagaaatatacggtgtacccatatgtgatgccaacacagaacacataagagaccgtccagagcagaactgaaacggtgaactttgaacataatactgtggttctggaaaggcccttggttaccatgagtactaacgtccctttctgaatctcccccgcgatcatcccggaaaacaggattgccagcactgcaaggcctatctgcccgacatttttaaaaaactgcatccacgaatccaccgcggaaggctccggcaggaccatctgcatgcccgccggcatgaactcctttacaagctgtggggtcatcttggctattaacgggttcatgacaccaaacagaaggaaaatacacaccaggatcagcagcctgtatgtcgcagcgctttccataagttctttttttgtgaatgcccagtaagctctcatgagaccacctccataaacaagttttccagagtcggtttctgcacttctattctcagcggacagatatccttctctgccataacagtcatcagttcaatctccagctgtctcatgtctgatgtgtgcaggatcatcccatcttccttgtcttctatttccaatacataacctttgaccataaattgttctttcaaaaacttccgatcctcaatgctgctggtctccaaaagaagactgtcctttttatgtcttgtctttaattcttcaagacttcccgacaacaccagctttccgtcctttagaacggccgcgcggtcacagatccgctccacgtcagaaagcacgtgagtggaaaacaacactgtagtcttctccctgaccctggagaggatatccaggatctcttttctgcctatgggatccagagccgaagtgggttcgtcgcagatcagcagctttggttcgttgagcagcgcctgggcaatccccagtctctgcttcatgcccctggaataccctcgaatccttttcttggtccctgaaaggccaaccagttctaataactccgtgcatctccgggtaatctcatttctggaaagccctgtcacttccccacacagttttaaatattgtactgcattcatatatccatagaattccggcacatccggaaggtacccgacctgtctattagtctttgtggcgccgtaagagacagcttctcccagaactctaatctccccttcacctgcccttaaaagacccaggataatcttcattgtcgttgtctttccggcgccgttctgacccagaaatccgtacacggagtgttccggtacctgaaggttaagcccctttaacacctgatggctgccaaagtttttggacaggtttgtgatttccagtacgttcatcattcatcccctcttccaaatacaaaataggctgccggtccaaggaactggatcaacacgaccaccaggacccataacacacgatttccgaaccgatagtttttgtgtctcagcacatggaccagcgcagtcaccatgagtaccagctccagcaggatcactggtattaaaaaaggtatatattctgtcataattgatgtattcatatttctgttctccttttcattcttttaacgatttcttcataccttggattgttctttaacgaagccataggcgggatttccaatgcgctcaccatagactccctcatcagcttatcctcccgcggagctttaacccccagatcaaaatcgtggagccatggatcgatcagatcaaaaaattcatctccatgcagggtaaacggcagcatgctgttgacacaaacattctcataccgttccagcatattaagggcacggtcctccttctcctgctttaagtatcccatggcagcggcaaaataaaactgtgccatggcgttcccatgcaatgactccacctcaaacgcttctgtgagccgaagtgatctctctatgatcatctcaaatttttcttcatcctgctcatataaggtcaatgcctgtatggtaaaggccattatccccatgagatattggtacaggctgatctgcactgtctccgtggctttctctttgttccccagcaggcggtaggcttccaccaggatcgtggcgttgtatagatccggcctgatctcttcatccagaagttccaggaccttttctggcctgcctgacatcagttcaatgctggcttccatggtatttgcctgggacgaggccgatacgtccccgctctccttcttgactctccggcagagttctgccgcttttaagagcactgtctcctgctgctttggatccttgaacagcacatagtggttaaaatacaaaacgaccatctgcaatagaagcggaaaacaggaataatactttttgacaatctcttcacattcctgaaaaacgtcttctgccggccttttggaaaattcaccggcaagcctgtggtagagcctgcggatatcctcttttgtcatctgaggctcatatccaatcagttcatccacgctgatattaaaatatgcggcaagctgcggtaaaaatgtgatatcaggataactctgccctgtctcccatttggagactgaagcctttgagactcctatgtaggcagccagctgatcctgtgtgactcctttttcctttctctttttcatcagtttgtttgcgatattcagctccttcattttcatcacctcaattacattatatccgtctgcaggaatcctacaatggatttgaagttgattttggttgatttaatcaaccacaaagaaacaggaccatggcaatggccgccatggtcctctattttgagtgtaagatctggtctaattcgttgacacttttcagacagttcaaagccagggtattaaagtacaattcctcatccagacacccgtaagccctgctctcctcctctgtcagcatcgaactggccagttcattttttgtatagcttttcctgattcttctcaatgcctgttctatatttcttaaaagctcttccagcatcagattctgttctggtacaatcttccttttgcgcatataggccccgatctgttccatctctgagacaagctgggcattgaccggcagaagctgttgataaaattccttttcctccggtgccaggtttttctctatataatttctgatctcattggaaaccatctgagaccgcagaagcaattctcttatcacattcaggtcactgtccctgccctttctggtttctgtcatgatactctcgtcgatatccagcaggctgttgacactttttaagaattctgacttagcagtgatcggaagcaggaatctgtttgccagcagcactgttaccactgcagccgctacatagaaaatcctaagctctatggcctcccctcttggaaggctcagggttgttaaagccattccataacaggtgctgtacataggcatggtccaggatgtgaccggcacatagtacataaagcacgtcatcaccacaatgataacaatatgacccgcaaggctcttgaagatctctgtgagcagaaacgtcaccaacagacctgcaaccgtcccgatgatacgattgttgatcttcatgacactctcctctgaatacggcatgagcatcagaaaagaactcatggggtaccaatagctgtgttccagtcctgtaatcctgcacacagtaaaggaaacacacagtacgatggacagccgcagcgcaaagcgcatatgaaactggttcagatggaaatgagagcggattcccttaagtttatgggacatatccgggatcttccactcctttaccggccggttcatcttgacatctgtaatcttcgtcagggaaaagcagatcagttccaggatctcccgcatgccctcctgaagctttttaggggccaatgattcactttctatgaaatccgtgagttctgtgaccagggaacggttgtccttctgattcatgcctttttcaatacaaaaacataaaccggacagtttcaggaaatacctctggctgcctcctgatactatagtctgcccatccagaatttcatccaccaggtattggaaccgctggaacaccagcataaaatagtagtttaccgtgccgtacccgtttgacaagtatgtataattcctgctggaatagatgacctgattcatgtgggacatcatctgcaccagctcttctctatctcggggatctctttttccggcagcaagattcatcaactggcgccccaggttgttcattccctttctcacagtgccgtaatgcctccgctttctgataatcctggaatggagatagagcagaaccgtaagggaaaggaatgcgtaaaacaacgccgcaagacgcacgggcatctgagacagcgggatcggcctgagctgtaggaaaacaaattccataccgtaaacaaaatatgctttggggttaaatttatcagtgagcagaaagacgatggcaaacgggacaaatagattcagcaaaaagcacaaagggagattaaggaccgccagataggctcccaggcagaccagcagcatgatgccgtaacagttaagaaggtcattaagggaaaagtccttctggctctttgtccggaacaacagggtcagaaaggataccatgatgacctgtcctatgccaaacagcagtaaaattgaaaagaacataaataaggatacaaaaataacaggaaacgcggccgcccactttctcctgacggtatgaatcctgtttctccactgttccataaatatcccccctggcctgcgttgacttttaaaattgaaagtgctacgattttatcacattaatgcaacactgtaaaggagacaaacaatgacatataaaatgagaaaaatagtgatcataggggccggacatgtgggaaccatgtgcggcctgagtcttatgtaccgcggagaagtggacgaattggtattcatagacatcgataaggaaaaggcatacagccaggcgctggaccttagtgatgccgtctccttcctgccccggcagatcacggtgcgcaccggggattatgaagatgtggaggacgctgacatcatcgttatggccgctggtgtttccaggctgcccggtcagacaaggctggatatgctggacgattccatccgcatcatgaaagaagtcaccagccatttaaaagataagaagattcagggcatcctcatcagtatctccaatcctgccgacattgtggcggattatctgagaaaacaactgggccttccgagaaaccgctgcttcagcaccggtacttccctggactcctgccgtctcagaaggattctttcccaaagaatgcacttagaccggaattccattcaggcctttgtcatgggagaacacggagattcccaaatgatcccgttttctgcggtacatatagccgggaaaccattgcttcagtggatgcaagatgaaccggaacggtacggaagtctcgatctttcacagattgaaacggagaccgccaacgccggccatgaagtgatcgaaggaaagggcagcacagagtttggtatcggcatcgccctgtccgagatcgtccagtccattttccacgattcaaaaaaggtccttcccgcttcgcctctgctggaaggagaatatggacagcatggcgttcacgccggtgtcccctgcgtgattggaaaagccggaattgaaaagatcattgagatccctctcacagaccgggagcaagagaaatttgaccattcctgcgatgtgatcagaacgtttattcaagatctctgaaaacacctatgatgctcttgatctttttgtgaaatatgatggtaatagcaggaggtttcgattataatagagaaaatggggtataagtaattagggattaaaggggactttcatgaaacgttggaacaagattctaataccaatatttttcttgctcatgatcatggcgagccttttttctgtgcgctcaatcgtcagtatgcagggctatgcaaagctgatcaactatcttgggatcgtccggggatgcggccagcggatcgctaaactagaagtcagcagacagccgaaggataacctgatcagctatgtggacggcatcctctcagagcttgagaccggcgaaggaaaatacggcctgtcgcctcttcatgacaaggattatgagcaaagcctttcaaaactcaccagagagtggaaggaaatgaaacgagaaatctaccaggtgcggaaaggttctgatacaaaggatcttctctctttcagcgagaatttttttgatacagccaacaacaccgtttttgtggctgaaaactactccaatgaacatattcaaagctttacccgtctgagcatcatactctctgtagtagccatctttacctggctgtgtattgtcctgatctatttccgcaatctattccacctgcagaggaaaaatacgaatctcgaatccatcgcttaccgggatgatctcaccaacgcatccaatttggagaagttccgtttggatgcagaacatctgcttgcatcaaatcctctctataagtatgcttttttccatctggattttcagaattttaaatactgcaatgatatcttcggctatgatttcggagaccggcttttaaaacaatatgctttctacctgtctgaggatatgaatgagggggagaccttcggccgtatttctggtgacaagtttgttgttttaagaagatataatttccgggaagagctgctggcacgccaaaaagctgtggacagccgtatgagggcatttgccatggattccaaggaacactacagtcttactatcttcggcggtatctgctgcgctgaggatgtttcttctgacatggagatcgactctatcttagaccgggcaaactttgcccaaaaaaccgtaaaaggacaggaagaacgccattatgctttctatacagacagcatccgggagcagatgatcgaggagatcaatatccagagccggtttaacgatgccataaacgaaaaagagttccttgtctattatcagccgaaggtaaacctttctcagggaacttttgactcagcggaagccctggtgcgttggcagacaaaggacgggaacctgatctcccccgccgccttcatccctgttctggaaaaaaacttcttgatcagtgccttggaccaatatgtattccgtgaggtctgttctttcttaaagaaacgcatagatgacggccttccggtgatccccatatccgtaaacgtctccaagatccagttttacaacccggatttcctgcacatctattccgatattaaagaaagctttgatatcccggacggattactggagattgagtttaccgaatctgtcggttttgaaaatacggagtattttctggagatcatatcccgtctgcacgagcacggctttttatgcgctatggacgatttcgggaaaggctattcttccctcagtatgctgaaggacatgccgattgatgttctcaagctggattccctcttttttgtgaacagccgggattctaagaaggatctgaccgttatacgcggcatcatctccatggtgaaagaactgaatatacagaccgtggctgaggggatcgaggaacaaagccaggtagaatttctaaagaccatcggctgtgacgttgtccagggcttttatttctaccgccctatgccctcagaacagttcagccaactcttatctaggtaaaacaaaaaccgcagttttgtactgcggtttttctggagggtcccagccaacaagaaagaaaaactcatactctatagatataattttcttttcttggcttagcctccggaatcgctccgtccggatatccgatgatacagtggccgatccctgcataatcaccctcgatcccccactgcctcagaagctctttcccttcttcgctctcaaactcctgctttgccctgtggatccagcaggaaccaagtcccagtgcgtgggcggcgttcatcagattccccatcacaaggctgccgtcttcgatgtacgtgggtctgttcttgtctgctaagactacgatcaccgtaggagcgccgtaaaatggatccatgttctcattcccaaagatctttgcattcatcttggacagtttggcgattgtatctctgtcctgtaccacaaccataagcggagactgcatccccatccctgtgggtgcatacatgccggcctccagaatcttctgaaggtcagcctcctcaatctgtctgtcctgatacttcctgatgcttcttctttcctttaaatctttgatcgtctcttccatcttactacctcctgttcataaatgaccagatatctccatctcagacaagccttttggtccatgcgatggccagtgcgccgtatccgatatggcatgcaatgctcaaagacaacggatccatctcaaacttatgtcccggaaaacgctccttgatctcctctgcccaaagctgggcttcctccctgctccccgtataggcagcctggatattgactgcttccggatctacagtctggccaaagttttcaatgagttctttttccacggcctccagcattttctttttggccagcttcattcctctggccttggtgaaggcatccagcttttctcctttgatctgaagcaccggcttgatatttaatacggatccgatggctgccgctgccggtgtgattcttccgccctgctttaaatactttaaagtatccactgttataaaaatagaagaatccatcttgtgctcttccagcagatccttgatcttggatgcactctctccctgatcagccagcttttttgcctccaggactgactgtttctgagtgacggatatcctctggttgttcactacctgtaccctgccgtcaaagtcttctgccagcatatgcgcagtctcacaggaactgctgagcccgctggacataggaatgtggacgatttcgtcgtgatctgtgagcaccttgttccacagatccagcacatctcccggggcaggctgtgatgtcttgatgtcgacaccttcccccagcttcttataaaattcttcctgtgtcagggtaatatcctcaaaatacagcttttcatcaatgtagaacggcataggcagcacatagatcccatactcctctgcctgattctgtgtgattccgctgttgctatctgtaattactgcaacttttcccataatgaatcctttcatgatttttaggaactacaaataatcccgtccttttatcatatcaaatgtttgggtgaaccgtcaaacatctattttcccggattcccacattctgtctcctttccgcacaggatccccagtccgtgggagagggtatccatgatatatccaaggttttccctgactgccttgggacttccgggcagattcacaatcagcgtttttttccgaatgacggaaactcccctgctaagcattgccctctttgtgatctttaatgattcctggcgcattgcttcactgatgcccgggaccaggcgctctgaaacctggagcgttgcttccggtgtcagatccctctcagaaaaaccggtccccccggtagtcaggaccagatctgccaggccctggtcacagatctttataagctggcttttcaaaggctcgatcccatcttttagtatctcctcagaaatcacctgaaacccttctgtttccactatctttcttaccaaaggtccgctctcatcctgccggactcccgccgcgcccttgtcactcagcgtgatcactgctactctgtatgacatgccgtttcctcctccggtaattttgagatcctgtcatttctgtgcaggattcctccatggatcactctcaaaaaaatgccctctgtgggcatgatgcatttaccgactctcttataaatctcacaatggctgtgacattcctttcctctctgggtcacttcaaggaccacagcccccgacaaaagacggtcccctacagccagacattccatgtcaattccggacacgatcagattctctccaaaatctccgtctgtgacctgtcctccctggtcattaaaatccttaatcttctcatagcctaaaacactcacctggcggtgccattttccggcatgggcgtctccctctattccaaaatcctcgatcagcactgcctcttccacaggccgttttaccgttcctttttttgtgctgatacagattgcttcaatccttcccactgtcatcctccgtttcgtcattggatattttatggtcctcataacaaaagctgccgctctttcctccgctcttttctaaaaggtggatatcccccatagacatggacttgttcaccgccttgcacatgtcatagatcgtcagaagtgcgatctgcacaccagtgagcgcttccatttccacccctgttttgccggtggtctttaccgtacagacggcttttatggagtgatcctctttgcgcattgtaaaatctatgctgcatttatggatcagaagtacatggcacagaggaataagactgctggtctgtttagcgcccatgatgcctgcgatccgtgcaacagacagcacatctcctttttctattttctgttccttgatcttttcatagacttccctgcccacatagatccttccctgggctgcggcctcccgccgtgtattatcttttccggaaacatccaccatcacagcgttgccgtctccgtcaaaatgtgaaaaatcattcatctttcttaccttccaaatccgcagtccggataagtacacggactgcactgcatacaaaatcctccgtgggccattttgataaagtcttccttttgaagcctctctcctgccagaatcctcggcactgccaagtcaaacaccgtccgcttggaaaacatgacacatcccggcagacccaccacagggatgccttttacataggccagcataaacatggctcccggcagcacagggcttccgtaggtgatgacctccccgccgcagcctctgatggcagacggcgtcatatcgtccggatctacgctcatgccgccggatacctgcaccatgtccgctccccgctcgataaagcttagaatggcttttgtgatctcctctttgtcatccccggggaaaacctggccgatgatttccgcgtccagttcccgggctttcctatgaagcaccggaccgaacttatcctcaatacggccctccgcaatctcagatccagtggtcacgatcccgatctttgcatgcctaaacggcagaacctggatcagcggccccttttcttcacacaatgcctcaaactgtccaagcatctcttcctcggccaccagagggatcactctggtgcccgccagaggtttgccttcctccacgatctttccagaatgaatggtagaaaaacacacatccttaaggctgtttaactcatataataaatcaatgttgatgcttaagactcccctgcaggctgccctgaattcgatctttccttcctttggctcaccgaaggagatattggctcccgcagcggctctggccatacgaaaagccgcatcatcctcatggacaaaaccttcttccaagtcccagacatagacatatcgtttcccaatatccaaaagcttctctatatcttcttcttttaccacatgtccttttttaaacgccctgcctttaaactttcccggaacgatctccgtcatatcgtggcagagcaccatgccgacggcatctgttaccctgacttttttcatacgttcacctcttaagctgtcctttctctgcggcgcatattaactggagcacactgcccccgatacaccttgccttatctgaaattgtgaaacagttctctctttcccctgctctcgggtcaatgtccgctattttaaagcctttgctgaccgggtatccgtcccgaatcagtccccgcacaatgccgtcaaggcttgcaggcaccggtgtcatttgaccatccgctgactggatcaccgctataagctccccctttttcacctgtgccccgatctttgtgcgtccgtaaaggcggcctttctgcggggcgtggagaactctctcttttccgtatcccatgatggcaccaggaatccctgtgtccgccatggctgttccgtccgttatgatccttcccagattgtgtccccgcatcgtctcgatgacatagtccacatccaaacctgccgtaaaacccggtcccaaacctatggtcagccctgccatgtcccgcctggtccccagattcctctttgcaagaatggcatccaccaccgcatccggtctgaccgctctgatagagtctcccttaggatctactaacaccaccggcttttgagggctgactgttcccagagcctcttttaaggtatccgcgcgtactgcctcaagtccttccacaactgccgtcccttcatagacagcttcacaaaatgacacctgccggcggatcgcagacggtttttctgtctctaatataagaaccggatatccggccctgcttaactgatagatggttccggtggcaatatcgcccccgcccctgacaatgattggcttcataacatatgaggtcctctcttaataaatttcccctgttttatttttaccacccggccgccgtccgtgaccagacagcctcttaagaacaccttgtcgatggtccctttgatcttcgttccctcaaaggggctgtaatccacattctgttcttggctttcagccgtgatcacatcttctcgttccgggtcaatcacggcaatatccgcatcgcttccaggcatgatacaacccttttttggatagagaccgtaaagctttgccggattttctgagagcacccggcacatctgctggggagtcagcagtccctttcctactccataagtataaagtaaaacgcctctggtttccacccccggcataccgtttggggtcttggtaaaatcatccctgccgaaacctttttgtttcgtggtaaaactgcagtggtccgtggagaccgtctggatggttccgttcctaaggccctcccacagtaccttctggttctccttttttctcaggggaggggaacatatataattccgcccttcttctccggtttcatagagggatgaatccaggagaagatactgcggacaggtttctgcaaacacagtctgccccttttttctggcccgttccaccgcgtccagcgcttctttgcaggtgagatggactacgatcacaggaataccgatttcaccggcaatggccagaagccggttgactgcctccgcctctgcgccttcgggcctgactttcggatggacatccgcccccagatcccctttatttctggcctcctctgtcagcgcatcgatcattcctgaattttcacagtgaacgcccgtgatgccgccgatctctttcatctttctaagggccataaatatatcatggtcgtttaagatcatatccggatatgtcatatacatcttaaaggaagtgatgccttcctccatcatatgctccatggactctgctgtatttttattccagtcggagatggccatgtgaaaagaatagtcgcaggagcttcggttgtcagcccgctgatgccagttctctaaggcttcctccaatgtctctcccttatactgtgtggcaaaatcaatgaccatggttgttccgcccttgatggcggctctggtccccgtgtcaaaatcatctgctgttacggtgcctgacacttccaactgaaaatgggtgtgagcgtcaatgaaaccgggaaacaaaagttccccggtcacatccaccaagacagcctccggatcatgaagatccggccccgtctccaatatcttctcatcttcgatcagaacgtcggctttcttcatctggtccccggacacaatcgtcccatttttcaataagtatctcatcgaaaaccgcctccttctatctctgctttatattctttttccttgcatacggcgtgttcacgagaggaagctcctgctcaaaaatgccgttcttattatagtatgccgctgccacagccggcgccgtagggatagatgtgatctctcctaccccgatggctccgcatgccaccgaaagtccctctttttctacgatccggctctccacctcgggcaccttgtctgccctgaaaagccccagggtcccaaacttagccgtaggtttcagattctcattgatcgggtactgctccgtcagggcaaatccgagagacatgacaacccctccctcaatctgtccttccacggagagaggattgatggctttgcccacatcgtgagccgctgtcatcttctttatggttccgtcctcattgagcacacagacctgggtggcataaccgtaagccacatgggataccggattgggtttgtcggtccccattggatccgtcttggccagatattccccgtaaaattcttccccattaagatccgatatatcctttcctctgaccgcctcgttatagagggcacacgcgcgcctcaccgcctcaccggtgaccagagtctgcctggatcctgatgtcgttcctgaatccggcgccaggatcgagttggatgcctcatagacgatctgatctctggaaagtccggtctgttccccgacgatctggaccagaacggttccgagcccctgcccgatacaggacgcgccgcttcggatatgaagcctgccatccaaaactttcagaatacatcttccggtatccgggatgcccactccgacccctgcattcttcatagcacaggcaatgccggccttcgggtactgctccataatatccctgaccgcctccagtgtctcggcaagacctgtggactcatccaccagctgtccgttgggaagctcctgtccggggcggatggcattgcggtagcgaatctcccaaggagagatgcccgctttttctgccatcagcgtaagaaccatctccagcccaaagcagctctgggtcactccgaatccacggaatgcgccggcagggggattatttgtataataagccctgccctcgatctcaaagttctgatagttataagggcctgccgcatgggtgcatgcccgctggagcaccgggccgcccagagacgcataagccccggtatctgatatgatgcttgcctttactccctggatgatcccgttctcatcgcatcccatggtaaactccatgtccatcggatggcgcttcggatggattaaaatactttcatctcttgttagctttaccttcaccggtctctttaaaagataggctgccagtgccgcgtgatgctgcaccgtcatgtcttctttgccgccgaagcctccgcctaccagcttgttttccacgtaaaccttttccggggagatgccaagcatctcataacactcccgctgggtatcatagaccccctggtcagaggagtaaaccttcacgccgtcctccttgtacggaaaggccaccgcgcactccggctccaaaaacgcatgttccgtccatggagtgtggaacttcttcgtaatcacatacttggaattttgaatggctttttcagcattccctcttcgcacatgctccctggcgaggagattgccatcgctgtgcacaagaggcgcatcctccttcatggcttcatatggattccttacgggagtgagtacctcatattccacttccacaagctcttttgcctgttttaaagcctcttcattttccgccgccacaagagctatggagtctcccagatatttggtggtggtaccttccgggatcaacacataccaatcccgttttaaatgtccggttctgacactgcccgggatatcttttgcggtcaacactgcggccacccccggaacagccagcgccttggaggtatcgatggagagtactcttgccctggcatattttgagcgaacggcactggcataaagcatgccatccatctccacgtcgtccgtatactccccggtgcccagaaccttttctctcacatccaggcggtgcaccctctcaccgatcttccactgtccgttttcttccggtaccttctttccatcccggaacagctgtgccgcaagctccaccgcatcgatgatctttttgtatcctgtgcatctgcagatattattcctgagcgcaaaggcaatctcctgtctcgtgggattctgattcacatccagcagtcctttggcacagatcaccatgccagggatacagaaaccacattggacagcccctgcctggccgaatgcatagacgaagatctccttttcgtcctcagggatcccctccactgtgagtatttctttcccgtccatcctggacatcatgggaatacaggcttttgtagctttcccgtccaccagcaccgtacaggtgccgcaggctccctggctgcatccgtctttaacagatttaagcttcaattcatctctcaaaaaacggatcagcttctggtctttgtctgtactgtattgtttatggttaatcgtgcattggaacatatcgatccctccattctccccgccaatctacaaagatttgatatttttaaaattcttatccttcaccgtaaaattcagcggtatccttttgcggacttttactttttctttttcctccgggatgatcaggttcagtacgactgtgatcaaggttgccaaaacaaccgctgattttccaaataccatcatgacccaggaagggaacagtgccagagaatccggcgccagtgtgactcccatgcctacggcaactccaaggcctacaatagccgtattccggttattgagccctgcctttgcgatcagcttgactcctgtcatagcgatggacgcaaacaccgagatggtggctccgccgagaacacactgtgggattgtggtcaaaagagaagcaatcttcggcagcagccctgccgcaagtatgatgatggacgccagataaaacaccctttttgccactacctttgtggttccgacgatccctacattctggctgaaggtggcagtcggaagccccccgaacagggcaccgaaaatgctgcccagaccgtttccgatgatccctcctgacagttcctgatctgagggttctcttccaagcccgccctgtgtggtcgcagtcaggtccccgatggcctgcaccgaattgaccacaaacaagatcgacatggtgatcatagaggaaggctcaaagcggattccaaaatgcaaaggttttggcagctgcatccatgacgctgacaccaccggtgtaaagtcaaccatccccagaatcactgcgatcacatatcccacgcagatcccgatcaagatggcggaaagcttcagaaatcccttggtaaaatggctcagcccaaccacaactgccagtgtgatcagggctaccgcccagttcttcacgctcccataatctttggacccggttccccctgccatatatcccacagcaaccggatacagagaaagccctatggtaaacaccacagttcccgtcacgataggcggaaacagggaacggatcctcttgataaaaatgcctaccaggaccgcgatcactcctccggtcagctgggcaccaaacagggtggccagatcaaattcctgaactacggcctgcatggtcgccaaatacgcgaaactgacgcccatgataactggaaggccagatcccactttgtgatttaatgatatcaactgtaaaaatgttgccacagcggccacgatcagcgccccctgcacaagcacaatcttatcctggggtgaaatctccccccgggatacagcgattcccgccacgataatcgccggggtcacgcagcccacgatcatagccaccacatgctgcagagccagagggagcacctgtttataaggcggcttcccatcggttaaaaatagctcttttactcctgtcttactcttaaaactatccaacatatctactatctccctgccatctgcataacagcctttgaaatccgggccgggctccccgtaccggcccacaaggctaaagcagataaaatgcgtagtcttcgcagacaacagtcatcagccttcttaagccctctgtcactgcgcagcttccatcctttaagttcactgtcatagtttctcccagataccttacctggcacttctgttccataagatccagcacggtaaatccttcatttttgctgttctccatatcgttttcgttcgcaaaaagagtgaatttatccagataaggggcactttcatacggacagaaggacctgcagtttccacattcattgcacatatagtcaatatggatgacctggtctttctcaaacccaggcacatggatggatacatttgccctgtttggacagacatccacacagttttcgcataccacgtcgcacccaaggcatcttctgctctggtctttttcttcctgtgtatccttaagaattcccttcttctcgcagcagtcctcttttgaagaaggattgtcttctccctttgaaaccggaatgccaagaatatgttctgccgctttcatggcatccctcatgccttctactaccgtagcggggccgctcaacccgtctccgatcacatagatcccttccttgttagtcatcagggtctcagggtctgtctttgctcttcccctgctgtccacatggattccgttttcctgataaaagcttgagggaacctgttctccaactgcggcgatcaccgtatctgcaggaatcttcacacgctgtcctgtgctcttgactccccttcgtcccgtctcatcaggatcagacagctccatggctttgcagaccagctccccgtcttctaacagtaccggggacaaaagttctttaaactccacgccgtcttccacagccatcaaaagttcttcctcatcggcaggcatatatcgttttgtccggcggtaaacaagataaacatgctccactccctcggtccgctttgcggcccttgcggtgtccatagctgtgttgccgccaccgataactgctacattttttccgatcatcacatgaccgtcattctgcttaaattccttcaggaattccagcgcattgatcacacctcccttttccagaggcagctctcccggtttggaggctcccactgccaggatcaccgcatcatatccctggttcttaagagccggtgcattgtcgatccttacattcagctggatgtcaacgcccagcttctccaggaaagaggcatccttttccaccaaagaggacgagatcctgaactcagggatcacctgagatactacacctccaagggaaccgctctgttcatataaggtgaccttggttccggccttggccagatagtatgcacatgccatacctgccggtcctcctccgatgacagccgccttctttccgttctcctctgccggtttcagtgcctttagcacttcttcataaccaccctgggctgctttcagcttattgtcacggatatgtaccggttcctcgtaaaagtttctggtgcatttgctcatgcagttatgggcacagatcgttcccgtgataaacggaagcgcatttctttccatgatgacttccagtgcttctttgtactttccttcgtcagccagcggcatataggcggtgatatcctgatggatcggacatccctccttacacggcgccacataacagtccaaaagaggaaccggctgtttcatttttctggacggaagaggttttgcagctttcacatggtgcttatccgatttagctttctctgcgatcttagatactgcctctgcatcaatcccttcgaacggccgcaggactttgctctcctgaagcttctttgccatctgggtaagtctctggtaaccgccgggcttcagcagcgtggtagccacggtgaccggccagattccggtgtcgatgatctcctcgatattgtaggcatccgcgcctccggaataggagatccttaagtttccaccaaattctttggacagctttgccgccagagagatagacagcgggaacagtgcctttcctgacatatacatttcttcacttggaagctgatgttccttcacatccacagggaacgtgttggtgatctttacaccgaattccagtccctttttatctgcaagctccatgagccttttaagcatcgggaccgcatcctcatactgaaggtcatctttaaaatggaagtcaccgaacaccatataatcatatcccatgtcatccatggtttttctggcaaaatcatatccaagcagtgtgggattacatttaataaatgtatgcaggcctttttcttttaataagtagtctgcgatgctctcgatttcctgtggcggacatccgtggagtgttgagatcgtggcggaattgcagatcttagccggaatggcttctacatcttcttccgttacgttcttaagccttttggccattgccctggcatccctcatacactccctaaaaatactgctttcccctgcatccatcatggtgtcgatgaaggtgttgatcttttctgacttgatccctgccaggtcatacccgacactcatattaaactggaatccgtccgcagtcccaagcccatattctttagaaagaatatgaagcagaaaccaggctttgatatattcttccatcgcctgtggaacataaagctccgtggaccattcgcagttatatccttcatcctccgcaaggatgcacggtttgttgacacaggcggacaactcttccccgtccatgatctgtacggtctttagttcaaagaaacggcttcctgccacataggccgccacaatgttctgagcaagctgggtgtgaggccctgccgccggcccgatcggtgtctccagcttccgtccgaagatctccgcagtgtcagccggatccgccttaaaaggcctgcggatcccaaaaatcgttcctttatcttccttctcctccacgacccactcaagcagccgtgaaaacgggattgacgtcataatatcgctcatataattatcctcctaaccattgatggtatgtgcaagcttagcagcttcttccctgcactttgccattgcctcagcttcatcggctacaagaagcctgcggtccttcatcaggacttttccgtttccgatggtcgtcacaacatttcttccactcattccgaacaggatatgaccgtttatatttccctcattcatcggtgtcagcgggtcataatccacgatgatcacatctgctgccgctccttttctgaggactccaagaggtctcttgaaataccggttcgcaatctttgcattgttctcaaacagcattttagggacttccgcccaggctatatttggatcacagagggaatgcttatgtaataaatttgccaccttgtaggattcggtcatatcatgggtatatccgtcagttccaagtccagtaaggattcccttttccaccattcgcatggtgggaggacatccacaggcatttcccatgttggattccggattgtgtacgaccatagtttccgtatccctgatcaggtccatctcatgctcattcacatagatacagtggccaagcagtgttttctcacccagcaccccgcaatccatgagccggtcaatgatcctcttgccgtaatgctttagacagtggtgcagatcttcgatcccctctgccacatggatgtgataacccacctcttcgggcttattggcagccgccagttccatagtctcatccgagatcgtaaacgacgcatgcattcccatcatccccgcgatcatatcagagtcgtccttcagggcatgactgataaatctggaattttctaaaacagcctctctggccttttcctttccatccctgtcggaaacctcgtaacacagacaactcctgacccccagctcctttgccgcttcttctataataaagagactgtccgtgatattcccaaaacttgcatgatggtcaaatacggttgtcactccatttttaatactgtcaatgtaggttgcccttgcactctgaaggatctgttccggtgaaaggttccggtcaatggtccaccacataccgtccagaatgtctaaaaatcccttgggatcatatccgttgatggaaagtcctctcgccatggcgctgtaaatatgctcatgggcattaatgaaggcgggcataatgacgcctcccttagcatctatatactccgcctccttataagcctgttttatgtcttttgtttggcctacttctatgattttatttccgtccatgacaacagcgccatcttctaaaaatggacagctgacatctctcgtgatcattcttccgttcccgacaattctcataacttgacctcctattcattgtgcaggtgctcttttgataatctaaatatagcatcccaaaatgtaaaaaacaaccgttccgaagcatgtatacaaaatatttttgatatatctaaaaatttttgtatttttttattgcaatcctaaaaaaacgtgctatgattaacttatcaggcaaccaaaacactcagaaaaggagtgatcattatgaatccggaattggaacttttaaaacaaatggcacacaccattgccatgcagttcgggaaagactgtgaggtcatcatccacgatctgacctgtgaagacatggagcatacgatcgtacacatcgaaaacggacacgtcacaaaccggaaattgggagacggcccttctgccgtcgttctggaaactcttcataagcatccggaagacattaaagaccactatgcatatcagataaagacatccgatggaaagatcttaaaatcaaccactacatttgtaaagggcgatgacggcagggtccactatattgtcgccatcaactatgacatcagcgctcttctaatgatcgacgcttcccttcagtccctcatgcatgtggaggaacaaaaaaaggaggagcccacagccatcgtaggcaacgtacacgatctgctggacagtctgattgaacagtctgttgcactggtcggaaaaccggcggcccttatgaacaaggaagagaaagtgaaggcgatccagtttttaaatgacgccggagcattcctgatcacaaagtccggtgataaagtcgcaaagtactttggcatatcaaagtttactttatacagctacattgacgttaacaaataaaggaggttttgacctatatggaaacaatcaaatgggcagtcaatgagatgccgaaaaccgatgacaggcatttggacattatggcactggatgagatacagaaagccaggacattccacgaaagctttccccagtacagtaagactccccttgccagattaaactgcatggccgatttcctgggacttcacagcatctatgtaaaggatgagtcctaccgcttcgggctgaatgcgttcaaagtccttggaggatccttttccatggcccgctacatagcaaaagagactgggagggatgtgagggatctgccttatcccgtgctggtctctgaagacctgaaaaaggaattcgggcaggcaaccttctttaccgccacagacggaaatcatgggcggggcgtcgcatgggcagcaaacaaactgggacagaaagccgtggtctttatgccgaaaggctccacaaagaccaggctccaaaacattctggctgaaaatgcaacggctaccatcgaagaagtaaactatgatgaatgcgtccgcatggccgctgccgcggcggcaaagacacctcacggagtggtcgtacaggatactgcatgggatggatacgaagagatcccggcctggatcatgcagggctacggcacaatggctatggaggccgatgaacagctaaatgaagacggctgcggacggcccacccatgtgtttatccaagcaggcgtaggttctctggcaggtgcggtacagggctactttgccaaccgttaccctgataacccgccgaaggtcatcgtggtggaggctgaatccgccgcctgcctctacaaaggggctgtgaaaaaagacggcagcatccagatcgtggacggggatatgcctacgatcatggccggccttgcctgtggggagcccaatacactctcctgggatattttaaagaatcatgtggacactttcactgcctgccctgactgggtatccagaaaaggaatgcgtatgctttctgctcccctgaaaggagacccccaggtcatctcgggagaatcaggagcagctcctttcggacttttggcaagtatcatgaccatggatgagtataaagacctccgtgagcatttaggactagaccgtgactcaaaagttctcctcttctcaaccgaaggagatactgacccggaccgctacaaacagatcgtctgggaaggaaaagacaaataaaaccctgaaaacttaccgcattaggaggatattagaatggattttaacaagatcaaagaagccgcacaaaactatgaagcagatatgacaaaatttttgagggatatcgtaaaattccccggagagagcagcgatgaggaagcccatgtcaacagaatcgccgaagagatgaacaaacttggatttgacaaggtagagatcgatcccatgggcaatgttcttggatatatgggaaccggtgagacactgattggatacgacgcccacatagataccgtaggcgtgggaaatctcgacaactgggaatttgatccctatgaaggttttgaatccgacatggagatcggcggccggggtacctctgaccagttaggcggtatcgtatctgctgtctacggtgcaaagatcatgaaagaccttggtatgttaaatgacaaatataccgtattagtcacaggaacagtccaggaagaggactgtgacggcctgtgttggcagtatatcgtcaatgaagataaagtccgccccgaatttgtcgtatccaccgagcctacggacggcggcatctaccgcggacagagaggacgtatggaaatccgcattgacgtggacggtgtatcctgccacggctctgctccggagcgcggtgacaacgcgatctataagatggctgatattcttcaggatgtgcggtccctcaatgaaaatgacgcggaggacaaaaccgagatcaaaggcctcgtaaagatgctggatgaaaagttcaacaaggaatggcaggaagcccgcttcttaggccgcggaaccgtcacaacttctgagatcttcttctcatcaccgagccgctgtgctgttgccgattcctgctccgtttctctggaccgccggatgacagccggtgagacctgggagagctgcctggatgagatccgcgcccttccgaatgtaaagaaatacggtgccagggtttccatgtatgaatatgcaaggccgtcctggaaaggcctgacctacccaacggaatgctacttccctacctgggtgatccctgaggaccacgacgtgacaaaggccatggccgatgcctttgaaggattgtatggagagccaagaatcgataagtggaccttctccaccaacggagtttccatcatgggccgcttcggtatcccttgcatcggattcggaccgggacatgaagaccaggcccacgcgccaaacgaaaagacatggaaggctgaacttgtgacctgcgccgctgtctacgcagcacttccgactgtctactgcgaaaagaaataaaaacccgctgcctttttatcagatctatattataggaggaacctttcatgaaaatgaattcattacaggattatattgaccgcttgaaccaattaaattttaaagagatgtatcagaacgactttttcctgacctgggaaaagaccgacgacgagctggaggccgtatggctggtggctgacgccctgcgtttcatgcgcgagcacaatatttccaccaaagtatttgagagcggtctgggaatctctttattccgggacaactcaaccaggacccgcttctcctttgcctctgcctgtaacctgctgggcctggaggtccaggatctggacgaaggcaaatcccagattgcccacggggaaactgtcagggagaccgccaacatgatctcctttatggcagacgtcatcggaatccgggatgacatgtacattggaaaaggaaatgcctacatgcacgaagtggcagactctgtagaacagggaaataaagacggcattttagagcagcgcccgacacttgtaaacctgcagtgcgatatcgaccacccgacccagtgtatggcagatatgctccatatcattcacgaattcggcggtgtagaaaatctgaaaggcaaaaaactggctatgtcctgggcttactctccttcctacggaaaaccgctctctgttcctcagggtgtcatcggtcttatgaccagaatgggcatggacgtggttctggctcatccggaaggttacgatgttatgccggaagtggaagaggttgcaaaaaagaatgcggaaaaatccggtggaacctttaaaaagaccaatgatatggcagaggcattcaaagacgctgatattgtctatccaaaaagctgggctccgtttgccgctatggaagaacggacagacctctacggaaaaggtgactttgacggcattgaccgcctggaacaggaactgcttaaacagaacgcagaacataaagactgggcttgcactgaagaattaatgaaaaccacaaaagacggaaaagccctctatctccactgcctgccggctgatatcaccggactgagctgtgaggagggagaagtggacgagagcgtctttgaccgctaccgcaatccgctctacaaagaagcaagctacaaaccgtacgtgatcgctgccatgatcttcctgagcaaatttgaagatcctcaggcaatccttcaaaagcttgaagaaaacaagaaaccgagaatctttgaataatctgaactatgaaatcctagtttaccgccacttacattctgaccattgtgtttgtggcggtttctatttccaggaggtaccgcatgtatacaagaaaaagaatcgtcatcgctctgggcggcaacgctctgggagatacactgccggaacagatgctggcggtgaaatccacatccaaagctatctgtgatctgatcgaggacggccatgaggttgtcatcgttcacggcaacggacctcaggtaggtatgatcaacaatgccatgagcgcattgagccgggaagatgaaaaccagcccaacactcccctctctgtgtgtgtagccatgagccagggttatatcggttacgatctacagaacgcaatccgggaagaactgagaaaacgcggatttctccgcactcccgtagtgaccatcataactcaggtgcgggtggatgaaaaggatcctgcctttggaaatccgtccaaacccatcggacgttttctgaccaaagaggaggcagatttccaggcaaaagaatacggccacatcatgaaggaggacgcaggacgcggataccgccgtgtagtcgcttccccaaagccaaaagagatcgtggaactgggagccatcaaaaacttagtggactcaggacgggtcgtgatcacctgcggcggaggcgggattccggtcatcttaaaagacgaccatctgtccggtgccagcgcagtcattgacaaagactttgccagtgccctgctggcaaaagaactggatgcggatgtattgatcatactgactgcagtggaaaaggtagccatcaactacggtaaagaaaacgaacaatggctctccgaactgaccgttgagcaggctgagaagtttattgaagaaggccacttcgctcccggctccatgctgccgaaagtccaggcggccatagactttgcaggttcaaaaaaaggccggaccgccatgatcacgcttctggaaaaagctaaagacggtatcatgggaaaaaccggaacccggatccaccaataaaacaaagttctattaaggagggttcagcattgttctgtaccctcttttgttattccataggaaagttcttcgaacctccctatggaacaaaaaagccctacgggcattatgcacacaaatgcgtaaggaaactatttgactacgtcaaatcgcatttggcgcgcaaagcggaacaagtccctcataattgagggagttagggagttgaagcagacttgtccgctttgttatttgtgcctcaacagtttttctgccagctcatttataagataactcttctccccttcttccagcatataatttgtaaaataaacattgtcagttacaatgccgtccacatgaatgcgtctcatttttttcatgaatgtctctttatttacggtccatgcaaatacttttttcccatacaatcctgcccgggcaatcagctgtgtatttacaaagctctcctccacactgatcatatcggctgcttccagtctttccatatccccatatgctattgaggtaatgtaaacggtttttatctccggatccagctttttgaccttctgaaggatcctgtaatccatagatgctatactgcactggtcttcaaacccatatttacggattaaactgaccgtcttctcctccagatgtttctgatgcctgttgctttttaattcgatcatcagattgatgtgccggtctgccgccttcaccatatcttccagagccggtattctttcatcccggtaacgggctccaaagaaactgcccacgtcgtatgtctgtgcctcttttaacgtcacgtcccacacattctttttaatccccgccgttcgcttgaaatttgtgtcatgcatgacgatcagttctccgtctttagtctgctggacatcgatctcggcaatatccgccccgcttttgaccgcctcgtggatcgctgacatcgtattctccggcgcaaacttcgcaccagcccggtgagccaccacctggatctttctgtcacttggagtttcatagccgtatggcatggtcatctccatatagaacacagagataatataaaccgccgcacactctatgagcacaagaattttccttccgttagtgcgcctgcttatttttgtggatatcttgtgtccctgtacccgataatagatcacagagaccgttccaaataatatgaccggttttagcatggcagacagaaaactcaatgcccggttcaggtcatggtaatgataccaaaagtcataaaaagcacttcccagactcccggtaaaacggatgatgatcatcattccaatcaggaccgctgtataaaccagtgacgcccccacccatagaaagagcatgatacacagtacagaaacggcactttttcttttcttcccatttacaagttctgcactcttttggcatgcccggcgaaacgtaatcctgttcagcacaaattcatggaggccaaagatccagcggcagaacaggaagatcagtacaaaaatgagccctccgtataaaatactcagtacagtgttaccccggatgaattccagaataaacccagggattctcaaagagccgatggggccggacataacgctgatcccggtgacaggcattgccaggatcaaaagaagaactacccatagattccctggccaagacagcctgcctgctcttttggcactctctatcagaaggccgtatacactggccttctcccctttcatgcccatatggcagtacaagataatagctgtgatttccaaaaaagaaaaatatatgaccataagaaatgataacaccaatgctgccagagaatacggattaaccaaaacctgaaacagattctggtttgtcagatattcaataccggctttgctgagagcaaaatcaatcccattttcactcagcgacatcacagtcaggaataccattttatagatgacttcaaacagcaaaaggaccggccagtcccacgtcaacaatttccatagatcaatgataagtctcttgatatttcccataaacaccccgctctaagtttcgtccgtttagaaatatcttttcctattttctgtacaattaatctatacccaaaagaacaaagcggacaagtccgcttcaactccctaaatccctcaatcatgagggacttgttccgctttgcgcgccgatgtgcggctgcaaagcagccttccttggcacatcgtgcgcatcatgcccggagggcttttttgttccatagggagaactttcctatggaacaaaaaggatcgaagcacctgcggtttccgcctcagataccccaatcctatgtttattttcttgttaattcttttttttcaccgggtagcatacttccgtcacaagttcctccggagtctctgcgtcatgcggactcacgtgataaatacagagagaagctccgttaaaatcgtaaccattctcacagatccactccgcaactgctttgtttaccctcgtgagctgctcgtagcttcctttgtacgtgacggacgcgatctccatggcatccacgtccttaaatcttacattctctgtatcctgatagatcccgctcactgaaatctgaatctcaacgtccacgtcactttccttgaaacctttgtcgtgaaacactgccagcccataacatggtactgccggacgtacatcctgtcctgcaatctctttgttcagaagctcccacagcataccctcacagttatatgcagggatcacctgccggacactcgccacatacctccttggcagtgtttttaaaactacattataatccataaaattcccatcctttctcagccactgtatcgtattgtcaagcagcctgatcctctgttctgtctcctgtgcctggcagaggagttcttcccgcttgatttgcagaaactgctctatctcttctgcgtcctcgtatttcaccagaatctcgccaatgacagataaaccaaatcccatggttttcagcacctgtatcttttctgccagcggaagctgtgattcactgtaataccggtatccagtggattcatccacctcctccggcacaagcagaccgatcttatcataatggcgcagcattcggatgctgactcttgacaatttagaaaaatctccgattcttaacatgtttcctacctctcacatatatgtgttatttctgagctcatgtttactatagactatatcacagtgtcagagtcaatagacaatcgtaaaacttctgtctattctgttatgactttgaaaagatcgttatcccgcttccctttttgagcaccggtgccttggccttcttggtgcagatacttccaggcagacattctccgtctccgttaaaagagatggtcacatgtccaagcgctttcaaattctcttccgcgatcaagcccacctgtgtcacctcgtactcttctccgtcgatgtctatcttccctgctgtctttaaatcaccttttacatcattcttctcaatataataacagtagtcctttaaagtcacgatggccttctgggcaaaggtgatcagcattcctttttctgcaaatatctccacttccggtcctacatcgttcactgttgtctcatataatatcattgctatttcctttccagctcttaaccaaatctttttgcgaagttattttataccttgtgtatacagaaatcaactcaaataaaacatttttaatccccccaatcggcagcactgtcattttaaaatatcgaaactcatgatattatggaactaaacgggtatgattgtaaaacacgatatggagaacagtatgtttaaaataggtgaattttccaaactcacgcaggttaccatccggatgctgagacactatgatgagacaggtcttttaaaacctgcacagattgatccgataaccgggtaccggctgtattccacagaacagatcccggtgctgaacaaaattatttatttgcgggacagcggttttcaggtggcagatattgctgcagccctcaacgctgaggatgacactgccgccgccagtctgctggacaaaaaatacagagagatccagaagctcattgagactgagaagaagaaacttaagaagattgaatatgcgaaaaaagaacttttaggcagtaaaaatgaaatgcattataacattttgttaaaatccatcccaagctgccaagtgctttccctgagaaacgtaatccccaattattacgccgagggtgatctgtggaaaacaatgtctggatttattgacaaacacagggttctgctatcagcagaacaaaccttttctatctatcatgatacagaatataaagaagaacatgtggacgtggaactgtgtgccccggtcaaaaaaaagctggcagacatggatggctttgtcttccgtgacacagagcctgtaccccttatggcatgtaccatggtgtacggtcccttttcaaacatcgcagacgcctatatatcctttgcccagtggctccaggaaaagagccaatatgagatgaccggccagacccgtcagatcgtccaccggggaccttggaacgaaagcagtccggaaaagtatctcacagagatccagatccctctaagagagctttgttaaatctactccttgactctcacatgatgtgagggtctatatttgctttgtaattaaaacaaatatacggaggtacgtgttatgaaaacatttaacgtcaattccatcggaaaaatccgcagcagcgaagagggaaccgtgatccagatcgatccgccctatatccccgctttaaaggctctggacggctttagccatatcaacgtgatctggtggttcagtgaatgtgattccaaagaagccagatctgtccttgagacagcccagccctatcaacattcaccggaggtcatggggatcttttctaccagatcacccatccgacccaaccccatcgccctgaccgcatcggaagtcctgcatattgatgatcagagtggaacaatccagatcgcttacatagatgccaatgacggttcgccggtactggatattaagccctacacaccgagccttgaccggatcgaatccccacaggtcccagactggtgcagccattggcccaaaagcttggaggaatccgcagtctttgactgggaaaaagaattcaatttttagaaaagaacaaagcggacaagtgcacatcatgcccgcaaggctttttagtaccatagaaaggttcgaagagctttcctatagaacgaaaaaacggttaagttcagatcaatgaacttaaccgttttatataatgcagaagaagagactcgaactctcacgggagtaatcccactgccgcctgaagacagcgcgtctgccagttccgccacttctgcatgtctcaagcaaaattaataatacacgattccaaagaaaatatccagtctttttttcattttctttgtatttttttacatacatgctcaaaacagttgattttatgaggattctggctggaaactgccggaatcaagactacattccctgctccttaagccattgttcgatctgtccttttgactgtgcagccacaagaggctttcctacctgtccgtccttaaatagaatcattgtgggaatcgtcatcacctggaacttttctgccagttccatctgttcatcaatgttgatttttccaatctgtactgcacccccattttcctcccccagctgatccagagcaggtgaaatccttctgcagtagccacaccaaggagcccaaaaatcaaccaatacaggttttttagattccgttacctcggattgaaaattttcttttgttatatttaaaatactcataatgtgccctccaattcttttgtgaactgaaaccatattagttacatttcttactgtaactatatcaattacatttctatttgtcaagataatgttttaatcaaatttgaaaattgctgcctttatgtacaaaactaaaaaggataggcaccttctgcctatcccaatccttactcgctctccaacaactccgcaagttttctggaaatctccagaacaatctttttatctctcggaccgcaattttcaatcaccgcgtccagttccttcacaaaaatatcctctttcatttccagagattgataactgtccatcaacaaatagtccacagaaacacccaacgcattgctgatctccaccagcgtaggaagtgagaccttggtctttgccgtttcaatatttgaaacatgacttacagaaaggtcaaccttctccgccaaatattcctgggtcatattttgttttcttctcacttcttttatcttccgcccaagagcctcataatttatcttcatacactttccccacttctttctataatttatgtaacaaaatataatctctgatttacataaatactttttatttctatagtacatttctttatctatattgtctccgttattcgtttttgttagaatagtctatataaataaaaatatttcatataatataaaaaaggtggattttatggataaaaaacattttttcagaatcttgggcgttgcctctgtctcgattttcctctggctgttcctgtcactggcccgttacagacagaaagaaaaatgggcaaaaaaaattgtcggggaatggcgtctaaaataccgtccccccgacaatgattcttcaggaactttataatcttttcatgatctcatagcaccgattagtcacataaccagcccatgtgtttcccacacaatagttctgattgaccccttttacggtaggaccgtgataataggccccgcccttgaccagatatttttctttcaaaagcttagcagtcatcatcagattctcttctttggttggtgcgttgatgcccttggcactgtctgaagtgaccccgtagcctgtgagattatgatcttccctggcgcgcctgctggtgccccaggcactttcgtgaatggcaatgcccatcaccataacagcattgactccgtaagtcttctcacacttataaaatgccggagcctgttcctctagagccgtccccttcaacataagacggatctcctccactgacagattgctcttcttcagcagatccatcgggtcaaagatacggggcttatctgcattcaattctttgatctgttttttcagggcctgtatcttttttctgctctttttcagatcttttattcgctgctcctgcgtcttgtcgcagttgagaagctgctggtctaagtactgcttcagctggatcgtctcctcctcctgaatgacatccgctaccttcacttcaccggccacatcaaaattataatttctagcaatgtcttttaagtaacgattctttgttttctgtgccaattccatgagcagatggttcaccctgtgtccgatctgggtgtcatctccatcctttttcactccggtcaacgccacgactcctggaagcgttacactgccgctctgttcctccagtgacgcataaaacttctgaatctcttcctttaccttatccgtatgcatcagcccctgttgcaggctttcttcctgcatgagctgccgtttcagctttttctctctgtcaagcgccgttttggatctgaccgatacggaatcttccggtgcttcaattttcttttctttctttttcttcttgtcttttttctttttgtctttcttttttttcttctctagctttttctttttatgtactttgtccggcttttctgagtccccctttttctctgtatctgttttctcagaagccgttgttggtttcggcttctgtgttgccgtctgctcttctgtggccgtctctgtcttctcttctgtcgtgccggatgacgaagtctccgcggtctccttggcactgtcaggcgaaacggcaaaagccggcactgacatactcaggatgagaacgaccatacacaagatactggcggcctttcttagaactttactcacactgatacccccttgtatattttccatcatacatccactggcataatttcgcaactcctaaacctgatttcagatttttttaataaatggaaactcccgcaagccgcagctcccgggagtctctttaccttttggaatattgtttattactggatgattcttcttgcacaaactggagtcctgtaaaatgcatttgagatcttgattccaccctttggataaggtgcggaattacttgcatgcacaacctgtccgccgccgatatacatggccacgtgattgatgcttcctccgcttccgtagaagatcagatctcctggccggagattactggtggataccgcgacaccgtcggaagcctgcgcgctggatgtcctgctgatgctgtatccaaacttagccatgatctgctgtgtgaatccggagcagtcgataccgtttgtaagactgttacctccgtagcggtaaggatttcctacaaactgctgggcatagtttgccgctcttgctcctgtagatgatcctgaaacacttgcggatgccggcacggattttttgctctggctgccgccgctgctctgcgtattggaagaactgctctctgagctgctctgggatgactgtacttgctcttctttagcttctctggcttttctttctgcttccagttttgcctggcgctctgcctcgatctgtttcatagattttgcttttttgaatttatattttacatccacataatcctttgaaacatatccagtctcgccttcgactttaacctttgcccagtcaccgttctgctttttcaccttataagtctcatcctcagagactaaagttacaacatcagcatccgtggatgccttttcccgtaccctgagggtctctgtcttaacttttgccaccttcttgatatttttttctgcaaaactctggatgtcgtcttcaaagacaaggtagtcatttttcacatatccggtcacatccccggatttcacttttgtccagccatcgctcttttctacaatcgttccaagcgctcctcttttcatttttcctaagatcttggaatctgtatttggcttctttcttatgttcaaagtagaggagctctttactttcgcaactactttattggcatattcactctttgcctgatcgttttcttttttctgtgtctgcgctgccggctttgatgtctcttttggtgccgcatttacaggagccgatgtcaatatcatacctgccatggccacaactgcggcagacagtttcatcttcttgataatcatgtttcctcctcaaattctaaatgttacaaaattgttaactttgttgctacaggtgctattataacacgcacagcccctatgtcaatactttttaaacaatttcgtaatatattcgtaatatattatcacattttgtaacattgtagagaaagatggcagctgccgtcaaattctggaggagactcctataacataaaaatccctcccgcaggaaaccgtccttgttcaaagaactgtcttctgcgggaggggtatccataacccagccgggctgtagtttaaaatctatttcttaagccagttttcctttagcaacatcaactaatgctgtaaatgcttccgggctgctgattgccatctcagaaagcatctttctgttgatgtcaacttctgctaactttaatccatgcataaatttgctgtaagataaaccgttcattcttgcagctgcgttgatacgtgcgatccataactgtctgaactggcgttttctctgttttcttcctgcgtaagaagatgtaagagctctcataacagactgttttgccactctatactgttttgatctggcacctctgtatcctttagccagctttaatactttattatgtctctttcttgcgttcattccgcctttgattcttgccatttcttatagtacctccttcaatattctatcttataaatacggtaaaatcttcttcattacttttgcgtttgtagaatctgtcactgcagattttctaagatttctctttctcttaggagatttctttgttaagatatggctcttatatgccttatttctttttaattttcctgttcctgtctttttaaatctttttgctgctgctctacatgtctttacctttggcatgataatttcctccttgtactttcttgcttcttcctggcactagttcttaggtgctaaaaacataatcatacttctgccttcaaatttcggacgtttatcaacggtcgctacatcatccaacgcctttgcaaaatcatccaggattcctttgctggaattcacatgggcaagctctcttcctctgaatcgaagcgttacctttacacgggcacccttagataaaaatttcctggcatggctgatctttgtattcagatcattcgtatcaatgttcggagacatccggacttcttttacctcaacagtcttctgcttctttttcgcttccttttccttgcgggccagttcatacttatacttaccgtaattgatgatcttgcacaccggcggcttagctttcggagagatcttaactaaatccagttcagcctcgtcagcttttttttgagcttcccttgcggacataatccctaactgtgacccatcctctccgatcagtcgcacttctttgtctctgatttgtccattgatcattaaatcgctaataacgttacacctccataaaaaaataagtggatagtcagactatccactttacattcaagcatgattatagaatcaatttcttaaatattaacccaagtcactctggtgctaaggtgagagtggatactcttctttcttgttcctgttgtttctcacaactcttaatatcatacaatcaaaatctgatcctgtcaactgtttttgcttactctttgctgaattccaccagttcgagcccatcgtttcgatccagcacaaattggatgccccattcgtttttaaataaaagaagtggatttcctctcatatcccggactttcttcacttccgccacaccctttaatttgcccatgtcagttttgacgtctttgatccagcggatcgcctggtacggaagcggctccagccggatctcacagttgtactcgttctccaggcggtattttaacacatcaaactgcagggtgcccacaacgcccacgatgatctccgcaaaccctgcctggtgctcctggaagatctgaatggcaccttcctgcgcgatctgctcaacaccttttacaaactgttttctcttcatagagtccagctgaatgaccctggcaaaatgttccggtgcaaaggtagggattccctcatactcaaagtcatcttttggcatacagacggtgtccccgatggaaaagattcctggatcaaacacgccgatgatatctccggcgtaggcttcgtccacaatcttcctctcctgtgccatgatctgctgcggctgggaaaggcgcatcttctttttgctctgtacatgttttacttccatattggcttcaaatttaccggagcagatcctcataaaagcaatcctgtccctgtggtttttattcatgtttgcctggatcttaaacacaaacgccgaaaagtcatttccagaaggagcaatctcggttccttttgaaattcgtggaagcggtgccgtcgtcatcttcaggaaatgttcaagaaacggctgaacaccaaagttggtcagcgctgatccaaaaaataccggggacagttctcctttctggactttctccatatctagcggctgtgacgctccgtccagaagttcgatctcttccatgagattttcgtaaaaatcctctccgatcatctgctcagcctgtccgtcatcgatggagaccacggtctctttcgcttctttggacccgccagtggagaccgcttcaaagcccaggatctccctgctgtttctctcataaactcccttaaattctttcccgcacccgatcggccagttcactggacaggtatcaatgccaagaactttttctatattgtccagaagctcaaatgtatctttggcctcccggtccattttatttataaacgtaaagatggggatatgtctcatgacacagaccttaaacaatttgatcgtctgggcctccacacctttggacgcatcaatgaccatgacagcgcagtcggccgccatcaatgtccggtatgtgtcctcagaaaagtcctcatgtcccggcgtgtccaggatattgatgcagtagtcgttgtactcaaactgcagaacagatgaggtaactgaaattcctctctccttctcgatttccatccagtcagacaccgcatgttttgtattcgcttttccttttacagagcctgctgtgttgatggctcctccatataacagaaatttctctgtcagggtggtctttccggcatccggatgcgaaatgatcgcaaaggtccttcttctgccgatttccttttcaatactgtttgccatagttcttcctctttctttatctcacatgcccctgcgggtattcctggttatgatagcataacaaaagatggatttccactaaaaatagagtttcatttgagaaactctatgctaagaattcatattatatttgaataacgccaccacacagtatcctttctgtcatattctttgaagccgatttttcgcaaaatcttctgtgatgaaagtccctcaatctcggtttccgcaatgatatgaccgactccctcctgccccagtgcccagtcacaaaatgcctggaccgtttcggtcatataaccgttatgttcaaagctccttcccagaccgtatcctatttcaacctcgccttctatgttcggaatatctttaaaatcaatggatccaacgacacagcggtccaattttctcaaaataaaccagaatgtatgccatagataatttgcaggatctctttttgctttatctgcctgcgcgcatacaatctcacggaacatcccctccattggttccgcttgataggaacagtttagttctttttcaagctctgccagattgcatgtccataagtcaagctgttccggtgtaagaggaaggatcataagcctttcagtttcgatcttcattctttttatcctttcacatagaaataatgctttttccacaggctgcccagccatatgacgaaaaaagcactatttctatttattccgaaattcactgttcatacatatcgctacttcgatgcttcgtatatctttataatatccgctgccgtaagaggaacaaaagaacccttgcaccctttctcggctttatctgccataacctcaaaatacttgtcatcaattcctacctccgacaatgtggatggaagattcatttgtttgaaaaagtttctggtacatttgaccgcttcttttgcggcagtgatgtcatccgtttctgtaatcccccatacatttcttccgtagtccgcaaactttccagcggtactatcgttcagcgcaaactccatccagtgaggtgtcaggatcgccagaccttccccgtgggtgatatcgtagaatgcacttaactcatgttccattggatgaacacaccattccacttccgcgcctccgctgatgatcccattgatcgccatactggacgcccacatcagatttgcccttgcgtcatagtccctgggatctgccagcgcttttggcccgttttcaatgcatattttcaaaagcccctctgcaaagcgggcctgcacgtccgcatgttcaacgttggtaaaataactttccagaatatgactcataatatctgctgtacctgccgatgtctgttttgccgaaacagaataggtatactccggatccagcactgacatccttggtttcaaataatcacttgaagtgccccatttttcattcttgtccatatcagagattaccgcaaacacatccatctcagagcctgtggccgccaatgtgagtacactgtaaataggcagagcccctctgatcttcttcggatcaatgaccagatcccaaggatctccgtcataccggacacctgctgcaatgactttcgcacagtctatgacacttccgccgccgatagcaagcgtcatgtcgatttcatgttcttggcacaacgcaactcccttgcggacagactcaatctttgggttcggctctacccctgaaagttcaaagatctcgaggccggcctcttttaaaagcccgacggccctgtcatagattccgttctttttgatgcttcctcctccgtagaccagcagcaccttattcccgctttctctcagttctttcagatggacaatctgcccctttccgaaatgcacctttgtgggaattgaatatgtaaagttgttcatcaaattacctcctattctggttcagagctgcggcaacttcactgtccgtgatcagcacattgacaattccaccccttaaagctccaaggattgcatctgttttttcaataccgtaagctaccccgacccggatcggtatcttttttaaatcctctaatcccaggcagatcagcctccggtcaaaatcatcagagatcagattcccttctttgtcaaaaactctggaaagcacctcacctactcctcccttttcctgaagtcttttaaattcctccatgggaacgattttggcgttgatggtcgcagaattttcgttgagcgttccgatgccaaacacggcgatatccgcattctttgccagatcgatcacttccttcacggtttcttctttcatcagattctcttttactccgggatctgtcacatactgcggcgccaggatctgataactgttggcattgatgatcctggccgcctcatcaatcaagtagttggagtacgcagcacgatagttcttgtcctcctccaaagatatattggtagctcccatcagcgggatgaccttcacgtcttccagctttaagaacttcagtctcatatcatgctccaaacatgcgatggtcttttgcagagtagtccccctggtgagtgccaggatcattttatttttcaggactctgacaatataatcagaggccaggaacgctacttcatcactgatactttcactgtcccgctcatatgcaataatcgcttcttttaacccgaacttcttttccagctgctcttccacgctgatcatagaattcttcggataattgatcttgatctggacatatccctctgtcctggctcttgacaaagtcctagatatctttgtcctggaaacattgagcttctttccgatctcgctttgggacaaaccctgcttgtaatacatttctactacttttaagacaaaccgctcttctttcacgctctccatccttcttctcaccactttcctatgtctaaactatctgtaaacagtatttttctttgatcttcattttatcatatccgttccggaaaatcatcatccccctatgatgccgatgcatccaagaatgagtgagagtactgtgactcccagggtggccgcaaaatagtttcttttaatctttgataagtaaccccatacacagagcaccaccacaagaggcagaagccccggcacgatggagtcaaagatggactgcagcgtaatggaataactgctggtggcaagtttcagcggtgtagaaaccgtcacataggtggaagccagtccccccatcataaacagtcctaagatacttgcccctgtgatcactttatttaccagtccggactttaacatgttttccgcaaaggagtaaccaaactggtagcacttctgagtcagaaacaggccgatgctaaaacatatgaccgtcagcagtacaaacggcgcaatacctcccagtgcgtttccgctcttggcaagaggcaggaacaatccaatcagcagatacatcagggttgaccaggaaatggtgtccccaatccctgccagaggacccataagacctgttttaagattgacgatcacttcccccgggatcgcctcataattttgtgactttttctcttccagagccagggtaagacccagtatcgttcctccaccccaatgaccttccgtattaaaaaatgtcatatttctctttaatgcttcgacaaacttcggttgatcctcttttttagggtagtatcttttcagtgcaggaactaaagccgtacagaaactgggagcctgcattctctcaaagctgtggcttatctccgccgttgtccaccagatcagccaagctttaaaaatgtcttttttgctgagcagtttttgtccttccgcttcaggttcttcctcctcatcatcttcttcgtccagatctgtctccttccctttgtctgtgaaagtaagatacaggaaagtgagaaaaagacctgccagcagcagtggtatcgttccgattttcgtatattcgatcaggaaaaatcctgcgaaaaagaacggcagatactttggctttgagatcaggcttgcgatgatggcaaaacctaccgccggcaggcacgcgcccatagccgccagtccgttggtcaccgcggcagggatatggtccagcactccctgcagagccccgcttccaaagtacagcgccaaggtgaccggaaccataaatatcagtgtctttacgcatccgcagtataaaaccgcccagcgtgtcatccctcctgcatcaccttttcctgcaaactgatccgctctctgggcaaaaaaaccggccattaaatagacaagattttgaagctgtgcccccagaagcccgatgggcactgcgatagccaccgcggcagttgtgttgagtccggacgccattgccaccggtatggcaatgtacgatgccagacatggatctgtcggctggtttccccccgcggagataacgcccagatagatcagctgtaatgaagcacctatgatcattgccgtcttcatatctcccagaacagctccaacaacgactgcattaaaaacgactgtgttgatcataaacgctgatggcgtgtaaaaaataattgcctttgcaaggccgcagatcaggcctaaaagcaacgcttgaaacaaagtgattcccatgacttaaccctccgatctttataacaggtccggaaagactttttttatccgttcctgcaaccctatctttttatccgtggggatcatctgaaagctaaacttgatccctcttttttctaagtcgagtaatgtctctgcttctgcttttgataagccaacctgtttgtaaatctgtttccgttccccggtcacagccatctggccgatggtgatctcgtcaaatacaattcccaaatccgcggttttttcgatctgtcccacctgtttgaataagacaaacacactgccctttccaaactggtttttctgccactgttctgccgccttgtcagaagagtagatactgacttttatgtccggcggggcggcaaatttcaaaatacttttctgcatcttgtctgccgccacctgatcgtcgatcactatgatgtggtctgccttaaaaatgttcacccattgcgtcactacttgtccgtgaatcagcctgtcatcgatccttactgccaatctttttgccatacagatcctccttccacactgcccggaagcccctatttacttttttaatctagtaagacactgactctgtacataccgggcttgcttgcttcctcaaatgcttcctgtatctgatcgaggcagaatgttttcggctcaatcagtttagaaacatctacgatccctgcacttaacgcctttgctgattccataaaatccttgtggtttgccccaaaggttccgatcaggctgatcctcctgtagtggagcgtattcggatcaacgtccatctcaggagcaggatatcctgccgcaaacaacaaaatcttgccgtccagttcccttatcatctccagtgcctgctggttggcgtttgtatttcccactgcgatgatgacggtatccgccccttcttcctgtgtaagctccatcactttttttacaggatcttcagtgcctccgtcgatcacctcaaatcccatgtctcttgcagtctggatttttttcggtatgatctcagagacgatcactctggcaccataggctttggcggcctgcgcatttaccagccccatggtccctgccccgatgatgaccacgttttcaaacggtctgatctggatttttttaatgccgtgcagtacggtcgccagcggctctaaaaatcccgcctcggacggattcatctcaggattcactttataaatactttttgcgtctttcacacagtagtctgaaaatccaaaaaaactgaaacaatatccatcctcagatgtttttgtctttgacttgcaagcatccacgtcaccgttcctgcaggccatacagtggccgcatccgttgtagcccgtggccaccagatccccaacctggtaatcgtccaccttctttccgactttgatcacctctccagaggcttcatgtccccccgccatagggtatccctgatgctccctgagccccagccactgcccgtaatctgttgtacagatattgcaggctttcatcttaagcagtacctggtggtctcccacatccggcagctccctttcccggacttctgccactccctttttcaccaggcatccaaatttcattgttgttggttccatacgcttaccctcctgacaattatgctcttccatcacttccaaaaagaatcatataacgttttaactcctctttataacctccggccatagttttggacacatcccacatattggccgccggatttccaaactccccgagtgacccgtttttctccatgctttcgtaatcgatacctagataggacttcagcttcgtaaggcctgcgttgctcaagtccgtacagaggttaaccttctggatccctgtctgaactgcttttttaaggttctcgtctccggttccagaaccgccgtggagtaccagaggtatctcaagcagtgtatgcagctcacccagaagcccaaactccagtttcggtgtccctttataagttccatgggatgtccctacggataccgccaggcagtcaacttctgtctcttccacaaatcttttagcctcttcctttcttgtgagcccggagtctcttgtctgctcatactcaaacccctgacccacatgcccaagctctgcctccacggaaatccctgacgcatgggcgatcttcacgatctcctttacctcttttatgttctcctccagggaaagagtggagcggtctaccataacagaactaaatccaaaacggaccgccgctacgatctcctcaaagtcaccgccgtggtccagattcagagccgcggtgacctccgggaattttttctcataaaacttgactaagtctgcggtctcctcgatgtcatgtatccctgcacagtcgatcaccaccggagctttcagttccctggccgcttcaaagacactcttgacggtaaatctgtcccacacattgggagcagccactccgtaaccatcctgctttgcttttttcagtatctgatccatcgtaactatcatattgacctcctaatcaaatatccactataggtatcatttgttcttacccgtagtatattcccgttttgtatctttgtcaattcattttttctttatagtgcacatatgtgcacatcaaaacaaaatcaacaagcttgcgcaccaaatgtgatttgacgtagtcaaataatttcttcacgcatttgtgtgcatactgcccacagggcttttttatcccatagggaggttcgaagaactttcctatggaataaaaaaacgcctgcagacattctgcaggcgttttgcctttgattcttattcttttatcagtccctgttttaccagatagttgtgtgcaacttctctcggttcttttcccaattcatctacttcgtaattcatctccatcatagcgtcattggtcagctgagaacttaagtcgttgatgacttttttcagctcaggatattgattgagagtatcctctctgatcaccggcaccgcatagtacggagggaaatattttttgtcatcttccaataccttcagtttaaacttctttaataggccgtctgtcgcaaatgcgtctacaacgtccactttcttattctccagtgctgtatatctcggagaaccgtcaatgccggtctcacccttaaacttaaaaccgtaagtttcacataatcccggaagaccgtccgcacggtttaagaattccagtgtggaaccgatgctcagctgggatccgcttttcctcagatcactgatcctattaagattatacttcttggccgtctctttgctcacggccaatgtataagtattgttaaactttgtctgatccaatacttcaaaattatttttctctttaaagtatttcttcaaagcctgatagactttatccatatcgttggtggattcctgtttcataatgttcatatatgcagttcctgtgtattccacatacatatcgatctcgcctttatcctgggcttcatagcagacctcactgcctccgagattttctctccggtccaccttgatatctgtcttgtcctcgatcacatcggcatagagattacagagaaccagctgttccgtaaagtctttacttccaatggctatcctcttgtcatctcccttgaagcttgagatgatggagttgcccatgatcacaacgatcaggactcctaccagtgccagcacacctttctggcggcgtctctttctttttaactgttcctttgaaccttcatatccctgctgcagactgatcggcgtcacaagcttttcaatcagccccgccagatagtctaccaaaagagctaagatacatgacgggatagcacctgccaggatctgtgcgttgttaactgtacggattcctgaaaataccagatatccaagtcctccggcaccgataaaggcagccatggtcataagtcccactgccgttaccgcagagatacggacacctgccatgatgatcggcagagccagcggtattttgaccttaaacagcacctgtgcttttgttaagccgattcccttggccgcttccaccatttccggactgatactgttaataccagtaaatgtgttcttaatgatcggcagcagtgaataaatgataaccatcaccacggcaggaagggtcccgattcctagaagcggaatagacagtcctaaaagtgccatacttgggatcgcctgtactacatttgccactcctagaaccggcttgtttagattctttacatagctgatcaatattccgagaggcacaccgacgagaatagagcatcccaccgcaatggcggtgagttcgatatgttctgtcacaagagaaaaaatctgttgtttattttgtatcatatactgaataaattccatcggttacacctcctcctctgtcatttctgcatgggaaccttctggcggttctccctctgtttcttcttcatcctctgtcaaatactgctggctcaatgtagagatcagattactgtttgtgatcagacccagcaccttttcattttcgtctaccacagggatgtttcctacgtcatactcatcgatcagctttaaaagctggaggatgttgtcatccgggcttgcggtcaggacatctgtcttcatcatagtctccgctgcagccagcggattcttagccctgtagagggctttcctgttgaccatacccttaagtttcctgtcttgatccactacaagcagtgtatctacatggcgttctttcatccttttcacacaccggcttctggacaggtccccggaacaggtgactggattctcgatcatgatatcttccacctttatgtattccggtgatccccagatacggttttttcctacgaagttttctacaaactcattggccggatttttaagaatctcttccggtgtatcatattggagaatgtgtccgtctttcataatacaaatcttatctgcgatcttgatggcctcatccatatcgtgggtgacaaatacgatggttgtgtccaccttctcatggagagcgatcagttcatcctggaggctgactcttgtcatagggtccagcgctgaaaacggctcatccatcaaaataatctttgggttattggcaagcgccctggcaacacctactcgctgctgctgtccgccgcttaagtcattgggatagcggtcgaggaattcctctccttcgagtccgaccatatccatgagataatctgtatttttcctgatctcttcatcattctttttttccaatctctggatcagttcgatgttctctctgacagtcatatggggaaacagtcccgcctgctgtatcacatatccgatattgcgccgcatctcgactttgttcatatcttcaatgtcattcccgtcgatgaaaatcttgcctttcgtcggacggatcagccggttgatcattttaagcgttgtggtcttgccacagccgctggaaccaatgatcgccaccagttccccatcttcaatcgtcagagagatatccgacaggactttattatctttaaaactcttcgttacgtgttgaaactcaatcattcatttcactccttttgtttaaacagtcaaaaggatctgtgtcaccccagatccttttattccgttttctataaaacaaatatcatctgttatactatagaattatcagcactgcctttttagtttatcatattttaaaacttttttccactcaggcagaagaggcaccgtacagtaacagtacgatgcctcttaaaaaggaaaaaataaatgcaaaaaactagtcaaaaaatttgcccttataaaaattttcatttccgagtttttttgccgtcagcctgaacacaacacagccatccggacatacaatatccttgctgtattttccgtcaccgccgatattctcaagatctcctccgcttctcacagcctccatgaccggaaacatcatcatcattaccttggagcagataccctgcccatccgcattgacaggacagccataggtacacatatatttatctccgatttcctcaccgttcctgcaataccgctctgtgtggtcacttctgagaaatcccgtcacctcgatttcaaactcatactcctcgtcataccattttttcattttaatctccattccgccgcctttcagtcggcggcacaaatagtaatgaaagattttcaaaacctcaactccatgagataatagcttcaagaagctacactacaaagcacgggaggaggagttgtaaa

SEQ ID NO: 5 - DNA, 255535 bp, Anaerostipes rhamnosivorans
  misc_feature (197868)..(197965): n is a, c, g, or t
cacatcaacctacattttatatgccttctgattagtacaattcaaaagaacaacagccatctccagcagacattacgtccattttcaccagttcggaggccttgcattcgaagggacgttagttttttttcttgaagtaaagactcgtaggcggtgcgcattgcgcagtgaggctgtctgagcatcagcgagttccgaacgggccgccggagaactggtgaaaatgtcatatattattggatatctttacttttctccgtgcttctttccgtttttccatagcatctacacagatagtgcaggctgcgtctcctgtgatatttactgtggtccttgccatgtcaaggatacggtccacaccggctacgagagcgattccttccagcggaagaccgacgctttgcagtaccatggcaagcatgatcacaccggaacctggaactcctgcggttccgatggaggccagggtggtggtcaggatgatcatcagctgctggcttaaggtcagatgtacgccaaagatctgggcgataaagatggcgctgactccctggtaaattgctgtgccgtccatgttgatggtggctcccagaggaagtacaaaacttgcgatctccttgcgggcgcccagcttttctgtgcactcatagttaaacggaagagttcctacactgctggcgctggagaaggcaaacagcatagccgggctctgttctttaaagaatttcaaagggctgatgccgctgaaacccttgactgcgctggaatagacgacaaccatatggacgatgctggtcaggtatgccactccgatcagtttcagaagaggaagaagcaccgatggtccatttgcggcaaccacaggtgtgatcaaagcaaatacaccgatgggggaaagatggatgataatactcatgatgttgatacagacttcggagagactttccaccaagtccgccgcaggttttcccttgtctcctgctattatgataccgaaaccaaaaaataaggcaatgacgatgacctgaagcatggttgcgcttactaagggctccactgcgtttgatggaaagatattcaccagagtatcgatcagggaaggggccttggttgctccctcatacgcttgaagggaagaactgtccatcacataacctccgccgacattcagtacatttgcgaatagcaggccgaacgtaacagcgaacgctgttgtcacgatgtaaaaacagatggtctttcctccgatggagcctacttttttaatatcctgcagggacacgactccctgaatgatggaaaacaggacaaccggaacaacgatcattttgatcaggtttaagaatatggttccgaagggctgaatgtagttgtcagctattttagggtggccctgaagcagcagccccgcaacgattcctaaaaatagggcgctgagaatcatcacagttaatgataatttctttttttgttttttttcattcatactttctttttctcctagatttgtagtgtaaccacaaaatattttaaaggaaaaggtcgagaaaaacaatgggattaaccggaattattaaaaaaatacttgcaatttcatatttcatacagtataattttaaattgtcaggtgacatggtgggattcccgagtggccaaagggggcagactgtaaatctgttggcaacgccttcgaaggttcgaatccttctcccaccatcagccgttgtggcggaactggcagacgcacaggacttaaaatcctgcgggacttatactcccgtaccggttcgattccggtcaacggcattatcggaaaatggcctcaatcttaggattggggccatttttatatttgaattataaatcatcgtataaatacaacaaactctattgtaaaaaaaagtaaataatgatataattattgtagtaatattatgcgccactggtttccatatccttttctgtaatacgccgattcagttttttcatctctggtatgacaaagagagcaacgattacagcggatgacatatcagcgataggacccgcaaagaggatcccgtttagtccgaaaaaaagcggaaggatcaagatcagcggaaccaaaagcagaagctggcggagcatggagagaaccgatgctttcaacggctgtcccgtagcctggaagtagttggtggatacaatctggaaaccggcacagaaaataccaaacagatagatcctgaggcatttttcagcaaagcttacaaacgcagagttgccgcctccgaaaagctggacgatcaatccagggaacaactgacagaccagccatccgatgagtacagaaacagttgccgctgctaccgcatttttaaacagatgcttgatccggtggtatttctccgcaccgaagttaaatccgaagattgtctgtgaaccaatgccgatgccgatacaaacggatgcaaggatcattgcaagcttcatgacaattcccatggcactcagtgccacatctccccctactttgcttatattcccgtagtatacaagtgaattattcatcgtgatctgcatgacacaggccaccagctgggttatgccggaggatgtgcccagcgcaatgacatttttacagatcgaagcatccagcttcagctccttcaggtgcagacgcatctggctttttttgcagaagtatagaaacaggatcagagcggaaatgatctgtgatgtaatcgttgcgactgcggcgcctttgacaccccagtgaaatttaaagatgtaaattggatcaaggatcgtattcagcacagctccgatcagaatgccgtacatggacagcctggggctgccgtccgtccttgccatattggaaagacatggtccgatcacactgaaaggtacaccgattagaataatggaagcgtaatcttttgcgtaaggcatgatgctgtctgtggctccgaacaatcggaggatcggttccataaaaataaagccgatcacggccagtacgattcccatgatgatggacagcataaagttattgttcagcgtcttttccgcttcctgttcctttttctggccaagtttgatagcggcgtaagcgcttccgccggagccgagtagtgtggcaaatgccatgatgatcgtaatgataggaaatgtgactgtggtagcggcgtttcccagatatccgacgccctgaccgatgaaaatctgatctacgatattgtaaacggaattcacaaggactgagatcgtggatggaactgcgaattgaagcagcaattttcctaccggttcatagcccagtgggttttcttttctttgtgtctgtatttgagtttccaaattactttaccctccttttttctatataagaatatgcattgtctgatatttttgtaagcagcgcctctgcctgatggatctcttcctgtgtcaggccctttaccaggatttcattccactgttcccgcagatcataaatcatctgaagtgcaggttctgcctcccgtgtggtatacaggtgatgaattcttttatcacagtcatccggctcccgtcttaaatatccctgatcctccatttttttaacagcttttgtaactgtccctttatcaaaatggcctatctgggccagctgctgcatactgataccaggattttcgtggatgcagactagaaagaactgctgtccagggccgatctctgtcttagacagggaaaagtcaaaaaagcgcattccctggcggtgaataacagaaatcatcctgctgatttttttcatagaaacctcctctcaaacagatagttgaacatccaactattttgggacaaaaaaattagtataccggacacggaaatatccgaatactaatttaactgtaacaagtataacacatattagttgcatattcaactagttgaaagaataaattatatataagtgcatcaagaaaataccatatattgccaggaacggggcgggaacactggtgataaaataacaatataaggagaaaagggaatgaacaacaattcagggaatgatcaaaaaaggaatatattagatgagttgggattaccggacgcaaagcttataccggaagatcaaacatccaaagaactggacaagcgtatgaaaaaaatctttgatgacgccagacgaaacagcatattagaagataaaccggaaagatgagactctcatattttatgcccttcgggcttggcgtgctacgcacgataatgtatgagttatttaccactatttccgtcgcgcttttgaaatgcgctcctccaatagtggtaaataactttcgtggagcagccccttttgactcacatcaacctacattttatatgccttctgattagtacaattcaaaagaacaacagccatctccagcagacattacgtccattttcaccagttcggaggccttgcattcgaagggacgttagtttttcttcttgaagtaaagactcgtaggcggtgcgcattgcgcagtgaggctgtctgagcgccagcgagttccgaacgggccgccggagaggctttgctgaaagttagaaaatcttacgtccctgagacagcaagccggagaactggtgaaaatgtcatacccacagggcacaccgtatttcatacccttcgggtggacgtgctttgcgcaataaggtataattttatctgtaattatttttttgatggaggcgaagggctatggaaattacaagtttgctgccgggtgtaaaaatcctgaaagaggacgggcaggtaaaagaagatgtttttatctcacaaggagacaagattcaggtgacggcatcaggcaaaactataacaggaatatttatgctcgttgagtttgcccgttacagtgaagaagatgatattcttcatatggttaaggatgaggaaggattcgcggtacagtttgatgagatcagcgatattgttaagctttagttttaatggaaagtggaataaaaaaggctgctcagttcaaaactgagcagccttttccatgtttgaaatattatgcaagacaaacgttgacagcctgtaacccgcggttaccctgagttgtctcaaatgtcactttctgaccgtcttctaaagttttaaaaccttctgaagcgattcctgaaaaatgtacgaatacatcttctccagtgctttcgtttgtgataaatccaaatcctttagtgctgttaaaccattttactgtaccgttattcatgtggtacctcctaatattttttattgtatttgaagctaaaataaaaaaatcacatattttttgtaaatcatcaagaagtagtaatgatttacaaaaaatatgtgaaaatcaaaatcttatcaaaatacttttttataatatcatggattgatataattgtcaatcaattctgaaaaatactttaagtccaacaatatcttcttctcataatccggagaaaactatagctctgacaacatcttaataagttccattttatcttccgtggacatttcttttccgtttctggcaatgagagtttttaaatcatcgtgtgacggagatgtcttgtcagatgtgatcccctcagccatattattcagttcttcaactgtgatccctaaatgcctgcatatgctaatcacattgtcaacgctggcttttccggcaccatttcttatgatcccatataaagtagtgtacggcatattacatttgctggcgaaagaccgcaggttatagccctgttccttaatgagtctgtttaagatttttgccttttccatgattccacctctttcaatctccttcattatatatgagaaaaaataaaatgtaaacgaatatattcggaaaaacgaataaatatggaaatcagaatattttaggttgactatacactcaaatgagtatataatttaaacataaattcggaattaagaatataaggaggtgcttaaatgtataaaaacttaaatagagcaatgaatgaagaacatgttacatatacgcagattgcagaactattgggaaaaagatatcaaacgatcagtgatacggccaatgggtctacaaaaaaagggttttactttcaggaggcctgcaagatacaaaaggtattttttccaaaatatgatgtccagtatttatttacgagggagcctagttaaattatagaacatatgttttgatatagcaagatataaaatcaggagagtgatgatggaaagaaaaatggggcacatactggttgtgctgtcagtatgtcttatcagtatccgggctgtccctctgtgggtggcattgtttatggcacttgggggaatggcatggctggataattaaaacaaagacattacaggaagatgaactgttctccggaggtgaatagcatggcattttatgaaaaggatgggatccgggttcccgagaaccaggcatttgattttgctctggacaagcttatgacgggggatatctgtgagcaggatgattttgtggattggtttttccagccgcttatgggctggcatttttatgaagatgaagatgagacagaatctatcgaggctgttacacagagccatatagacggtgagatccgttttctcaggaaattgtaactacgggcaatgagcatcaaataaagaaaagggatcagagtatggaatttacaggccgtttaaagggtatttcaaaagatatgacaacagggtatttcctcataactgtttctatgaaaagggatattttacaagagtatgaggatcttagcggaaaagaggtggatgtaaagattgtaaaatataagaaaaaaagaagccggaatgccaatgcatattttcatgtgttggtatccgaaatggctgatgtcttaggaaccagtacggcatatatgaaaaaccaaatgttgagaaaatatggacagtatgagatagtccatggacacttatgggaattaattatgagagatgacatagatgtgaatgagttggaacatttacacctggcgcccacagaaaagacaattgtcaaccaaaatggtacggtattccgctcttatatcgtcatcgcaggatctcatacttataatacggtccagatgtcccaattgatagaaaatacagtcaaggaggctcaagaactgggaattgagaccgcgtcgccagaaaagataagccgaatggaaaagaggtggcgccggtgaattacatattagagatcagagcattttatgatcagctggaaataaatccgcttcccccacctgctattgttttatggcatgcattgatgcacatagcaaataaaacaggttggaagcaagaatttacagtggctgtatcggtcttggaactaaaaacagggttaaatgcacagtccataaaaagggctagaaatagattggagcaaaacggactgatcaaatggaagagccggggcggaaaccgttctgcatgttaccagatgatatcgctgcaatacagaaatacatttgatgatgtaccgaagcggcagttggaatgtgaactgcaggatgaaccagaccatgaacacaataataaatataaacagaacaaaacgaaacagattacagaagagagggaatgtaaaaaaatacaggagctgtataacaccatctgcgtttcatttcccagatgtacaaagctctcggacagaaggcggagggcagttaaggcaagattgaggacctatggtatggaggagatgaagaaagttttttataaagctgaatccagtgattttctgaaagggaaaaacagcagaaattggtcagcaaactttgattggcttacatcatacagcaatatggtgaaagtcctggacgggaactatgacaataagagaggtggagagtatgaccctgcaacaacagattcaaaagatgagagcggtacatgtgatctcgtcaggatcgctcgagacagggggttcaaaggaaaatttgaaggtttttaactgtccggcatgcagggataccggctggatcaagagtataaagaatggaagggaatatttttccgaatgccaatgcaggaaaaaagagatgaatcagagaaggctggcatttgcgaatattcctgcggctttttacagtatgcgtttaaatacttttaatacatctgtatataagtcggagcatagccgcattatgatccagctggcctgcaagtgtattgcggagtacttacatgattttgaccaggagtacagacagggcagagggctgtatctgttttccgaagcaaaagggagcggtaagaccagaatggctgccagcatagcaaatgagctggttgacagggggtatcaggtaaagtttgcattatctgcggagatcattcaagaaatcaagagaacatgggatagggaaaataacctatctgagagcagtttattggaccagctccaggagacagagatactgatcattgatgactttggcacggagcaggcagctgcatggataaatgagaaattctatcagatcatcaatggaagatatgtggaccgcaaagtaaccatatttaccagcaattattctttgatgcggttaagatatgatgacaggattactagccgtatagaagaagtatcttatattataggttttccagaggaaagtgtaagggaacagattgcctttgaaaaaaacaaagagatgctggctaaagtggagcgtagcagcaaaggatgaggacaaaaacagggatagtagagaaaggaacatgtggtttgacagaaaaagagatgaatgaagccaaaaagaaatatttaacaaggtataaaaaatcccatttgaaatggctgtccttgtgtgagcaggagaagtccatcagagcagagatcgagggtgccagaagcccggagatcacagatatgccaagagcagctgggacagctgatctgtccgattggatggtccgcctggaaacgatcttagagaagatcaatgcggcaaaaagagagaattatggcatcagggcagagattgaggagaggattattgatatggacgatgggattcagagccgtatcctatggctccgatatattgactttaaagaatggaatgatatatgcacaagaatcggttatagctggaataggacacatgaactgcacagtgaagcacttcgtaactttccattggagaagacagtacagaaaaggatagaatagtatagattaaaaatggtatagttatgctagaaaagaagacaagataatgagcagggaagcatctgattttaaatcaggtgcttttcttgtgaatacaatgatagagaggtgtaaaatagtgccaaggagcagaagtccggattcaataaaggcggaagagatgtataaaaaaggtgtaaacctaaaagatatagcggcggaaatagggaagtcaacgagtactgtgcggagatggaaagatacccaaggctgggaaaacgaatgtcctgcggaaaataaagaaaagcagaaaacgaaagaagttacagatccggaagtggaagaagtcataaagaatgaagagttgacagacaaacagcaacgattctgcctctattatatcaaatgttttaatgccaccaaggcatatcaaaaagcttatgatgtcgattatagaacagcagcttccattgcgtacaggcttatggaaaatcccaaagtcagaagggagatccagaggcttaagaaagccagactgaaccgagagatgctgagtgaggaagatatttttcaaaaatacatggatattgctttctcaaatatcaccgattatgttactttcggcaaaggcagtgcagaggaaagccctaactttattgatcttaaagattcttcccaggtagacggaagcctgatctctgagatctcagtcagcagaaacggtgcaaaggtgaaacttctggaccagatgaaagccatggattggctggtgcagcatatggaaatggaaaaagcggaaacagaagatgacggctttatagatgcgttgaaagctgaggtgaccgatgtatggacagaagaataaaacaagctgcatttcaattccgtccgttctccaagaaacagaaacaggttttaacttggtggctgccaggatccccagtcagcggacaggacggagttatagcagacggagccatcagatcagggaaaaccttgtgtatgtctctttcttttgtcatatgggccatggaaaactttgagggacagaattttgccatgtgcgggaaaacaataggatccttccggcgcaatgttttgttttggctgaagctgatgctgaaaagccgcggttatagaacacaagaccacagagccgataacctgctggttattgaaaggaaaggaaaagagaattacttttatatgtttggcggcaaagatgaaaggagccaggatctgatccagggaatcaccctggccggagtcttttttgacgaagctgcattgatgccggagtcttttgtaaaccaggccaccgggcggtgctctgtcagcagatcaaagttttggtttaactgtaatccggacgggccgtatcattggtttaaaaccaactggattgatcagaaggaaaaaaagcatctaatttatctgcattttacaatggaagacaatctttctctggagaagaatgtaaaaagaaggtattgttccatgtacagcggaatgttttataaaagatatattctggggttgtggtctgctgcggaagggatcatctatgatatgtttgaccattcaaaacatgtgatccagtctctgccggaaatggcaggaagcaaatatatcagtattgactacgggacccagaatgccacggtgttcctgctgtggcagaggagtctctcaggacaatggatctgctgcaaagaatattattattccggcagggagcatcactgccaaaagacagacagccagtatgcagatgatctggaggaatttgcggacgggctggacattgaccgggtgatcgtagatcccgccgctgcttcgtttatagcagaactgaagaggaggaagttccggataaaaaaagcaaacaatgatgtactggacggcatacggtttacaggcagcatgctgaatcttggccttctctttttcttaggggagtgtaaagagacgattaaggagtttgcttcctatatatgggatgaaaaggccagagagtcaggcgaagacaggccggtaaaacagcatgaccattgcatggatgcagtccggtactttatatatacaattgttaaaagagaacggaaatggggttgataaggtgttacaggttttggaaagagtagggcaggtgataagaaaaatgttaggaaaagaaatggtgaaggatgccatcggcgttgatgtttcggtgtcagaccgtatggggcaggctattgagctttggtcaatgatgtatgaaaatgaagccccatggctgaaaaaagatgtaataagctgcggccttccggctgcagtggcaggagagatggcaaggcttgtcacactggaactgcagacggagatttccggggatgaatttctgaatcaggagtatcaggaagtaatcaaagagattcgcagatactgcgagtatggatgtgcaaaagggggacttgtctttaaaccgtatgtgtatgagggtcacattgaagtcgacactgtgcaggcagacaggttctttcctacaggatataacagcagaggagaaataacgtcggctgtatttgcagagacacagaacagggggaaacaggtttttacaagacttgaataccatgagtggaagaaaagtgattatgttatttacaacaaagcctatgtgaaaaatgataaagatgtctcagagagtcttggaaaggagatcccgctttccaaggtgaaggaatgggcggaactggagccggagatcagaatagagaatgttgaaaagccgttgttctcttatttcaaagttcccagcgccaataatattgacgaccagtcgcccttgggtgtgtccatttattccagagctgtcagtgacatcaaggaggcagaccggcagtggtcgaggatcatctgggaatacgaaggtgcagaactcgctttggatgtggataatacaatgtttaagagggacagcaggacaggaaagtgggaactaccgaaaggaagggaaaggctgttccgcatgatggatatggacgataacaatgagaaatataagatatactctcctgcgatccgggatgtgagtatgtttaacggatttaataacattctgcggcgcattgagttcaactgcggtttagcatacggaacgctgagtaatccagagaatgtggataaaacggcagaggaaatcaaagccagcaagcagagatcatacagcacagtttcggatattcagaagactttgcagaaagcactggaacatctagtctatgccatggaagtgctggcacagcttagcgggctgtcaggcaggaaagactatgaggtatcctttaactgggatgattccattgtcattgataaggagaaggaactcttatctatgcagcaggatgcagcagagggcttcatccgcaaagaattgtatgtggccaaaaagtacggggtgtcggaagaagaagctcttaaaatgatgcctaaacagccagacagccaggaagaaaatacattgaccgaatcgaagtcattaaactacgagaaaaatttaggcggctctgcagacagcttaaaagtacaaggggcagaagatttgtaacagcaggggaagaccggatgagacggcagcctgaaaggaggtaataaggtatgacagaatatgcagactataactattataaagaacaattccacggcattgtgataccggaatctgcgtttttaagtgagatgttaaaggctggtatctatatcgattacattacgtttggcagagtgcatgatacagagattccggaagagatccggatggcagcatgtgcggttgcagatgtaatgtatcagggggatacaggcagacaagaagtgaaatcagagacagtgggaaaagtctctgtctcttatgtcacagaacagcaggacggacagatcaaggaaaggaccagagaaaagaaacagtatacagcggcttatccataccttgtccacaccgggctgttgaaccggggggtgcggcaatgatcacaaatacagatctgaccatctacaacaaggtttatgaccgggatacagggacaaaccggtattaccgaacagtcttaaaaggcataaactggcaggatacgacggcagtgcagccggacgggaaggggatggcaagcgcagatgtggcagaggtctacattccatttactgtggagacagaaaaacagtaccggaagccggaaaattttatggcagaggcggacaaaagcaggatatttacgttcagagcaggcgatctgctggtacggggtatcacagagactgaactgggcagtacaaaggatgaggaatatctaaaaaatatctgcggtgaggtccgcaccgctgcaatggtagaatccaatgacagcggcagtattgaaattcaacactggaaggtgacggcagaatgaaaaccaatatacatattcagtccgccgataaaatcctagcagatatgaagctaaaaccggacggtgcggcacagagattttttgtccacgaaacacagaagatcatggatccatatgtccccatgctcacaggcagtttgaaaaatacagccgtggaaggagctgaccggattacatatatcatgccgtacgcacgtaaacagtattatggaaacaaaggcagagggctgcggggaaaactctgggataagcgtgcctggagtgaccggggccgggaagttacagtgtccgtggcgaaatttataggaggaaagccggtatgacagcagtagaggcaattcgggagatcgtaaaacagtgcccgtacctggatgaattttataaggggatcggggtggattatcttggaggcaacacagcgtattattctatagaatccgttccgtccgagacagttttaaaaagagatattgttggaaatacaaagaggcagtatctctttaattttgccagccggcaggcctacggggaggaagtgagacaaaatcttgataatatcggattttatgaacacttttctgactggctggaacaattctctgacgcagggattttccctgagttggaggagggtaaggaagcaataaaaatcgaagcaatcacaagcggttatgcgtttgatacagagcttagcaaagcgagatatcagattcagtgccgctttctttattatcaggaaaggaaggtataacaaatggcattaaaaagtgtaagacagagaaggatgcaggcaaattatttagatattggaaaggaggatacaccaaagtttgtgcttatgggcgcaggctttactgacctcaacgaggagccgggagcacagaccagctctaagagatatatcaatgataaatctacatcaaaggcgatcacagggtatgaatggcaggcaccttataccgcggatcagatcaaaacagaagaagcgatcaagtatatctgtgagattggggagcttcagaagacgggagcagaagcagaaacaaactatatcatcgtggatctggaccagaaggttggggattccggagatacctaccatgcaagaaaaattcatgtagccgtggaggtatcctctttcggaaatgaagacggagagatgacctgtgagggaaacctgcttggcgtcggtgacgtcgtggaaggtacttttgatacaaaggggcttacttttacagagaagggcgaaacaccctgacacagccgtaacaggggtggcgttgaataaaacaacgctgtcccttgaggttgcggcgaaagaaacccttgtggcaacggtacagcctgcggatgcagcggacaaatcagtggcatggtccagcagtgatgagacaaaggcagcagtatctgacaccggagaagtgacaggtattgcagcaggaagcgcggacatcacagtcaaaacaacagacggaaataaaacagctttatgtacggtgacagtgacagaaccggcgggagaataaaaaacagataagtgaacatggaggagagaaacatggcaaaagtatttaagtggaatgacgcagagtttaagttcagtattacaaacgcagatatgatggagcggtttcatgctgcagtagaacaagcaggcaaatgttttcaggagattggagagagcggggagaatgagactgacccggagattatccgcagggaatgcggctatattgacgagatgtttgatgagatcttcggagagggtgcgtcgcagaagatgtttggcggtgaaccggatattgaagagcatctgaaagcctttggaaagatcgtaaagatgaaacagcagcaggaagaaggctttacaaattttgcagaacaggagacagcaaagtttggaacagcggcaggtcttaatagggaacaaaggcgtgaaaaaggacagagataatgaatatcttgacagatggtcttccggaacatgtcttggtgggaggaaagaagtataagatcaattctgacttccgtgtatctgttctctttgaggaaatgattcaggataagaacattacggaggaacagcagctctttatagaggaactgatgaatattccggaatttgagggggatcatgaaaaagccagtctgcttgccaagtacaacagcggattggctttatactatcccgtgatccctgaagaccttgaaggggcaatttcccagatgctttggttttaccagtgcggaaagacagaggaacagaagcagtctgggaaggggaaaaaacagtcacagatctacagttttacttatgatgcagattacatctatgctgcttttttagaacagtacggcaaagatctgaactctgcacacctgcattggtggaaattcacagccatgttttctgggttaaaagaagactgcctgatctcaaagatcatgggatacagagcggcagatacagctggcatggataaagaacaaaagaagttttataaaaagatgaaggaaatctacaagctgccaggaaatatatctgaggaagacagggctctggaagcggaagtgacacaggctcttttgaacggaggagatctttcacatctgctgaattaggatgagagtaccaagcgaagaagaaacagttaagatgataaagagaatatctttagtaaagcatccaggaaagatctgggtgcttttcttattctcccataaaattgtccgcagtcataaaaacaacgtgagtggggacggtatcagtatcatgtaataagacataaggggatagagattcttgccctcgaatgaagaatcacaagactatagaagcgaatagtcactgtcgcctgccgggctgaggtttgcgaagtgtcaaatagcaagatcttttgatacgaaacaaacattacaaggcaggtgaatattttggcagacaataaaattgagatagaagttgcactgaatacagagaaaatagaaaaagactggagccggctggcaaagacatcagggaatgaagcagaaaaagcgtcggctcaggggcagaaatcctttaaagatacagaaaagcagtcccagaacagttcaaagaaggtaggagaacactggaaagcagcatcgggtatagcaaaaaatgctttgaagtcaggaatgggcggagctaaaaaagttatccgcaagactacacaaatcctggtagatgcaggtacagcggcggtaaagacaggaataacgtttgagaatgcttttgcaggagtcaaaaagacagtcaatgcttctgacaaagaaatggagcagctgcgcaaaggcattttggatatgtctaaagaactgccggagagcgcaagtgagattgcagcggtggcggaagaggccggaaagcttgggatcaagagtaatggaattcttggatttacgaagacgatgatacagcttggggattccacaagcttgagcacagaagaagccgcgacatcgttgtcaaagctggcagacattacacagatgccccaaactgaattcagccgcctgggatcgacagttgtagccctcagcggccagctcgatacgtcggagaaaaaaattacggatatggctgtcgagatcgctggtgcaggacatgaggcgggcatgtcagaaactgagattctgtcattcgcaggtatcttaagttcagcaggtcaggaagcagaagcaggaagcacagcgttctctcagctgacttcaaagatgaaccaggccgcggccagtggcggaaatgatctgaacgaatttgcaagaatttcaggaacctcctcagaacagtttaaaaaagcttttcaggaggatgcggcaggggccgtgggctcttttcttcaaggcctggaccagataaaccagaacggcggcaatacagttaaaacgctggagaatttgggactgtctgatgtacaggtgcaggatacgcttttaaaagcagccgaggcatcgggtacgtttacggaaactttggcagctggaaatcaggcgtggagcgacaatacagcgttgcaggataaagctgggcagcagtatgagactacagaaaacaagatatctacgctgagcaataaattcagccagctggggatttctatttttgataatgtgaataatcctatccgcgaagctatagatgttgtatccggctatgtggaccagctgcaggaagtctttgacaaaaagggacttgaggggctggccggtgagctgggttctatttttgcaaatctggcagaagacgtggcaaagcaggcaccaacgcttatcaagacggcatcgcaagttgtgaaagcattcatctcggggctcgtaaagaacggacctaagatccagagtgctgcaaagtcattggtaaaatccctggcagggggaatcgctgatgttcttcccaaggaaatggggactgcatttagaaaccttagcaatatactgatccaggtcgcagataagggaattactgttttagcgaagtctttgggatttatagcagaaaattttaagattattcttcctttaattgcatcaactgtagcagcagttaaaacacttttgatagttaaaagcgtagtatctgcaattgatgcagcaaaaacagcaacggagtcagctacagtgacaacaacgctgttaaagacggcattgtcagttgtaagtggagaaatgaaagcggcggaagcagcaactctactgtgcagtaaagctcttgcagctctcggagggccaattggaattgcagtaattgcaatcggagctttggctgcggggattgttgcttataatttgactgtagacagaactagtgaacttgagaaacgcgttgtttctagacaaaaatctgtaaataagagttaccaggatctaacaaaaaaactacaggaaaataaaaaagcaagagatgaggcaattcattcagctgggcaagagggaaaaaaggcagataagttatttcaaaagttacagcagcttacaaagattgaaaataaatcgacaggccagaaaaaacaaatcaaaacaattgtagatcaacttaatgaggtccttccggatttaaatttaaattacgatgcagaaaacgataagctcaataagtcaacaagttctatacgaaagaatattaaggcacaaaaagagctgttaaaggcgaaagcatatgcaaaacaacaagaaaaaacaatagatgatattgtcgagactgaagagaagcaagaaaaatatataaaagaacaggaagcagcttatgaagatctgcaaaaggccaagaaaaaaatgggcgatgcagagcagaaaagtaaagacagtggttatggaaaagtagaagaagcagcttttgcaaaagcccagaaagaagcaattaaggcagagcaggcatataaggatattactgataaagttgataaaaccaagaaaaaactaaaagagctgaatggagaatacgatagtcttggaaagaaagaaatagcatctgagaattttgctgaatatacagctaatataaataaacttgcaaaagaagctggaataaaggctaaagaaattccagagtctattggaaaaggaatccaggatggaatatatgcgggccctcaaaccggaaaagaccttctgaaactaatagatttagatactttaagaaaagatgtgattgcaaaatcaaaggatacaggaatcgatatcccaaagaagttgtcagaagggatagcatcaggaagcatttcttacaaagatgctataaagcagatgagcaacttaagcgattttcaagacgctattaataaagcagggttagctggagttgaaataccaaagaaactcacagaaggtattgctaatgggaaatacgcagtaccgcaatctatcgaacaaatacaggcattaatcaaatttgatcaacttgcaaatactgcttttcaaaatggtgtaaagatcccaaaagaaatttccaaagggatagcctctggtgagatggcaccgagtgaagcagtaaaacagctgcaagactacataaacttcgattcaatgattacaaattttggactagctggagataaatctgtaaaagatcttgtagcgaaattaaataatggagacatttctttacagcaggcgatgtcggggataaaaaatattgtgtctgaagatgcaaagcaggttcctttatcctttggtaacggaatgatgcagaatatgtttgctgttgatgaatcttccaatcagatgactgatacggtaaaacaaaatacagagaatatagatacaacgtcgggtggtacaaatgttgtacaaacgtttggaaatggtattactttaggattaccattattgcaaacagcaacagatttatttaaaacacaattacagcagtctgtgaatactgatctttctccggaagccggggtcacggggatgtcatatgctaatggttttatgccaatactttcatatgttgatacttcggcgggtagtttaaagacgacggcaattgaagctacgtccggtggaacgatggctccaaatggaattaatttaggaaagtcatttaacatggctttgacagaacaggcagggggagccaaaacagccggcggtgcatacaaaaagaaggccaaagagggggcttccggcggaacgatgaagaaggaggctaacttactcggaggtagctttatttctacattgcttgcaactgccaataaagcccaaattgctggagaaacagtcaaaaaagcaggtacaaaggctttacaaaacacatctggatataagtctgcgggagctaaagcaggagaagcatatgcttcaggcatcacatctaaaagtagtcaagttgctgcaaaaggaaaagaactatcagataaaactgcaagtggtgtaacagcaaataaagggaaaataaaaactgccgcacaaactgctgtcaatggtgcaaaaagtgtgagtgtcagtggatttacaagcgtaggaaagaatattgcaaaagggatagcatctggaatcaataataattcagcagttgtatctgtagcagcagcaaaggttattagagaagcaaaaaatgctgcaaatcaggaagcggactctcactcaccatctcgtgtatttagagatcaggtaggtaagtatcttccacttggcatggctgtaggaattactaaaaatactagtaaagtagtacaagccactaaggagatgacacaggcaagtataaatgctgctagaaatgatttacaaattcattctccatccataaaatttgataagatcgtaggacgtaatatccctaagggaatagccaaaggaatcaaaaaggagcagaagtctgtcgtttctgcgaccaaaagtatgattgcgtctttagaaaaagcagcaaagaatccctttggaaaatttgaacagacagggacaacgtttgtagataaatttgaggaaactcttaacaagaaaaaagattcttccataaaagcaataaaaaaacttgtggatgaccaggtaaaagcgctaaagaaacaaaataagagcaaaagcaaagattatacaaaagctgggaaatcaattgttagtgcctatactaaagctattacgtcagaaacaaagaagcttgttacaaaggctgaaaaagaaattgaggagatttcaaaaaaattccaagaggattatgatcatatcaaaagtctgcaggacggtttagaagataagcagaagtcttatggaaacatttatgatctggatcagaatattgcagatatcaagcagtaccagaataacctaaaagcattggaaaataaaataccagacagcatgatggagcatattctcgggatgaatatagaagatgctacagaatatatggaatggtttagatccctgtcggcagcagagcagaaagcttacactgataaatggaaacaacaggagtccatgtcagaaaatttttcaaaaagcttttttgcggatgatatttcgaggctaaataaagaatattctaaaaagataaatgaggccactgccgggcttgaaaaacaaatgaagaatatcggtaaaaatattatgagggggatggcgaagggcatgaagtctgagaccaaaaacctgaataaaacgataagagatatttgtaataaggtagttaaggcggcaaaaaagaaacttggagtcaattcaccgtcccgtgttttcgctgagatcggaaaatataatatccaaggagctgaacagggacaggaaaaagaagcaccaaagttgtacaaacaaatggaacatgtggctgataccatggcggagaagttcgcgaaggcacagatgaacattcccagactgcaagacaaactgcaggcagcagtcgcccgtcagtctgctaaattcatggcaaatgtccagccgcagattatttatgccggaggtggcagcgatacaacgaagatagaaaagacggtttatacaggaccggagaagattgaacttgtaactacattaaatggcagggagattgcgaggggatctgccccgtttttaaatcaggaatttgaggcaattgcaaagcatcaggaaaggggtggttgatatgcggaacatgcttggtgctagaattggagaaaaacatacatacagggattggaacttgggatgggtcggtgtaaccattgattttcctgaggccaagacatatctggttgatctgccaggaggtaacggcagtattgatttgacaactactttaacaggcggagatgtaaaatacaaagacaggaatatttctttggagtttaatttaagggatgaagattttatatactgggcagatgtcaccacagcgattgctgattatcttcatgggcagaggttaaggatcatcctggatatagatacgaccttttattactatggaaggcttatgctggatacagaaaaaacggataaggaagaaagtaaggtagtgttatctggctctgttgacccatacaaatatgaattgtattcttccttggagaaatggagatgggatgatctttcatttgtaaacggtatcatccgggaatacaaggatttgaaggtaaatggcagcttggaggtcattatcccgggacgccggatgcctgtggttccaattattgagtgctctacagccatgacagtgaaatacaatggtaacaccttttctcttccgccaggaaaatcgagagcatttgatataaatacacatgaagggaacaatcatttaatcatttctggcaatggaagtatctcaatcgattataggggaggtgttctgtaatgtacagagtagaagtggatggtcatacgattcatgatccgagggatgagcattttatcctgccatatgctaagttggacttagaattaaataaaacaggatcttttgagttcgacatcacaaccgagaatccgggatatgagtatgtcagtccaatgaaatctgtcatttcggtttatgatgatggaaaattaatcttccggggcaggagtactacagaggaaaaggacttttataatacaggaacattgaaatgtgaaggagaactttcttattttgttgatacgattctccgtcccaggagcagtgcatttatccgtcaaacaaaccggtacattttcagcgaggttgtaaaagagcataacaatcaggtgggagcagataagcagttccagccagggatcatagacgttgatcaggaagaaatatcaagtatatcatttaattatgaaaaaccgttggattttctatgaaaaactatattgattttctgattatcttttcataagttggtgaatgtcggtttagcctgtatttataggcttttccggcgttttttgctttggaagatacttcgcaaatttcggcatttctaggtatgattttttaatcaaaagtagtaaaagtgtagtaaaactggcttttactactttaagcaatcagtctttccatttcttcttttgccgaatcaaatgaagcgtgtgcgtaatagttcagcgtcatgctgatattggaatgacccatgatatattgcaatgattttggattcattccggcgttggctaaacgggtacagaatgtatgtcttaatgtatgcggcgtgatgtttggtaatgcttctttgtgattcttgttgtatttcttcacaagtcctttcaacatactttcataacttgccgcaacctttggtaaaccattctgattgaggaacaggaaattactataaccatcaacaatgattggttctgcttttcctctgtttttcagcactcgtttaaatgcttgatagactgtttcgctcattggaatctgacggacaccgttctttgtctttggtgtttcaatgtagtacccgatttctgaatcctttaaaagctgatggtctacattgattatcctgttttccaaatccagcttgatagtcaatccacaaaattcagaaatacgaagtccagttcctaacagtatagtgatttcatcaacgtatttttgatataccttatcacttctggcaaaggaaagtaatttttcttcctgctcctgtgtcaatgctaccttttgttctgtatcatcttccagaacaatattcagagcgaagttaaacggattctttctgatacagtcgtcctcaatcgctgtgtaaaacgctgctttcaatgaacgcttgtaattgttaatcgtcttataagcaaaccctttttcgctcattctgataacccattcctttgcgtccgacagcttcacgctgtcaatgctcctagctccaagagggtcattcttcaaaatgttcataaggtgctgacgtcctttttctgtgttacgtttgacattcttcctgtggcttatctgctttgcataaagctggcagacagtcattttcttgccgattgtgtcgataccatcatcaaggtctttttgtatctcttttatcttttcccttaacgaaatatcatcacgttttcctgctggtgtcttatccgtaacagtcaacttccaagcgtaaacgaattgaggttttccgtttgcgtctatatatttatatgcgtatcttccatcttttctctggctctctccagtccttaaaatgcgacctttattatctcgtcttttttttgacatgatgtaaagctcctttccatactggaatgagccttgatacgatatatgtatattataccatatttaaggctcattttcatcatattacgtccagagaatctatgattttctcaaattgttttcgctttatctgaacacggtttccattcataatcacccaacttgctgtttggttttcctccgcaattttacgcaatttcttttctccgatacggaaatattttgacgcttcttcaatcgtaagcgtgtatttttcccagataggcacatcagtattattcattgtgtaacacctcctttactgtgtgtttccgaagcagtcagatggctttggaagctccactggactttcaccattctcattcctatgagcagaaccgcaccatgcgagtgtatcattattcagatatacaggtcatggcagaacgaccattccacaagtcgctctcggatcattgcatgaatcgctcgcttttttaggtcatggcgtacaatttccgctggctcgctgcatatcaaacgtatctgactgctttattcagttgtcaaagaactaccgactgtatttgccagtctgtgaaaatccactacctagataatggactttcatagattgacaagcggagcagaggaaaggggaaatgctccgcccgtctgaatgattagattacgacaatgtcaaagtttgcaatcatatccatgactgccgcctgtattctgccttttaattcagaatccactaccatgtagacgttaccgtattcgtcatacaatttgcgtaagctcaactttgatatgtacccgtcatagaaatccaagatttcctgtattgcagcttcatcaccattcgtagccgccacaatcacagcaaacggtatatgtttatggtctttgtccatgcttattcctcctccatcatttttcgtaattcttccagagtgcttgtcctgtgacggtaaacagtagtgcgtaccacgttcataagctctccgatttctgcgtcagacatatccataaagtatgacaacaaaatgatattgcgttttctctctggtaaacatttgagtgctttgcttaactggtcgtcagatacttgtacttccatgccaagaacattgaacgctgtataatcgctggaatatttgtcataaacgcctgctttgttcaattccaaatctgaaatttcagaaaacggaacttcatgtttcaagcgtcttgaaatatcacgattatacttcatcgctgctcttttaatgactttctttgtaaggcaatcaaactgtgcttgaatagcctgttggaaagaagatgacttcatgctgattcacctcctttctgcgtgagagtagatgaggttgttttccctctatccccctttccgcacagtagctacccacgcagcagctatttgttgcgttttcagaaaagaacttgaaaaatatttttacgcacgaaaaaagcacaagagaaaaggctgtatagcgttcttgtgctttatcatttgtacctgttatatgatgtaaaaaaccacattcaagggtgtattgtcctgctatggtgatttcagtttttttgacaataaagggtatgtcataaaatgtcgattatgagattctttcaatgcggctacctcctagagccgcaaaacaaaaaaccttatgtgatttatccaccgaattgaggaaaaagaaaaacggcggctttatcttgaccgccatcaaatcagaaatatttttggatatgcaaaaaggttactgccgataacggttttttttatttaccgtataacagtaattttgttctttttacacacattaggaactgatgaaccatataacacgtttttctatacctgttagaaacccaacaggaacagtaaaatgtattgaggtgattacatatgcgtaaaaaagaagataagtacgatttcagagcttttggtcttgccatcaaagaagctcgtatgaaacagggtctaacccgtgaacaagtgggagcaatgattgagattgacccacgctatctgacaaatattgaaaataaggggcagcatccaagtttacaagtgctttatgaccttgttcatttattgaatgtatcagcagacgctttttttcttcctgcttctgatctggcgaaaagcaccagaagaatacagttagaaaagcagcttgataacctgtctgataaagatttagttatcatggaaagtgtcgctgacggaattattaaatctagggaagtggaggaagattaaacttcctctttttcactccatatacgagttgattcttttaatttttgaaaactctcgtcactgattacgtgttctaatttgtaagtgtctgattctgcaagttttgggtcaactcccatttttataagatattttgtaaagaagcaatgtcgctcataaattttttctgctatgagtttgcctgtatctgttaagtgtaaaaaattatttctgtcagttattaacaacccttttgcctttaattccttaacagctcgacttatactaggtttagaaaaccccatataatcagccacatcaatagagcgaaccattccacctttatgttgtagaattagtattacttctaaataatcttctaatgatttacctaatgatttttttaatgtcacattgttattccctcctttaacagcctagaaatatcaataatctgtatcaagcagaaattttttgttctgcataccacatagctgcatattttccgtctttttttagtaattcatcatgagttccagattcagcgattttaccatttgccacaactaaaatctggtctgcattttttacaatagaaagtgtatgtgcaatcatcaaaacagttttcttttgctttaacaaattggctattgcctgttttacagctaattcattttcaatgtcaagagaagcagtagcttcatctaacaatagaataggactatttttcaaaatagctcgtgctatagaaatacgttgacgttcaccaccagaaagcagattaccattttctccagttggagtatcataacccttttccatttttcgtataaatccatcacaatttgcttctttacaagctgtttcaatttcttcatcagtagcagtaggacgagcatgacgtatattttcacgaattgtatcatcaaataaaaatacatcttggtctaccatagagatttgttctaatacacgttctgccgcaacatgattaataggttttccaccaatacaaatcgttccactatctgactcataatattttgaaatcaagttcaaaatagttgattttcccgaaccagaatcaccaactatcgctgttaatttttggtctggagctatgaatgacgcttgtttcaaaacaggttccccttgaacataagaaaattcaacattttcaaatgtaatttcgtgtgaggttgtaacaaatggttccatacttcctgtttcttctttttcttccataacatttaaaatctttgtctttgaaatcatcaaatttttatagcttgtcaagtctataaaaatagagtttgctaattttgcacagaatatagacaacatacaaatcaataagtacgaaactgtatcaatattaccattaatccacggagtataagtcgtccaaataataagcgggcaagttagccaaattaaaatacctaaaactgctccaataggcaacactttagcttcgtatataaaactaatatcacagaaatctttcattgctttagttacagtcttattttttgtgccacctataccgtaagcacgaaaagtctgtatacccgaaacatattcaactatgctgcttacattttcagcacaaatatcattcttttcttttccgtatttacgaaccatacgaaatgagagccataatgccggaatcaaaagtaagtcagcaacaaataaaatcagtcctgctggtacataaaaagtcataacaaacacaatcaacataagtgaaagagaaatactctttgctaaatctccgattttatgagttaatattttttcatagttgtttacgtcagtagttatagtgtttatataatcaccagtctgtccttgtgtgaaatgtgacaaaggaatacgcttgattttgtcacccataaataaacgaatattcttactgacttcagcaccaccgatttgtgcccttgtatatccaaagccataaatcaaaacacgaaataaaaagatacacgctaacgttccagtaagtattaaggaatgatggaaattaaagtcaccagaccaaagagattgcattacaaagtaaagtaacatgaatatacttccagaaagcaagccttcaagaactgttccaataacaccgatataaaagtttttatttttctttaatatttctttacttgtcatttttgttacctccttccaactgataggaaatatttctcgctgcttcataatcagtccatgctttacgataatattcattattctttctcacttcttcatgagtgccaacacaagtaatcgtatgattttcaacaacagcgacacggtcacacatttttaatgcacttaatctatgcgcaacaatgataacagtttttcctttgcataagttaaaaatagccttatcaatttccatctgattctctggatcagaagcggaagttgcttcgtccaaaattaaaataggggaattttttaaaatagctcgtgcgattgcaattctttgtttttctccaccagaaaaacgtgagccaaagctacctactttcgtatcatagccatctggtaaggacataataaagtcatcaatttgtgcttcttttgctgctgcacggacttcatctaaacttgcattacttcccatgcggatattttcaaaaacactatcacgggttaagaatgttttttgaaatacaatggcaacatttttaagtattgtttcgtagtttaattcttttacatttttgccgccaatcaatacttcgccctcatttacatcataaaagcgagatattagttcaatgactgtactctttcctgcaccggaacgtccaactagagcaatacgttcaccatctttgatgtctaaattacaatttttaagtacgtctgtttttccatcatatgaaaaacgtacattttgtaattttatatcatggttagctggaaagtctgtacctcccacataaacaggaatgcttaatatttcatctgttttggtaatcgcactcaatacatttgcaaaatttgttcccaattcttgtaaaggacggatttctgttaaatacaatgagcctacatatacaaatagcaataatgcacttgctgttaatgaacctttcaaaaagaacattccaccaaagggaaccatcagcagcattccacattcaatgataactacgaaagaagcatatggaggccccattctgtgtgacatttcattccacatagcattttcttcttgtattgcattggtatatttttgaaatgatttactccccatgttataagccttaatcaatttcattccgctaatatattcaatcatcacagagttaagggaagaaattgatttattagcacgttccatcaaattgtctgtattgcggaacataattcccatcataacaacagcagcaatgagaggaatcaatgaaattaatgctaatggaacgtttacagtcattagataaataaaaattaccaatggtccgacaagataacatactaagtctggtaaattatgtgctaaaaacaattccaatttttcaatatcttcattgagtacagtttttatatcacctgtgcggcgttcattaagtgcgcctaaaggaacttttgccatatggtctgcaaccatgcagcgtactttatataatgctccatacgctcctttatgagaagcaacaccagaacaaccgaataatgcaaaacgtaaagtaaccgctattgctatcattatagagattttcataacaatttcttttgtgcaagtccccgtaaaacctgcttccataagttgataaataccaatgtaaggtatcattgtgcaaagaccactaattaatgataatagcactgataagaataaccaaaatttctgtcctcctgcccaatgtaataatagagctacaggatttttcttctttttcatttcttattccacctttccttttattttgaaatagtaaataattcctttattttaggaatattatcctttaacataagtaaatcatctggcatttcaccctcatcaaaatgaaccacacgcgaacaagtatgacaaacaaattcataatcatgagttacaacgaaaatgacttttctcatagcagcaagctctttaatcaaatcagcaacttgtatcatgctatcataatcaagaccgctggtaggttcgtcaaaaataagtaattctttattacaaatcatactaactgcgactgcgacacgctgcttttgaccgccagataaaatgttagggtgacaatcccgaaattggagcaatcctaatcttttcatagtttcttcaacaatttgttgattagggtttttgattccaaaagagcattccgagtaaacactatccgcaaataattcataatttacatcttgcataaccatgtaagaaagttttaatcttgatttgcagttttgtaatgagccattccaaaaaaattctcccttacaatttttatgcaagccacacaaagcacgggaaaaggttgttttacctgcaccattatgaccgactattgcaatcacttctcccgatcttgcgtctaaattaatatgctcaagaatagttctttttttataatacagcgatatgtcattgagctttaaaataggctttgacgcaagattatcgtgtgataatggttgttcatcattcaaattaattgctcgaagccccatattctttctttgtgtaggcgttaattgataaaattcttctggattgtaaataccagcaatctctccatgttccaaataaatgattctgtcaacaatatccatcaaataataaagcctgtgttctgcaatgagaatcgtcttaccttgttctttgattagacgtatatgctcttgaagttctattatggaagtcatgtctaaattagaagatggttcatctaataaataaatttctggattcatagcatatacagaagcaaaagcaattttttgtttttcaccgccggaaagttcaaaaatatttctatctcttaaattttcaatatctaattcttttgtggtctgcttaacacgcttaacaagttcttttggagggagtgattcattctcgattccaaaagcaatctcgctgtctgtatctacattaaaaaattgtgtacgaggattttgaaatactgaaccaacttttgtagcaatctcgtacattggtaattcagaaatatcatggttatctattaagacttttccttgtaattcaccaatataaaagtgaggaattaaaccgttaatcaatcgagtgatagttgtttttccacaaccacttcttccacaaaacaagatacattccccgtccttgattgtgagattgatattgtgtaaactaccatgtttttgaccttgataagaaaatgatatgtttcgcaattcaatcatttatataatcaccccctttatatgtaactcaattaagagaaatatcaaaaagcataaaaatacaataccatctgaaattttgaattttatttgaaccaagcaagttcgaggtttaggattctcaattccacgagtaacagaagcgattgaaagttcatctgctgcttttgacgcagccatcatcaagggaacataaatacactctactgtcatactgggatttgtgataaacccttttaaagacggggatatatctctcattctcattgcgtctttaatataatgccaatcttcttgaattgttggaatataacgcaacataaccgctaatggtatcacgagttttttaggagcatgaacacggttcatagcagataaaaactcactgacttttgttgtagaaagaacaatgcccgataacattccacaaggatatactttgtgaaaaagtccaagaaaagcaacgaacatagttcttaatgctccactcatgttatctagtgtccaaattgtaaacatatagattaacaaataaaatatgatacctttaaaagcgtatttccatttcttacaacatactccgaaaattccaattatcattattaatactaattcatattggagtgatggagctaacattgcagagaaaacacagagcaaaagtaatacaacttttgttctagggtcaatcgaaagttttttatctttaaaccaatctatcatctagtaatacctgctttttcaaattgctttttcagcattctgcaaccaacccatgcactaaaggcagcgattaataaagttcctaaaactataacgactaataaccaagatggagctgctgcgttcattgcgtcaatataagattgttctgtaccattttttagcattgtgccagcccacccctccgggtcaataaaataaacaacataggtatatattccacctaatgacatgaccatataagataagacattcaattttttgctcttgtattgtcctattccagccacaatatcagcaacgattcccattgcaatatagcccaatgaaaacgcccaatgcatacctgttgcaaaccaaattattccgatgataatacctaaaatagtgatactccaacgtttatgaacttttgcaaccataagtagatatatcggtccacataataaagcactacctaatggcatataaaacgttaagacaggattaactgcaaagaacattcctcctatcattgtgaatacgaaaaagatagcagtaaaaatccctgtgtttactaagtcttttacagtcaatcctttttgcgttgaaattacttgattactcatatttttttacctccttgatttttaaaataattgacctataatttaaaatctgataacatggttagtgtctgcttaccatatttctaaaaatatacttttatgagacgaatcgcaatactttgaaaagatgttcgtcttttcattgcaaaagttcgtccaatcgtttcaaggagggaattattttgaacaatttaattgctgattgttatcagcctctttttgatgaacataaatttattaaagtagaaaataatgggaagtttaattctgctggtgaatgttgggaactttctcacgaaataggtgagggttactattggatttatgctcaaaaagatttatatgatattaaaatacatgatttctatttccacgaagattcttttatgacatttgaattaccagaatgtttaagtattacacaatatgaatcaatatcgggagaagaattgacaccatatcgtagactttctgccggttgtatcaaaacatttgtaggcggttacgaaccttataaaatattgatacataaaaaaattccaattcgttctattggaattgagattatgccagcatattatgaaaaatatttaaaggagcaatattctgatgattatacaagcccattttctgcgtttcgtcaaatagaccaaacaatggattttccagaaatggcaaagttgttacatgaaattaaaatgtatcgtggtgagggaatagcagcttgcttattttatgaaagcaagattgcagaagttgtttctttagtattagaaacacaacaaaaaagtaaaaaaaagaaaagaaaaaaattatctcaacaagatattgcggcattagagaatgttactgcatatttgaatgaccattatgcttttgaaattccattagagcgtttagctcaaattgcttgtatgggaacaactaaattaaaaacttctttcaagaaatatcacgattgtactattaccgaatatattcaacaacgtcgtatggggcaagctgaacacttgcttgctaatacagaccttactattggacaaatagctcaaatgattggttattcaacatcaagtcgtttcgctgaattattcagaaaaagcacaggtatacttccagccgaatttcgtaaaatcatacaaaataaataataaagagcgtgcaaatccgatttatgtggaaatgcacgctttttatactatcctacaatcttccagttactatctttttccagtgtcaaatcaaactgtgaaatctgtgttgcctttgttctctggtcgagatatttcactgataatgacactttgacctgctctccgtccttgatgaagataggatttaccagctccgaaaacatataatcacagtttacaggttcaagcacattgccagatacatagtaggcaagttctttttccgtagctgttggatagagcttgaagaaagtttctaagaactctgtcacttcttccgttgtggcagcgtccaccgttccgtcagattcctttgtctttggttcatagctggattttgtcggtgtgctgctaatcgtcggattctgtgtgataaccatgtttccactaccatctacatgaaccactaccatgtaagcggaggtataaccgattgatgtttcaccctccgttaccgtctgatctaccgagtagacaacggtaaagtcgtccgttccagcctgttctatatcccaaatcttcacatctgtgaccgtagagcttgtaggtatatcctgtcttaccgtatcaacattcaaatcctgtaaactttttgtcagatagttattgatggctgcggttcgtgcgtcaatggattcctgcgtgttgctccaagaatagtaggacttcacaaaggcttttacaaagttctctatcctgttggtatcgacaatcttttgttcaatgacttccttttcatgtaccgtgtgcatatcaatggcggtgaaattcttatacaccccaaaactgacgcttgcaatcagcaccagccacagggcaatcacggttttcttatgcgtgccgactttcatcacaggcacttttttttcctttttcggtttcgattccttatcctttttcttaaatagcatagcaccattcctttcttatttggttttcactcgtccagcaccaatcaagtgttgctgccagtacgagcttgttaaatctgtatatccgatagggtcgccagcgtgatacattctgctgtttccggcatagattcctacatgagtgacgtatgttccagcgttataggttgagtagaagaacaccaagtcaccagcttttgcctgtgacagcggtatgtgctgtgtagcgtcatactgtgcctgtgcagtacgaggtaagctgataccagcctttccatagcaccattgaaccaatcccgaacagtcaaaagaagtgttgggattgttgccgccatacacatacttccagccttgatacttcaacgcttcattgaagattgcctgtgcggtagcgtcactgaaactaggcacagctaaatactgactgactaattttacatagaacatattcccgtacttataacgccagccgccattttcttttatggcaatctcattattgtatgtaaccgttacaccgccggacttgtcctttgcgaagctgaccgccagctcaaaagtatactttttcccatgactggaaacgtaatcaatgaagccactaccatagttataggactgtaccactgtgttgatgtcacagcctttcgcttctgcggattttaaaagctccgagaagtatttacacccctgtttgatggaatcctccgtggacagggaattaagcggcagaccaagtgattcactggcttgcataacgtctgtcgtaccagtgccgccggattccacctgcataatcgcaagcagatagttcacatagtcagaaatcccgtattcctttgcgtatttttctaccgtaggctgatgtttcaagacttcttgtgacaggttcagtccagaaaaatcaagactggaagaaccgctttcttcatcatctgcggtcacgataaacaggaacagaagcagacagataatcactgtgaaaatcccaccgaacacagcgaaatgccttaacttcatttcttgccgcctttcttactggtagattttttcacagtggattgtgttatatttttcttttgaactgtctttgtctgtgattttcgctgcacagtctgtcgtaaaccatctgtagcagcttgcgaatgtttatctgctggatgggattctctgataacctgcgtttgcgattttgtcacaggctcttttgtcttgcttgattgcggctgctcctttgtcaccgtgacaggacgctccttgacgttccgctctggctttgaagaagtcgcctgtgaatccgattttacaggaacaggcgttgtggctggtcgctcatgcaccggggcagctctctttgtcgctgatccggcggcctgttgctccttatcctttgattcctgcttgtcctgtgccttatccacaatcggacgctgcggattctgtttctctgactgttgttgtttcaataccgattttttatccacgattccacgctttgaggtagactgtgattcctgcgtattgctctgtgaactatgtacggtctgtgaggaatccgtttgacttttcttatccggcaatgcaggcggcttttgtgatttggaatccggaagagctggcggcttgctgttacctccaccataagaagcagaagtattgtgatttgctctggtatgcgtgttacctgtctgtttggtactgtctgcttttttcgtagagctggaagaagaagcagccgcaccagctacaccaccagccgcaccagccgcaacggttcttccgattttacgctccaagcgtcttgccctgcggttgaggaacatatacgggtgtcgcatgattcgtctgctgacttgctgtgtatcggaagattgcagactgaacattgccatcaagtcacctaatttaaagtagattccggcaaaggtgactatctgtagaaacgccaccatgaaaaacggatagccggaggaaatggagtaaaacatagtcgagatactaaaggctgtggtgataatcagcgtgattccggctctcatcataatggtgttgaacagctttgtaagagccttttttgccataccttcataggtcggtatcatggagaggataaaactaatcggcagaaacatggcgtaaatgatgaatagcacctgtgagaaaatcatcatgccggtaagcagaaagacaaacgccgagataccgatattgaagataaacaaaaacaccaccatacctaaacgggtcatggtctttgtgacgctcaaatattcattgtctttatcttcgatttcttcaatcacaacgtcctctctgtcgtccgtatctggactttccgataacaggctttctacacggtcagaaccaagtgtttctatatccgattccccatattggagcagcagccacggttgtttcacctgtatggaaaacaggctgtcacgaatcaaatccacactgtcttttcctttgctgttggaatcgggcagcacgatttttgtaccaagtgacaaagcagagctgcttatatctgcggaaaaatcgttgattttgctgatatagtttggggcataggcaataaacgaagcggataacaggaacaccacaaggaaattgataaccgcatgaatggcttttgtggtttctctttttaacagtcctgtgtatgccacatagattcccattaccagaatgaggataagcaggaatcccacataaaatccctcgctggaaaatccgttttgcgtcacgccagccaacgtctgaatgttctttccgatagagcttgcagtgtctgagataaagtccagcttgtaggcttcctgtaccacatagcctgtcgcattggagatataaaggctcaccgtccagacaaaatttgtgatagcgtacaagccatactgaatacttttcccaattccatcaagccagttccacggtagccaatcccaacttgaatccacatagaaatcaagctgataattctctaggggatattgagagtaggcattagcgtcattcaccgtattatccaccagtccagccgcataagccactgtgcctgtgatggataaaatcaccagcacgccgagaatcaccgcaagagtaatgaacagccagcgaattatctttttcttacgcataggcttcacctcgtttcttctgtctgtactggcggtctggtatcaaaggcatggaacaggtcagagaatacagggtgaatctggataacgcccacacgcccgtacaaatcttgaaacaggcattgtccgttttccaagtcacgcaatcgcttctggtttccctcgtcctccttatccacaccgaaaaattcaagggtattcttaatttcttttatatccgtgcttctaaatgcaaactttaagccgatattgttcttcatcttttcatcgtccacatcaccagaattttgcgtgacaaagtaaacagcagcgttcatagaacgtccagcacgaatcagcttgttagacagtgcttttccctgtgccacttgtaagaacgtccacgcttcgtccaaatccaccatcttgaaaatgctcctgtcggaatggataaaatcaagggcaaaggtactaatgacaatcagcattgccacagaaagcagctccattgtggtgtattcttcaaactttgtgtccttatccggcagtacaaggtctgccacctgtatgatgttgatctgcctgtctaaactgatggactgctccacatcaccgtccgaaaacaaaaggtgtgcaaagtcatagtcggtcatgctctcgatatggtctgcgatattctctgccacaggagaaccgtctttccttaattcatcaatgacacggagcagtcctcgttttttgctctgcgtcacagaacggattgcacgccttaatacaggaaacttctcaccgtcacgactgctgattccagttaaaaaggtgagtatgtcgattgccagactttcagcgtcctttgttcgcttcataatcacatacgggtcaagaagtcctctgtttttgtcctcactggtaaggttgactatcttgatttcctgtgcaatatcgggtagcgtttcctgccagttgccacgctctgattttgggtctacaatgaccgctttccctccaaacagcaccgcataatagatgataaggttgttacagaatgattttccaccaccgagtgaaccgagaaaagcagccgcaagagcatttgtcacagaaccctttacgccctgtgccgcaaggctaggcttcaagtacacattttttcctgtgtcaaggttatagccgatatagataccgtccgtttctccaagctgctgcgttgcaccgaacccaagtccggcgagaaagtcagaagtcacatactggatatagtcattgatgtaacgcttgctggacgggataaactcaccatgaagcccaagcatatctccgaacggacgcactaacttgacgttcaaatcgtcatagaagtctttgacttcatcacagcgtcttttcaactcgtccagagaatccgcagctacacggataacgtaagagagtttatacatggattcctttgactggtcgaggttggtttctagctcattgaccgaatccaaagcgtccatgacgttacttcctgtttcgttgttggattcccacgcatggttatccaagtctttcaattcctttttcttgttacggactgtggttaaggctttcttgttcgtcacgatttccacattcatagaagtggaaacagggaacgtgaactgctgctgttgatagtagaagatttctgaagatggaaagtccagctcacctacgatattgttaatcgtgaagtaggcaacaaaagttgtctgatcttcacgctcaatctttaggtatcgctggttttcctctatcatgcagcgtgtcagacggataaggtcatatcgctttaccagtgtttcacgttttaacttcttgactggcagctcataggaataatcactgtaggcaatgcccgtattcccgtagatatactccaagagatagccgaagtcgttcttatccagcctgcggaactgaaagcggcgtgagattttgctttccaagagcttttccatctttaggaaacggttgatttcatcattactcatggaaacaaagtcacccatgagtttgtgattgacttcatagataaaatccgtaaaggtcatagctgctgattttcgcatacccttgaagctgatttcttcctcattcaccagcagcttgaagccaagaaaaaagcggtagtcaatctgattttcaccaatcatttcaaccaacgcttctgtctgttcgtctacctttttacaggcaatctcttttaacctgcccgtgattccttttttggaacgctcctgtaccgcacgcaagctgtcctctgtggcaatctgtagggcatggattttcccgtcacggttctgggcgattagctgacgaaagttgtcatgcaccatatatttttcttctggtgacaggaacgaataattgtaaggtgtcagctcatagtaggcaaagcactcaccgtcatggttgaacaccagattgttttctatgtacttaatcgggaacatacatcacactcctaactgctgtcacgctagtattaaacttctgatttttcagtttgatagcttttcctgcataggtcacttttggacgtaaggcaaaggtgacagccgatttcaagaatccgaaaggcttctttccgtcaaaggtcttttgcgatacaaaccaagtgaacgccacagggattccaaagtatttgaggaacgcaccgtcaatcatgttaaagggcggcagctccccaaagagaatcaccacgaacagtgacaggacaaaccaagccatctgactgaacgtgagagggaaagggagttgaaagtcgttgattgcataaatgactttttccacgctccatatgcttgtatagcttttgattttcttcaattttcacagctcctttctttgaagatttttctttacatggaaacagcagcctgttttcacaagctgctgcaaaaaaataaccagtgtcatttcactggcagatagtaagatattcagttgtcattaccagccaatttcataaacaccgtgattcgtttctatgaatgtgccggaggtatagaggttattcccatagccttcaaaatctatgtaatccctcaattcttctggtacagcgtccattgttccgctttcgtacagaaaatactccgccacatctgccatatcctcacagtctggataatgaaagatacggtcttgattgtcgtacagttcttcgatacttccaaaatgactgaccaactcgctcaattcatcctgtatatcttctggtaaatcctctaccatttcacacatacggttgatttcctcaatcgaggtgtactcgtcaatctcaaagggcagctcataatcatggatagcgtattcttcgtacctgtcattcaagccgatacgttctgccatctcgtcataatcaatgggcggcgtgaaccagtcacccacaagctcaccctcattgtatttcccaagattggcgatatagattcgcatttcttcgataccacatcacccctttactggtagcggaacacgccgcttgtggtgaacaagtatctgtcgtccagttccagctcactaccgtaggaatgataatctatgtgcttttgcagttcgtgaggaatctcaccgaatacgttttcttcacagataaggtattctgccagagccgcaccgtcacctacatcatagtagcgtatctcgtccttatggtcgataaattcctcgaaactggaaaaccatttctgctgaatggctttcatttcattgccgataggcgtaccctctaattcaagcaccatgcggcaattggcgttgatttcccaaaggggcatatcactgtgtaggtcaaagggcagctcatagtctgcaatctcaatctgttcttcattctccacgccgattttttctcggacttcctcaaagtccacagggcagttgaaccaagcaccggaatattcttcgtcaccctcacgatacggttttgtattgtttaacaggtagattcgcatttcctgcatggtctgtcacttcctttcctcatatccagtattcccattataacagcataatttacaccaaatacataatgagaaaacttttgtaactgttcttttggataatccagtggcgagtgctgcttgatgatttcccacactatacgtttgcggtagggtaaatcagaaatattttcacagccgacacgctctttcatatcctcaaatatatctgttttcatgttgtcctccaatctttgattttttgcgtaccattccgtcaccccctcaatccccctatgcccgaactcccataggaggggaaaggtaagtttgcgtgaccgcaaacaataattttaagcaccgataatcttattgaataactgcaacagtacgtcttttacgccagaagcattgaataccaagccgacagcgattaaggcaatcaccaagaatccaatcagtttagaaaactcacgtttgaatccgagatatacgccgataacagcaatcgccatgagtaccaagctctgtgcgttagataaaaaccagttgtataagttctgtccgaaattcattatttctttctcctttccatcatttcaatttctctttctgcggctgctcctgtctgtaccagacacatcaacaccacacctgcacctgctccaagtgagaacaggaataaatcaaataagatatgcttcatgttgtcattcctccgtttctgtaatcatttcctctatggaagttgtctgctgttcaatcagctttttgtgacgctccgtgagcttcgcatggtctaaaatgtctttgagataagtcgtgccattggcactgtcaatcttctgtaagactttccaagtgggagctacctgtctgcttatccagttcagcgtccttgtgagcgtataaggctctggtttggtcgtcagtttcaaacgcccacgatcagagccgataaagtacgcccatttctcattggtctgccattcgctgcgtcttttctccacctccttgtcagcgaaccgcatataacggttgataatgtcaaaagcggtacgctctgcgtcatggtaggtcagcaggtcacgcaccgcataataggctctctcatttttcagccggatttcaaaacggttcttgattttcgtatcttcaatcggaatatcgtatttcacatactgctcatagtccttttcgtagatacagaaataaacctctgatttgagcgaaccgatataaagcgtatttcccattccatatctgtcctgttcattgcttctcaccagctcaccgctgcggtagctcttgaagctgcggaatacggaaatacattcttcatggttgcatttctctgtcagctctggaatatccaagattcctgccatatcgttgatggcaaggtcaagacgtttcatcacacctccctccaccagagcgtccatgagaaagtcataccagctcctatgctgtgccagcaggtagctttccatctgccgacagcctttgcctttcagctccagcaatgtgcctttttccttatcaggtgatgtcagcacgaacacatcaccaagcacataatgttccacataggagtagaatccgtagtcctcatgtatcatcacgtccagctttaattgcagaatatcttcaacaatgtgccgaacgtcctgtgtggggaatcggattctgacgtaatccaagaccatttccagcggattctctggattcagtttttccagagcgtccgtgaatttccccttgatttcttccgtcaaggctacttttccagattcaatcctgctgacatactcacgactgacaccagccatgaccgcaagacgattctgggaaacgccgtactgcgtccgtttttccttaaaatcatttatccagtcggtatcattcagtttcaatccctccaatcaaaaaaggaatgtgacagttaccgattttgtcacactcccttgaatgtttgaaaagtcctctgttttcaaggacttttcgatatgaaattgactgtttccagataatttgtgcccccctgttagataacgggggcagatggttggggcggctcacgccaccccaacacaggctagtccgtacctgcggctaacgcttcgcacgccgcctgtccgtcctgcctgttttgtgataatcttcctatctcttttaaaaagtcgtgtcctttgggtacaaggggagtgtaaaactcggatatgacactgtttcccgtatcaacatagccacgccctttaatctgcttcagaaaaaagtccttgtctacttcaccgaacatcatactgtacccaagttccgacatacgccccaatgccacacggaaattgaactggtcacggattccgtcaccgagatactttgcgtctgggcgctgacaggcgagaatcagaaaatatcctgcctgtcgtccgagcatgactatctgtttcaatttgttcaacacagcagcattttcttttgtggtgagcatttccatgaacgccacatattcatcaaaaatgagaaaatgcggagcaagaccgagatgggcatagttttcacctgtcctgtagttttccatgagcttcatactttccgagcgttccatcatgccatcatagaagcgatcaatgcaggcggttatatcttctttcttgtaccatacttccggcatgacaacggataaatccgcaaggtcagcgttctttgggtctaagatatacatgaccgcattgctgcggagcagagcttcaatgatagtaaggataaagtaggttttaccaccaccagtgccgccagcaatcagcatatgtgggagcttgtcatactcccaccatacatttttcatcagacgcaggctgccatgttcagcctgtacctcgttgatagtgattctgttcgcaatcgtatcatagagcagcacatattccacatagctgtctttcagttctttggaaaccagctcacagtacaagcctgtttccagtttcttttccaagtgtaaaagctgctcttgatatttccccagtgagatttcagtacggatatataaaagtccatgctccatgcggtaatacactttaggaaaataggtgattttctcttttctggtagtagctggcaagtctttgaaaaagccgctgtcctgtgtggattctgattcataccagccattttccaacagcatacgagccagcttttgacggtgaaagagctgcttcactctgtcatactggaatctgcgatagaaaagggctgccagcatacaaaccagagctgccacaacaatagtcactatcctatatggtgtgattgtcaaatggacgctgtcatcttgaaaaagtgaaattgctttccagtccgtagtgaggattgactttaggttcagcagcataaccaccgcaaggaacagcaggagcagcgaaccagccgagaaacgaaaaaccagtgatttgtcactggctctgattcgattcccacgtttattgaatcgtgtcataggctaaatcctctctttattttttatgctgtggctgctgcggattgttggaaacatggttatttccggctggctgaccgttcttattcttcaagacaatatcatctgccttaatgtaccagtcaacgtctgtaccttgaaatgtagcggttgccaccgtatcagccacaggattgatgatttccacctctgcgttgtagtcaaattcctttaacggagcagaagccggaatactcacctgtatcatgcgtccttgctccttacacttcaaatcgtaggtacgttctttgatttcttctgaaaccgtaccgtcctcattctggatatgtacctctcgtcttaatgcggagaatttcaatactccgaaagtcttttccttgtcaatgatgattccatttgctaatctcatatactcaatacctccttatactttcaccatatcgtcagccgataagatataatttgtgaatcctcttgtaccgattttgtaaccctctgcggtgattttgggattgataagtttcactttttcctctgattcaaagttcttctcaccagcagaagcaggcagcaccacgataatatcatctgccctctgtacgtccgaataaaggttgaagctgcgggaaacgaccgtcatacgtccgttgatcctgcgctgctccaccttattctcacctgcaaactctaaattcccgaatgtcttttccatgtttgggataacatatcttaattccataaattgtttacctcttttctttctatattttttaatagttgattgtgtcattctgccatcagaataatatctgtctgcctgtggatagtaaagggcgttgctttgtgctgccgcacccttgacaatccccattcagaaagataaatcgtaatcaagcagaagttagacatagtgtcagccacagactgacgtttccatgataggcggtgaacgggttgttgctttcataagctgttatctcccgtatcagttagatttctttactttgcggaatctcttatatccggcaaagataagactagcagcagaaattcccatcatgacgaacaatgcgacaaatggcgtgttgtcacctgtttttggtgaatcgcttgtctttgttggtgtgctaggttcttctggtgtcgtaggggattctggtttttctttgaccgtcacagtctgcccctcgtccttgatgtccttatgttcagctactttgataggctcgtctggattggttacgtcatataattcttcaaaggtcacaagctctttgccgccaagctccgaagcgttgaacgtaaattcaatctgaacctccattttagaatcctcggcagtaaaggtaaggtcattttctacacgcttgccattcactagaagttctgtattttcagacttcaccatttcccaacctttaagagtgtatttcacgcctttttccaaaccgtctaaagtgaccgtatcaacgatagttactttgtcgtctgcttcaatcgtcttttcacctgttgccttatcggtagcggttgtgtgcatagtgataatacgctccgtaatcgtcaccgtttgcccctcgtcctcaatgtctttatgttctgctacctttgtaggctcgtctggattggataaatcgtataattcctcgaatgttacgaggtcttttcctgcaagcccactggcattaaatgtaaaggcaatctcgacttccatactggaatcttttgcagtaaaggtatagtcactttctacaggttcaccgtcaatcaaaagctgtgcgttttcagacttcaccatctgccagcctttgagctgataggttgtacctttttccaagccatctaaagtgaccgtatcaatgacagttacctctttaccagcaacaatcatcttttcacctgtggctttgttggcagcgttggtatgaatttcaatcactcgttcctcgatagtcacggtctgcccctcgtcctcaatgtccttgtgttctgccactttgataggctcgtctggattggataagtcgtacaattcctcgaacgtcacaaggtctttgccgccaagagcagaagcattgaacgtataggaaacctcaacttccatttctgattttttcgcagtgaatgtgtaatcactttccacaggttgaccgtcaatcaaaagctgtgcgttttcagacttcaccatctgccagcctttcaactgatattttgtgccttttgtcaaaccggccaaagtcacggtatcaacgatagtcacgctctttccggcaatgattgatttttcacctgtcaccttatctgtggcagtcgtatggatagtgatttctggctcatattcatctgtgagcgtacctaaatccacaacaaccttatttctcgatatcactacatcaaacgccggaatcagcatcattcccttgttggaatcgcagcgtaattcttcgattgtgtaagtatcgtaaagcaatgcacctttgctgtcgtctggtgtggaagtaccgaaccagataccgtcctcactggtctttccagcgttggtattctgtttatgagatacccaatcagaggaagtggagaactgaccgtttgcgtccgtcacaatgatatggctctcaccagtcgtcttgcttgtgatcctaaaaggaacattcgcaagtcgcttgtgagtaccagcaccgatttttacaccctccaaatcaccacgcttaatctggttgtagatggaatttgcttcatctgttaaatccacgatttttccatcttctgtgatttcaaattcaatcggttttgcaccgtctgtcaaatatccctctggggcgttgctttcctcaatacggtattttccgtatggtaatgtatcagcgtcagttgcagcgataccgtcaacacctgtatggattgtttttacgacttcattcttgttgtatagcttgccatctaccaagacagcgttatcatttaaagaaatgattgcaaaggcagtatctttcaaagtcgcaccgccctgtgcttttgtatctttggtttcaaggtcacgtttctggattttgacaccgccacggataaccttgtctgatacagaatactggttgctgccgcttaacgctgcaagttcaccatcttctgtaatctgtgccacatagacaccttttatctgttcagaatttccggcagcctgcatataagcaccctccaataagtaaccgtttggagctgccttttcttccacagtgatagtaccaagaggcaggcagacagtaccattctgtgtatagaagctgtcacccgataccttgtaggaatccgctaatcttgtgatgtaatggacttcgttgttgctgtctttttcagcgattgtctttgttgtccatgtgcgtgtcggttctgccggaagattatcttttgtgtagtaaccgtcataatacttccagacaaactccgcaccctccaaagaagcgttaccctgtgacgtagctttggaagtttccatatcaatcttgaaaagctcaaccaaagtgtctgtgacttttggtgtgtcgctgacttttaaagtcgtagtttcattaaccttgaccgtcatagtatagacgttcttatctaactggaatccttttggagctttcgtttctttcacatagtatgttgcggctcttaattccacagtgtcagtattgccattggcatttgtcgtaagtgtggcaacagacttcgtgcatcctttatcagaatagacaccataagtcgcaccagagagagaatagcagtcattcccgtttgtaactgtggtattactggaaaatttctgaatcttgccatttccgacagccagctctgcgaagaactgtcctaaatcctgcccctcaccagtgtagatataaccataacagtcatagcgtcctttgttttcttttacaaaggctttcgctccggcgaatacctcatcttgtatggattttgagatttcatcataggaagctcgcacattgtcacagccccacccaagatggacactcaatctctgccagactaccaactgtcttaaaagataggcgtgctggctgctgattccgctatggcttgcggtatactgtttgacgtattcaaaggatagggcaatatcggctatctggtcgtcactcaaacgtgtgcttgcgtcacttctggtcttatatccatttttgaagttcgtgttaatatcgacacagtaagcgtcctcgccatcaacagtcatatgcccctcattgaatgtagaaccgatagaaccatcattcattactttttcaacgattcctacacgctctgatgattccgtccagtattgcgtttccgcagcatggacagccgttgtgggtagagcagtaaagacggttgcgagagtaagaacacctgtaagcaatcgtttcaatatcttattcattttttgattctcctttcatttgggtaaaaaaatagacgctcatttctgaacgtctggaaatagaaaggaacgcttttatacgttccataatctatacgttattcaatttttttcaatactgatgtgttgttctgtattccataagtttgcatttctaggatttttaccgtatcaaggctcattcgtaagtagtaaataagtagtaaaacaagttcataaatcctttgaaatagctgataaatacagtgttttagcggataatcaaactttcagttggtttttataaataaaaacctcattgaaaaatacaaaggatatttaagaatccggtatgcggacgggaagagatatcttgactgggtgaagcagtacggggacctcagcgggcaggagatccggtttggctataatctgctggacttaaaaaagacactagtttcggcggatgtatgtacagtggtcgtaccggttggaggaagtgataaaaaggtcacagtaaaaaatgcggtagtgggtgggaaaacttacggaaaagattatatactaagcgatgaggcagtgaattactttgggaaaattattaaaatgcaggaattcccagacaagaaatctccaaacgaactttatacagaaggagaaaaatggcttcttgaaaatatgaagtccagcctgactgtggaactaacagccttggacctgcacatggtggatgtgaatatagatgattttaaacttggggatctggtcaaagtggtcagcgttcctcattcaattgtttttaaggatgacctgccagtcattgaaaagtacagctacgatattacggatccgagcaagaatacgatcacagtggggaaaaccttaaaagtattcacggagcgtaaagatccggtcatttatgacaaagtacaggaagtgactggtaggtttgaaggttatgtggagacaacggacgggaagattgaagagatcacaaatgaaatccaggaattcaaaaccctagtgatccaagatttcactgcggtcaatggatctatagaacaactgacctcaaaacaggcagactttgagactgcgactgcagagaacttcatatctacgaatgctgagatttctaacttaagcggagattttgtgttatttaagaccggagaatttgactctctgaaagcaaagcaggcagactttcagactgctacagccgaacattttacagcgctccaggcccagatcgacagcctggatgtaggaaatcttgacgctaagtatgcgacgattgagaatctaaatgccgcgaatgcaacgattaaaaaactggaatcagaaacggtcaaaacttcatttttagaatcaaactatatgaaaaccgttgatatgaaaactgagtttgcaacgattacaaacctaaacgctctatctgccaggatcggtgatcttgaaacaaacagtatcgatacaaaatatctggataccaattatgcaaagatcgaccttgcgaatattgcggatggtgttattaaaaacgcaatgatcgcaaaaggggcgattgacaccgtacagatcgcagatagttctatcacaagcgccaagattgtagaacttgcggcaaataagattacttcgggtacattgtctgtagaacggttggagatcaggggaagcagcaagagcatcgtttactccctaaacaatataactggtgctttgcagacacagaacgtagaaacgttgaatggtgagattatgacccctaggacgatcactgcagataaactggttgccaagtcgatcacagctggagagatagctgctgcgacgatcacagcgacagagatccttggaaatacgattactgcggataagttaaaggcggggacaattacggcaacaagtggatgtattgcaagcttggatgcgaataagatcacagtgggggtactaaatgctgcgaggatcgaagcaaggagcattacagcggataagataaaagcaggcacgataactggtgatgagatatccgcagggacaattaccggggaacacatcgttgcggagtctatcacagctacaagtttggatgtaaatagtatctttgcacaggatattacggcaactggtaccattaccggaataaatctggtcggagcaacaggaagtttttctggtaatattactgctaattcgggggaaattggtggatggaatatttctataaatggaatttataaaaatctgcctcaagtttgtaatattcaaaattataacgcttctacacatgataattttactggaacctttataggaagtagtggatacagtagttttactgcaaaaccaacaacatatgaatctatggaaaccgggaaactagtaaatggatctttagcaaataatacgattatacagaatggaaaacttaaattatatgaatcacgctattcaaagcaagaaaatatatggaatcctgaattcggggcttatctaacgcgggttgaaatcggtggaagaacaataaaaataagcgaaaatgatagtgcagagtttacggatagtggatggacagatgttatcaaaattgatccatattacataagctgtccagctttaacaattagttcaagtattgaaacagataatgttattactcttgaaagtgatgggatgataacttgtggcggggttctctgcagaggcgacggtattggtactagcggcgatataagacttacaggaactaattatcttaaaggttctgaagtgaatttaataagatggacaggtagtgaagttggtgttggtgatagttctaaagtaactggaatatggggcagcaaaatgaacatgcattgtaatatacagcttaaccccaatgataatacaaaatatcttaatacatcaggtaatgcccgtctcggttatctaaccatggatggaaatattgcattacaggatcacaatatgaacgttacaggagaacatggtttatattcaaatacgatgtctaattatattgtacgatactatatttctggatcaacaaaaagtacggcgttaggaaataatagttaccagacccgtatttatggatcttctgtctgggctaataaagcgatatccacgtcagatgaaagaattaaagaaagttttagttctttggaacaatatgaagatattttcatgtctcttaatccaacggcatatcaatttctagaaggatatgagccaacaaaattaactcactttggttttagagcgcagcaaattagaaaagcattttcaaagagaaacttggatccttcttattatgctcttaatggagaaacatctgttgatgcaaaggattataatgagcgaatgggtattaatccagattacgaaactgagtatggaatctgttatgaagaaatgatagctttaaatacacacatgatacagaaaaatagaaaagatatgaataatcaaataagcagaatcgatatgcaggaagcaatcataaacgaccttcaaacccgactctggcaggcagaaaaacaaataaaggaactcaaacagacagctcaataagctgtctgttttgttatacaaagaaaggagaacattatgttagaaactaagaaaagtaccacactcacaggaattatttcggttaaggatggtgatgcagataagcaggttgtctacctaaacgcaaatctatccgcagacagtggcaatgataacatttcacagactatccaagacaaagtattgtatgcggcaaacaaggtagagatccgaaaagatgtcgcagaatttacgaaagaagtatatcacattcaggaccaggaggtaacagaatagatgaagatgagattaagcgaagtgcaagaaagattacagggccttttaaatatttcaggaaagaaatttccagcaaaggtcagctatgcgatcatgaagaacgaaaaggctctggaatcagagtacaaagttatagacgagcagaggataaagatctgtgaagcatatgcagagaaagatgatgaaggaaatgccatagtaaaagaagagaaatatgttttttcatccgctaatcaggctgcttgtgacaaagagtataaagagctcctggcagaagaaattgaagtggatatttgcacgatagatgcagaagaactggacaaatgtgacgacagcagccgctacgatgtgccaacagcagcagatttcatgacattggaatttatgtttaagtaaggaggcagtatgacagtacaggaagcaacaagcaatatacgggacgcggagttcggcgcagatgtgcgtgaatcgattgctgcagggatcgaaagcattgatgattttacacggacaaatgtggaagagatcaagacatctgtcaatgatacaggacaaagacaggaagatcttaacagccggtttgatgaatacataaagaacatgtcttctgaaaatccatcggttgcagaagtggtagatgcaaggtcaaatgcagagggtgttgtttcggaaacattaaaagcaagactggacggtatggattcagtagtaaaagcagttcaagagagcttactggatcttatgcatccggtaggatcaatttacatcacaacatcagagatccctccggaaaatatcttaggggggaagtgggagccctatgcccagggacgtacactggtaggtgtaaatgaacaggtagaaaaatataatacagccgggaacccgggaggtgaagaatcagtaaagcttacagtaaatcagataccgtcgcacggacataatgtgtcagtgaacaacagcggcagttgttccatcgcaaaatctggaggacacactcataaattcaaagtacttagaaatcagaccaagacagacggtgcaagggatgtgatccatgtggatggaacaggatcacagtggaactcagtgataacagacaatggtgcacatacacatacagtgccgaaccacaagcatacgctcacacagtcaaatgtcggcggtgggcaggaacataacaatatgcagccatacattacagtatttatgtgggtacggatttcttaaaggagcggggatgttggaacagatactagcgatgtgtggtgcaatcagcatcatcggaggagccggggcagtgatctataaggtcgtgcacccggcttttcgttttaaaaatagagttgatcttttggaagaacattcacaaaaggattatagacgcctggcaaatttagaagaaatgcagaaacagcagaacaaatgccttgctgctatgctgaaccatcagatcaccggcaacggtatagaaaatatgaaaaagatcagagatgaacttcttgaaagcatcattgaaaaataagaagggagatataaaatgagaaattgggaaaattgggcccgtgccgcaggaatcagagcgctgaagactgctgcacagacagcggcagcaacgattgggaccacagcagcactgtcttctgttgactggaaaatggtattatctacagcagcattggctggaattatttccatgctgacttctgtagctgggattccggaggaataaagatgggtattaaatggaaaaaaatatgggccgataaacggaattatggcggcagacggaatcttaaggatatagagtatatcgttttgcattacacggcaaatgatggagacactgcagataacaatgggaagtattttaaaaataatgttgttaaagcttccgcacattgttttgtagatgatggagtagtcgtgaaatctgtaccgctgcgcaatatagcatgggcagtgggaggaacgtatgatctttccggagcagcagggaatttttacggaaaatgcacaaatgcgaacagtatttcaatagagatgtgtgacacaatcagagatggaaaggtcactgtttctactaagacaagagcaatgaccattgatctggttaaatattatatgaaaaaatatggtgtccctgcatctcatgtgatccgccactgggacgtgaacggaaaggaatgtcccgcatattgggctggtacagacaattcaggctggaatagttttaaaaaggcaatcggtggacaatcagaaacaaagaaatatacgacagtaaaaaagacctcaggaaaagaggcagtctgctggctgcaaaaaaaactaaatacacttgcagaaggctcagagattgatgaagatggtatctggggtcccaggacgcagtctaaacttgaagcatattggcggcagcttagatggaaaaagggcagctatgccggaaagaaaacctgcagggcactgaataaaaacagaaaaaaataataaagcacgcatctcagatccagactcagtatcagcagagccacagacatcccggatcatcatacggaattctggactctgctgatacggtctctacaattttttgatctaatagtatttgcaatgattcttcagcgggttcccgcatcatatattttctcttacaaaattactcatttttatttttctttattcaaaaagccccatataccaaaaggcatatagggccattgttgcctgaaaaggccgattatttatttgctggtgaaaccgcctggtaatagatagcttttgctttattgtccaggacaaatgcatcataattgatacgtccttctaccagggagccgctgatgcccggagggtcggcatggatcttgtaatcctccagctttgtcggcgctacggcagcgcacggatgacacatcatgaaaccgaaatcttccggtacccgattgaccggtactttgatgatctggcatccgtctaattccgcaatgacaccaagttttttcatatcttgtccgatatcagtttccataatgatatccttgctttttttcataagagtataggtctttggagaaaccacaataaagcgtcctgtttccggcacttctgcagaatcaagagtttcacttgcctccaaaatctcatcgtaaattgtggcgctgtccaatgctttcgcagccggctttgttccggctccggcacacataacgccgtatacatagctgtctacttccggaatcacaacttctctggtctggcgctccagcgcagatgccgctgctagctggttgactgtttcatcttcatccagcttatcaattgcaaaagtaaaagcgcggtcctttttcagctggaatgtctctgtggtggcgtccaatccctgaacagccccatatcttgaccagttgctgccggtacccggacggtcataatcattcattgaggcagttgacaccttatatacttttactgtatgcgcgttgataaaatcaaaatcctgatttgtcaataatgcttttttactttctgtagaaaatttttcgtccacgtatggggcgaattttgttgctaaatcgatagccatatttcatactccttctctgtaagataaagaaatatcctagtccagcttcatggcacttctgaatggatcagctttcaagctgctgcctttgcttacgccggaaggccatacaattttaggggcatcggaattcggaagcagtgattttaacgcttcatattgctccttaaattcctccactgaagaatattttaagatatttgccagttctgcaggatatttctctttatttaaaagttcttttatatctaaagccatctcacgctgttttaattctttttcccttgattctacaggatctggttcatcgggctgatattttttcctctcccgtgccagacggtcctgtacaatacggtcgatatcctcctgcgtaaatgttttcggctctgctccgttttttccggtcggctccgttgtctgagattcctctatatgagaaatatgatcttgttccatgttatccatgtgctgttacctcctgatgagtatttaatgaagttaaatatgggcagagatacatcctgccctagttttcttccatgaaactaagtacctaaagaacagcccatatatttaccttgcgggtgggtgtgctttgtacaaataggtataattcatgtttcatgtatatacttaaaaacaatatagagaaaatagatgtaacaaaaaaggcggggatcaatatatgcagttttgtctgccatatattttcccacacctttttaggtttacagcgctcatatagagtagctgcggtacttttactattgtaagtttccatgaatgatttatgtaagatcttttaattctatgtatgccttacggaaagtcccgtcgttttttttggaaactttataggctgccacttgggggcttaatagttttaaaacttcttttaattcatctgtacattgataagatactttaatttttaccatactgctgttcctctgtatcttgcttttaagtattataagatgtgtttccatcttatatattatattataacagatgttaatgcatctgtcaagaagcttgaaatgaacgatgtatttgcatctgttcatctgcagatctgtatggtacacttagtacgaggtgacatgtatgagtatagcagaaaatataaagtatcttaggaaacagaaacaaatgacacaaaaaaatttggctgaaaaatctggtttagcggaaattacgatccgacagtatgaatctgggaaatatgttcctaaaatggaatcggtgtataagctgagaaaagctctggactgcaacatttatgaaatattagataagcctgcagagcttttggagcttagtaagtctgaatatgaaaaggtaaatgatctgctgtatgtacagaaggatctgccggacaacaagaaaaaggaagcagccggaaagcttaaagcagaatctgcaataaccaaaaaatcaaaacaagagacaaaattgttaaatttattttatcagctgaatgaattaggaagaaaaaaggttattgattactcaaacgatttagtggacagcgggaaatacaagaaataagacactacaacagataggaagaattataaagttaggaactaattctatggagcacaacaattattacagccattgggcgtatgctgtgcttcgaatggttcctcgatgcaacaaaaaaaacagcttatctaagctgtttaaaagagcgatagacgggactcgaacccgcgacctcaaccttggcaaggttgcgtactaccaactgtactactatcgcatattatgttagattctcttgctgagaacaaaatttattctacaatattaagggcctgatgtcaaccatcttttttattttttctacggttatcaattacataaagtaaaaagatgggaaattatattgacattccagacaacataagttaaaatatggaaataagatatcttattctcatcaattcatattatctaggtattacatctattatcacatcaaccaacaaatccccgtctatcaggaggaattatgcagaagtttgcagttgaagatcaatatttcggccctctgctgccctttattaaagaccatatggttaccgacattaactggaatggaaaagaactgatcgtggacgatctggaccgggggagacatatcgttgctgagacagacatttcagaaagttttattaatcaatttagtgccaggatagccaatgcggtgtctgcgccgtttaataagtatgacccgctggtagaagctgaggtagacggtctgagaatttctatcattcatgaagatgtatgtgcaaccggacgcagtatttcgatccggaagtcaccggcagtcgtaaggctcagtgaagacagcatcgcagcggatgattactgcagcgaagagattctgaattttttgaagaacagtgtcctcggacatatgaacattgtgatcgcaggacaggtagggagcggcaagacagagcttttaaaatatctgaccaggtttattcctgatatggaaagagtcatcaccatcgaggacagtctggagatacactacagagagattaatccaggaaaagactgtgttgccattgaagtaaacgaagacacttttggatatgtggatgcaatcaaggcatctctgcggcagctgcccacatggatcctgctctctgaggctagaggggaagaagtacagcatttgattcaatctctcacgacaggacattactcacttacgacagttcatacagacgatgtaaggagaattccggaaaggatgaaaaacatggtggacgatccaatagcgtcagaacgcatcgagagagatgtgtatggttttgtagatctaggcattctgatacggaaagaacaaaaagccgatgggaggatccggcgttacctggatcagatcgcttgtttttacacagacccggacggtgaaaagatgatccatatgatcctaaaggacaggagtattataaataaagaactcccagaaaaattaaagacaaagttcctggtcgcagatccgttccacatgggagggaaaacatgacactaagcaacagtcttaggagatcactaaggggtctccggtatatgaaatttacaaatctaaaaaaagagattcatggctacggatactcttattcattcaaaaaatatctttttaccttattcttatcatttgttggaatcctttccgcaggcagattctttcatttaaaaccttcctatatcacagctctcggtttcatctatctttgtttttttccaatgattatcatccggcagtttcagtatttgtatgaacagcagagatttcgggatgtggtgaattatctggagcagatgatttattcttttaaaaaacagcccaaaattattgtggctctgggagaaacaaaacagctttgcgaagggaggatcctacagctcatcaacgaagctgaagattccatcagccatcctgggacagaagatgacttatatcctcatgctctttcatgtattgagcaggaataccggtgtgaccgcatgaaaatgcttcacgattatctggtgaaggtcgaaaatctgggtgggcagtatcaaaacacattaaatatcattttagatgatgtcaaggaatggacagagaggacgtacctttttcaaaaggaacgcaagagtatgaaatttaaaattgtactttctctagcggcatctttgggtgtggcgggaacgacagttatgatgcttgccagcgatgagacactggaaaaggtacttgacggagagatttatcagcttgttacatttttacttctgtttgtatttttgatgttgtttctaggagcgcagaagctgcttaccggaacatggcttaaggacacgatggatgagaatcataagcagattgagaaggacttcaggaaaatgagagaggaaaaagacgggaagcagccgtggatcattacagccgttagttttcccatattgctgcttggttttgactggcagaacctttacatcataggggctgtggcagccctgatcatgtcggcatgggccacgccgtccctgaagaaaaagaatgcacagagaaggatcataaaagaggttaagcgaaagttcccttactggcttagggggattgccctcagcctgcagactgaaaatgtctatgtggcaattaaggattccctccaggatgctccatatgtcctgaaagaacagatagagaaactgctcagggatattgacgaggaaccggattctattcttccgtaccaggactttttgtctgaatttgatctgccggaaatacagtctgcagccaggatgctgtactcacttaccaactgtggaaagaacgattcggaagcacagatcaatactctgatccatcggaataatgtactgatggataaagcagaatggctgcaaaatgaaaatgatatcgcagggatcggagttctgactttcgtgcctatgatactggcaactctaaagatgattatggatctaggattgatttttggcagcttttttaccctgtggtcgaatctgccgggatagaaaggagaattatatgcaggatttttttgaagagttgggaagtattttgtttttgctgctgacaggtataggaatctgcgcagtatatattcattttgtacagttaatagattgaaaggaggtacttatgaaaacgatcatagaggaatacggaaacctgatcctgtatgtgatcgcaggcgccgcggttctcggatttctatgggccgtcatagctgcggcgggacagtttggaaccgccttttttgactccatcagctccgtcttgtgttaggaggataccgtgaaacagatcattgaaaattacggcagagtcattgtggtcatcataacagcagttggagcggtcctgctcattaaaaatgtagtattttcacagatgcaggttaacggcggtatcaaggatacaaaccatatctcatccaatgagttttttcagaggcaagggaaaccggaattatcaggggtcagagaggaagacggaacggcaaggaggattgtcataaaaaaagaagaccatctggatccgagacagcttgtgacagccagtgataaaaaagacggtgacctgacaggacaaataaagatttatactgtcaggacaatggaaggtaaagaaatcaggaacctgtttgagagtgaattcttggataccagcggtgaaaaggaattcacattactgtatacagtaaagaattcctttggcctgtctgctgagggaagaatcaaggttttggtgaaaaactacggagaaaatcacagtgaatgaaaatataaaacagttcattgtatattatttattttaccggctttgcgggcaggtatgcagtctgtttggcatgcccggattatttcccaatgcggtaagcggtatttgtttcatgttttttagcagagctattttagcagaagataaaaggcagccgttcactattaccactgggctgattctttttaccattgctttctttttcttgacacaataccttacattctggcttggccagttgtttcatggatacagtccgtactttgatcaggaaataaaacaaagtccatttcttgtgaagatagctgtggttgggttcattagtccggcagcggaagaaatcttattccgccggtttttgtatcaaggactgaagcccatgggtttgaaaaaagcttctctggcatccagtattgtttttggtttatgccacggaaatgcggtccagggtatttattcagctttatggggaatggcattgtgttttctttatgagaagcaccaggatttaagaattcccatgatgatccatatgctgggcaacctgctgtctcttacgccgatccttcggttgagcctggttgattcttattttacagtctgtcttacacttatttgtgcttttgtggtctgcatgacggtaaagaagaaaggggagtggttatgaaagcgccagtggaactagtgatcagtattatcctgctttgtctgggagcatttgttatggcttcttataacggggcggcactggaggaatccggtgcaagggaaacccacgagacattcatagagaaaattgaaaacagcggatttgatcagggagtcattaaagaatgccaaaaggaagcagaaaataaaggctatgagctttctgttaaaaatgatggattttacgaggacaagccaaagtataaagtagtcctgatataccatttgagagtcaggctgctggggattgccagccggcaggaaatcgaaggatatgcattatgacggggaggatcagaaatgaaactggcgatagaaacctttgtgtgctgttttattattgctgtggggatgttcttaaatgttgtctattgtgtcaacacgaaggcagtctccaatgcaaagcagtaccagtctgccgcagtccataagatggatgcggcagacttctcagaagccgtggtggaccaatgtaaaaaggaagcgctggaagatggatacatttctttaaatgtcttaagagaagcgatagacaccaacagaagccgctgccgggtaaccttaaaatataaacttcatgttccgctgttgggcatagaaaagatatgccagatcagcagctatgcaaacagtgccatagaggaagaaacatgacaggaaggagttaaagatgaaaagttttcttgaagattatggattgattattgttgcggtgatcgtagtgttggctttatgtgtatttgccaaaggtacatttgtgacccagttccaaaaagcattgacagataccatcactacattttttgagaaatccggggcgaatagctcatttatatggattggatgatgaaacaagagatgagggaggagatctatgaaaggggcagttacaggaatcattctgctggtaattttaatatattcagtgttcatcactcaaaatatatctggccggactgccaggaagacagagcttacgatggatgtctccaatgcagttgaacagacattggacagtatgaaagagacaaaatacgaatccagggaacagatggcccaggcatttgtcagggatcttaaagagcagatgacctcggaaggagagatagaggttgatgtaatcggaattgaccatgagaatggactgctggatgtaaatgtccgggagacataccgcacctcagatgggaagaaaaagacaatcgaagtaagaaagacagcagtgctggaacagcagcaggaaggaacataaggaggcagggcagatgaagaaatggggaaaaagaattgtttccggagtgatcgccgtaagcttgcttgccgcggcttctatatcaagacagaagccaggcgggaatacagtggaatcgattgttcaggccggtacggaggcaagttttatgggcagcttactgcaaggtgaatacattgacgtattcacctcctggcctgtcaaagagcagaatgtattttatgattctctaaagcctcaggaacggtctgtattttttgaagtgacgaattatcagatcataagacagctgaccaaaacaggacgcaaaaagaaagatttagatgatttgttgcaaaaactcggggcttattttcagctgttgagaatagggagtgtggaaaaggccaaagagcagacggttatagaatgcatcaatgaaatagaaaaaacagaatatcagtcagcggatgaatatgtgaagcagttgattccggaaaaacaaacctgttatatggaattttaccttgcgttaaatcaggcttggaaagataaaaaggatatccaggatgctgtagatgaattgtataaaaagcttggtttcaaagaagaaaaaaagcaggacagtcctacaactgcagtcataaagtcttctcgtacggtacagcagaaagcagcggcaaaggctgtctcagatgggttttctaattttaaagctgtcagttccctaaaagagatgaaggatgcgattgattctgtaaaaaagggtgaaaagctcgccgttcgtgttgacaaaggatttaatgtgacttctgctattaaaacaaacggacggcatgtgaagctctatgccgatagtgtaagtggacataacctaaacaggacctcagcgtacaaaggagccatgatcgaagtaaacgggggttctttaaccctgggggcctatgatggagacggaagagccaaaaatactctgtatatcaatggaaaaaatgttacagcaacagcttcgttgattgaggtcacgtccgggcagctctatttgaataaatacagccgtatcatggatggctattatttagcagactttgctggcggaggcggtgttacgctggaatcgggaacatcatgttatatgttcggagggaaaatagacggctgtcaggcagctaacagtaaagatgtttcctctagttcaccgaaatcttctcacggaggagggatcgtagttaacgataaagcctctttttacatgttcagcggatcagtagaaaggtgtaaggctgttcatggcggagggatcatggtctatggcactgcgagactctacggcggtacgatcactgattgtgcagcggtaaataaaaagaacgatgctctcggaggtgcagtaaaggtacagggtgcgtttagcacagacggaaagaccacatccgtaacaggagatttcgcagcctggaagtacacaagatccaatacatggtcagtgaatggaaaagatggatatgaacaggcgtctacgtctggtgccgtcttaaagaataaccaggcaaatgcaggtggttcggtatgtatcaataacggatccaaaggaaccatacaagactgcaatatttacggtaatcaaagtaccggaaacggagcaggtatctgtctgtccaacggcagttacaaaaagggagcttccctggagataaagaatggagccggcattcatggaaataccagcagcggctatggagggggagtttactgcgctgattcagttaagggatccataagtggaggaagtgtttataataatacagcgtcatacggggcaggaatttatcacgaggcagaattcctcatgtccgggggcactgtgagaaataaccaatctgcaaactccggcggaggtttttatgcaaaggggaaacttgtcactaccgggggtgaggttgcaggtaatactgcaaagacatacggaggcggtgcgatcataaaaagcgcaggagcctcgatcagtggagtcaggataaaaagtaattcagcggctgttaacggtggaggggttcagctggacggacaggctgtcgtttctaatgcagctgtgagcgaaaatactgcttccgcaaaaggcggaggaatatcagtgagcaccgccgggggattgcagatgaataaggggactgtcagtggtaataccgcaaaaagcaacggaggaggtatcaatgctgatggtacttgtaaagtaaacggcagtaatcttactggaaaccaagtaaacggtgatggcggagctgtctatgtgggaagcggtacatttacaacgtttcaggcaaaccaggcagtaaacattgagggaaatagtgcagcaaaaaacggagcggggatttataataaaaatgtaaccgtacttaacaacaatgcacatattttaataaatcagtgtaaaaacggttcagagcacaatgtatttcatgcaggaagccaacttttggtggagggaaatgctgaaataaagcaggaagtttatttaaccaaagacagatttatcacggcatccagtaagtatttttccagtgcgaattctttgactatgaagatttcaatggatagctccaatgtgagaaacgggtatgcggttgtaaaaggggatattccggatactagggacagcagctataaagctggtgatacattgctccataatcaggcagcagaaggtcgctttgcttatacaggtacatgctatggtttgcggccgggtaatttaaagaaatcgtcatcaggctgtgttccatatagtattgttttaagccaggcatataagatttgttatgataaaaattctacgcaagaagtcaggaatatgcccacggcagcagtaaagcattgggaagaagatatgcgattatcagaattggtaccatccagcggatcaggagtttttgttgcgtggaatacaagatccgacggtacaggtaatggatatcagccaggtaatctttacactgccaacgaggatgtgatattatttgctctgtggccgcactataaggtggaatatgtacctgggatccaggggacaaacggcgtgacggatagtcaggaacagaataaatctgaagatattctgctgcgaaagaatggtttccggtcttcagaaggcaaatttatatgttggaagcaggatgcatataaagcaagaaaaagaaacgagatggaagcagcaggatatacagatctaaagacagaaagagatggtcaagggcaggattatgttttcggattttcaaagaatttgagaagaggcaatttgaatagcaattcggagaatgcaggctctttattggatgtagatgatatttttataatgaaaggtcaatgggatttcaagccagatattattttaaaggataaaatgatttttagagaaaatgaaaaagtgaatcgaaaaaaacttttagaattagtggaaagctgccatgatattgaagatggagatttaatgaaaagaattcaaattagcaaaattcaatatggtatgacaaaaaaggggaagaagcccaaagacgtaattttttcaaatggcatggagaattcagatctaatgaatacgtattttatgctacttgataaaaatgagactgtaaatgtaaaaataacttttcaagtggaagatagtgcgggcaatcttacaacgaaggaaggatttgtctatgttaattacaatcatccgccaaaattgcattcctataatcttgcatactatcaacaagagttagaaacaaaagatcagattgtattgaaagaaataattgagaactgtaaagtggaagatatagaggatgatgaacagggaattaaaattcctgtttctgtagtagagccaatacctttacaaattgagaaacttaaagctgcagggaaacataaaattgtttataaagcagtggattcattaggaaaggaaacaaaacttgaaacagagttgtatatagcagaaggcagtccgtatttggattcttatatatatcgtgtccgctttattaacaaagattatctccatacgttagatcaaaatagtaaatggagaaaaaatctggatttaaacaaaaagctcgtaacgcagttggagaaaacagaaaatgatgttttaatgaagtataagtttcaaagcaataaataatgcagcggggaatggatttttctattccctgtaaatttgtaaagcaaggggatggcatatattaacttaattggtataatagtattaagggagagaaaatagtatattataagggatggagttatcatgaaaaaaggatttatttatatactaatatctttttttatatcgctgatatatttatatgggcctatgaggaaagtaggggccgagaacctgattggaagaacatttcagagtggcaatttttcatatgaaattatttcagataatgaggtatctgtttataggtataatcataagattccaggaattatagaagtattgcctactgtagagtatcagggtagaaacttcaaagtaacccaatttttttacgatcattctgatattatcgtaaaaaaaataataatacccaatggagtaaaaaaggtgattataaatccagatggtacttcagactataaattccaaaatctccaagaactcatccttccagactccctggaatacatcaaccgtggcttttctttcaccatgaccaatctaaaatctataaagctgccggacagcaacaaacattataagtccgtagataatgttttattcaacaagtcagggacagatctaattgcttaccccagcggggatgagagaacttcttatcatattcctcccggtgtccagacgattaaaaaagaggcgtttgcttccaaccagaatcttaaggtgatatctattcctgattctgtaagagaattagagccatgggtattttcgggatcccatatagagacattagatctttcttcgatcaaaaaggctggcaagggaacgtttgcattttgcagtgacttaaaagagattaaacttgggaaagagactgttttagacaaagaacagttttatgaaaacagcgcgctggaagagattacagtggaggaggggaattctaagctgtggtcacaggatggtattctctacagtcattcagatgagggaaagtcgttggtctgttatccatcagccaaagaggaggcaagctttgccgtgccggctggcataagccgtgtagattacagcgctttcaacatgtgcaggctggagaaaatttatctgccggcaagtgtgaagaagattcagggtgctgcatttaactacggcaatgaagggaaagctgaaaatcctatcgagatttacctgtgcagggacagtctgcccgagatgaaaaaagcctcttttgcagatctggcttccggcagtacaatctatctaaagaaccagactcttagggagcagtttgaggcggagaatgtcaagtatcagtatattgatcatcaaaataaggaagccaagattaaagtgtcggtcatggaacagcagccggcggaagatatcgtattggataaagatgaaatttcttttgagatgaaaagagatggaaatcaattaaccgatctgcttggtgtctccttagtcccacatgcatccacagatcagatcatgttttcaacgacagatccaaaggtagcaaaagtgtcagacagcggagaaatcacggctgtttctccaggctccgctcttattacaatacagtctggaagtgttaaaaaagagtgcagagtcacagtttacgggcctctgggcagtgtagataagattcccatgcagttttatgcaggtttggaggtaagaccggatgcggttgtaagaaatatgcatggtgaggtgttgaggccgggtactgattacacagtcagatatgaaaagaatacagtaccagggacagctaaagttttgatacaagggattggcttttttcggggaagtgtagaaacaaattttgagattcggattaagggaaatgatatctccagggcagagatcgtattcccgcaaaagttttattactatgaagggaaacctataagaccgaaacccacagtgaatctgaatggaaaaaagcttgtggaaggcagggattaccgcatagaatacatggcaaacggaggcattgggctgggctgtgtatggctgacaggaatcggcggatattacggacagaacttcacctactttcagatcatgaaaaaagaagagcccaaaattgaacaaaagccagttgagaagaaatacaagatcagctttgtatcacagccgtcgaatagtgtgtataccggaaaagccgttaccagatctgtgagggtaaaaagcggcgccagagttttaaagatcaatagggattttaggataatatatacttccaataaaaactgtggcagagccaggatggaggttttagggaaaggcatttatgcgggtaagacagtccgctattttatgatcatccccaaaaaggcttcgattacgaaaatacggtcagggaaaagaaaaataaaagtttatctgaaaaagagtccgggaaaggccacgggatatcaggtctgctggtctgcaaataaaaaattctccagaacaagaaaacaatatgccaggaaaacaacctgtctgctgaagggtttgaaatccaggagggattactatataaaagtgagagcatataaaacagtacagggaaaaaagtattttggcgcctacagcaaaacaaaaaaggtgaggatgagatgaattccataggtatatttctcgtatcagcggaaagttaatgaaagtgctgggccggcttgatataatgaagtagagaaagagacggaataaagggggaattttagatggcctttgggaagagatggtttcgaaagaaagcggacagaattatttttctggatattgacggtgtgctgaactctatggatctgtttgacaagatggaggagaagaaaatagaaccgtttatggggattgatgtggatgaagataacctgaaacatttaaagtttattgtggagcagacaggagcaaagatcgtgctgtcttccagctggcgccatgcatggcacgaaaaggggccgatgatgacaatagggaaggcactggatcaggccatggcgtcctacgggatgaagatcatttcaaagacaaaacatctccacaaagggaaccgctctctagaagtaatagactggatgcgtgggaaacacatccagtcttttgtgatccttgatgatacggattatgattgggtggagtacggactgggagaacactgggtccgcacagattttatggaaggcggattaaacagggaactggcgctgaaagccgtcaatatcctgaatcagtaaactactccagaataattccttctgtagagatggtgatgacattgagaggaagggtttttccgctctgttccagggcagtgcggactgcatattccaggcctccgcagcatggcacctccattcttgtgacggtgatactctttaagttgttttcccggatgatctgcgtcagcttttccgaatagtccacgggatccagctttggacatcctaccagtgtgatcttttgtttcataaactgctcatgaaagtttccatgggcaaaggctgtacagtctgccgccaccaagagatgggcattgttaaaataaggtgcgtttacaggaaccagctggatctggacaggccattggcgcagggcactctggttgttttttctctggttttcaagaactgcttctttgtcgtagtccggggcctctctgttctcaaaggttatggcacccgttgggcacataggcagacagttgccgagaccgtcacagtaatcgtcgcggatcagcttagcctttccatcgatcattttgatggcgccctcgtggcaggctgaggcacagagaccgcatccgttgcatttttcttcatctattttaattaattgtctgatcatcatgaatcctccttgtttttataatcgtatcatactataataaatccaacttgtctgttgaataatcaacaaaaaagaaggagttataaaaaattgaagcatatcttagaaagctgtcccttattttctggaatcgaagaaaaagatctggaggggatgcttggatgtctttccgccagaaaagaagtctttgcccccaggcagatgatttatctgaatggagatatcattgaggaagtcggcattatcattgaaggagaagtgcagatcgtgcgggacgattttgagggaaggagagcgattcttgcccatatcggtccgggaggcgtgtttggagaagcctatggctgcctggcaggaacggagatccccatatcggttgagtgcgtcagggagtgcatggtgctgtttttaaattatcataaagttttgacaacctgtgatgcaagctgtgtattccatcagaaactgattgaaaatatggtgactctgctggcctccaagaatgttcatctgaatcagaaactggagtgcctggaaaagaggacgacaagggagaagcttttagcttatgtaaaccaggagaaacagaggcagaaaagtctcaggatcaagctgccattttcaaaaaaagatctggcagattacctttgtgtcgaccgaagcggtatgatggtggaattgaaaaagcttcagaccgaagggattttaactgtggaaaagagctggataacgatcggagatgaactgtatgtagatcagtgacgtgataacaaagatgataaatattattaagggggatgccagaaggatccagcattttatgaaggtctatgcgtacgcaagggccatcggagagcatgtaaaaagataaaatatttaagaaaaaacagggattcattatctagagatgctattttacgaaagctgacaaaaaatttaaaaaagttcttgatttgggctttatgttatggtaaagtatagaagtcgcagaaatgagacatgcccagatagctcagtcggtagagcagaggactgaaaatcctcgtgtcgctggttcgattccggctctgggcattacagagaatggaaagactctgtcatatacgcgggtgtagttcaatggtagaactccagccttccaagctgatcacgtgggttcgattcccatcacccgcttagcaagccgttttagagttatctctaaaagggctttttttctatcatggcgggtttaaaaaggagcgcatttgtatggaacttatagtgagacagttcaaaaaagaagatgtaaaagaaatgactggcatatggaatcaagttgtagacgaagctaatgcgtttccccaggaaaagccgttttcttttgaggaggcggaagtatttttcagaggccagtcccatacggcagtggcagtggcagacggaaaggttgtagggctttatatccttcatccaaataacgtaggccggtgcggacacctgtccaacgcctcctatgcggtcagcaggagcgcaaggggtctgcacattggggaacagctggtcaggaattgtatggaaaaggcaaaggagctggggtttaaggtgctgcagtttaatgctgtggtagccacaaataaaggcgcggtcaggctgtatgaccggcttggatttcaaaggctgggtacggtgccgggaggataccggctggcggacggcagttacgaggacattattttattttatatcacactgtaacataataaaagaaaccatagatgaaaaggatttataaaggagaagctcatggattacaatgaattggcgttaaagatgcacgaagagaacagaggaaaagtggcagttaggtcaaaggtgacagtggagacgagagaagatctgagtacagcctatactcccggggtggcagagccgtgccgcaagatcagggactgcaaagaggaagtataccgttacaccgcaaaagggaatctggtcgccgttgtatcggacggaacagcggttctcggtctcggagatatcggaccggaggcagcgatgcccgtgatggaagggaaagcaatcttatttaaagagtttgcggacatcgacgcatttcccatctgtctggacacaaaggatacagaggagatcattaagacggtgaaatatctggcacctacctttgggggaatcaacctggaggatatctctgccccgagatgcttcgagatcgagcgcaggctgaaagaggaactggatatcccggtgtttcatgacgaccagcacggcacagccatcgtggtagcggcggggctgatcaatgcgctgaagtttgtgggaaagaaaatggaagatgcgaaagttgtcataaacggagccggatctgccggaatctccatttgtaagcttctgctccagtttggggtaaaggatgccgtgctggttgaccagaagggtgccctttgtccgggagaggcgtggatgaacgacgctcagaaggagatggcagaaaaaacaaataaggacaggcagaccggggatcttgctgagatcatgaaaggaaaagatgtttttatcggtgtgtctgccccgaatattgtcacttccgatatggtggcatccatggtgcaggatcctgttgtatttgcaatggcaaatccagtacctgagatcatgccggaggaggcaaagaagggcggcgccaaggttgtggccactgggcgctcagatttcccgaaccagatcaacaatgtactggtgttccctggaatcttcagaggggccatggacgcaagggcttcccagatcaccgaagatatgaagatggcagccgccagagccatcgcaggtatcataacggaagaggaactcaatgaggaatatattattccaggagtttttgacaaacgtgtctgcagtgcagtggcagatgctgtgaaggcggaaagccggaaataaaatagatgttgaaattccggaaggattcctgtagaatatgtagtgcactacatatggaggcggattatgaaccaggagcgggagatcggaaccagatttaagcatatccatgataagtttacacagcatatgaaccagaagcttcgctgtctgaacgtaacttattcacagatggaactgttgctttttctggcagaacatcaggaccggaagataacccagaaggatattggggaattcatgaaagtaaaacattctaccgtcatcgggattttacggcggctggaggccaagggatttttgtactgtgttgtggacgaggaaaataagcgatgccgcaacgtgatcctgacacagaagggcctgggcttaaaatgtgaaatggaggcccacaggagagaagaggagcagcgtatcagaagagcattgtcagaggaggattcccataagctttatgaactgctggggaaagtacttgaaagcctggaatagagatataaaaatatgaaatgaaagtgccagccggcgctttcatttttattccatcatgtagccggctacatataagaaaaaggaggaaaacacgaatggataataaagtatttgagtcgtattcagtgcccaaggcggtcgccacactggccctgcccacagtgctgagtatgcttgtaacgattttttacaatatggctgacacattttttgtcggccagacaggagatcccaaccaggtggcggcagtgtccctcacaacacctgttttcatgctgctgatggcagtgggaaatatttttgggatcgggggatgttcctatatttccaggatgctgggagagggagagaaggataaagtaaagaagatcagcagtttttgtttttacggcagtatcatcgccggtctgatcatgatggtggtatttctgggaggaatgccggttatcctgaagctgattggatgcagtgccaacacggaaggttacgccagagactatcttacctatatcgggctgggttctgtatttgtggtgatttccatggcgtttaacaacgtggtcagaggagaaggcgctgcgaagatctccatgatcggaatgatgaccggaaccattgtcaacattgttctcgatccgatcatgatccttggaatgaatatgggtgtagcaggagctgccatcgcgacgatcatcggaaatatctgtacggttgtattttacctgttttattttgcaaagatgaagaccggtctttcaatttcaccgaaatatttcacggcgaaagataagatcctgtcaggagtattctccatcggaatccctgcgtctatcaacaatattctcatgagtacggcaaacatcatcttaaataacttcctggcatcctacggggatattccggtggctgcaatgggtgtagccatgaaggcaaatatgcttgtgatccttgtacagatcggtctgggatccggagttgcgcctttgatcggatattgctacggttcaggaaacttagagaagatgaagaagaccatgaagttttctatgatctgcaatgtggtgatgggaacggtgctgtccctgctgtatctgttatttacggagccgatcatccaggcgtttatcaacgatgcatcggtggtatcccacggtatcagaatgttgagagtcctaatgatttcaggaccggtcatcggaattatgtttgtgtttatgttcggattccaggcaatgggaaaagccatcccttccttgatcctttccttgagccgccaggggctggtatttttcccagtgctgctggtcacaaactatttcttcgggcttcagggaatcgtattcgcgcagcctgtggcggatctggcatcccttggtgttgcccttctgctgttcatcaagatagcaaaagaattaaaagaacgtgaaaaagaactggaactaaaagaagcagaagcatagaaaaaagaccctggaaaagcataaaaacttttccagggtctttttataacttactcgatttcttcggtctcgatcataaatttgacgcttccttttgtatccttgtcttttttcgtaaaggtctggtacttatctccctgttttaccgtatcattgatccggtccagtgtattctgtacgtcattgtccatgatgtttaccagtcgctggataccgtcttggttaaactggatcagtcctgtattcagggtatcggcaccgtgatacagggcatcgacaccggaagaaagcttgctgcctcccaaagccagtgtgccggtagcagaactcagtttctttcctcctgtggctgcagtgtggattccatctcccagctgattcgcaccggatgcaagatcgctctgccctgcgaccaaatcaccggctcccttgttcagcttaactgcagcagtgcgcaggctggatgccgcatctgtcagttctttggtgtccaggctgttaagttttttgaaggaagcctgggtggtcggatcacttaacttctggattagagcctttgcaggagcaagagaagaagataaagctttactctgctggtctatagtgttattttcatctctcattttctgctgtatgccctgcatggttccaatcgcagttttgacatcccgaatatcgtttgcatcggtgacggtgcctctgcccagcattgttgtcaggctgtcgatctgtgtctgcagggccgcaatatactgttcgttggctcctttgatcgtatcaaaagaggaagtgatggaatttaagcctgcggaaagctgttggagcttttgctggcttggaaggctgccggtcagggatttcatgctttccagtccggaagcaagctctttcatcatggatgggagggactttgtcttttgttccagctggctggttcctgccttcaattctttgcttccctttttcagttttttagttccagagatcaaatcattcttttttctatccagagtgttcagccctttggacaattccttcgtctttttgttgagagtggcagttccgctctttaatgtcttagaggcgttctgcaactccttcactcctgagagcagttcccctgaaccgttcaccagcttttgagaggcgttggacagagttgtaagggaatcatttaattcatcgatggtatcaactttgtccagaccgaattctgagagtgtatcggctgaggccacggttgcggttacggtcatctggaagtcctttacatccgctgtaaactcaaaggaatccgggatatcgaattttttgccgatggtactttccttgagcttcaggctgtcggataatcccgggaaagccacacccatgagaatatgtttgctgccgtcagaaatatcttttgcattcaccattttgacattggagaaatgttctgtgggcagtacgatggcagttaccattgtaaatggagtgtagatcccgtcgtgtacatcatggtttgtgaattcatagcggacttttaccttgccgcttttgcctaccagctgtttgggactgatctctttgccgtctaggtagtaagtcacctgcatggaaacaggaagttctttgtctgtctttccctgataataaatgtcattgccgtttgaattccaggtgatgctgtttttctttcctttctggtaggtttcatcacccttgacgttttcaatgtcagtcaggtcgctggcgtccttaatctctttagatttctttttatttttcagccagtcgctgacaatgacggtctgtgtgttgccctccgcatctgccttcacatagacggtttcctctttttcctgggaatcagccgcatataccggtactgcggccattgaggaacacaaaatcaatgaggccgccacggccaatgctttatttaataccttttttctcatttctaatcctcctttatttcttgtatatggcccatgccaaaagttgtcttgcaaatcaatcgatcaaatatcataaacatcgccggcagaatgaacacaacgctgaccgtgctgatgaccgcgcctctggcgagcagagtacagatggagctgatcatatcgatcttggagtagagagccactccaaaggttgcggcaaaaaagctgaggccgctggtgataatggaaagcatggatgtctcgtgggcgatccggatggatttccattttgtattgcctctgatccgctctttctggtaccggctggtcatgaggatggcataatccacagtcgcgccgagttgtatggttccgatgacgatgctggccacaaacgggagctcttctcccatataataagggattgccatgttgacacagatggcaaactcgatgactgccaccagtatgacaggcagtgaagctgatttaaatacgatcataataatgatgaagatggccgctatggaggctatgtttacattgcgcagatccacattggtcacatccgccaagtcttttgtcagcggagcctcgcctatgaccatggactcgctgctgtagctttttacgatcttgttgatctgtgcgatctggctgttgacctgatcggtggccgttttgtagtcggaacagataaactccatctcatagttcgggctgatcaggttgtcacttaaggtgccagggatcatatcggcaggcacagcggagcccacaacggaatccataccaaggacccatttgacaccgtcaaccttttcgatttttttctgcatctcggttttttccttggaggacatgccggctttcagcatgaccatatggatgttgctcatatggaaatccttgctcagttttttattggcaacgttgctcggaagagactgtggcagagacttatcaatattatagtaaatctgtgtgttgttgttcccataaacagccgggaacagcaggatcaaaaagatcaggatcgtcgctttataatgcttcgtgataaagtgggaagcattggacagatccggtatgatggatctgtgcgttgtcttgtcgatccatttatcaaagatcaggatcagtgacggaagaagggtcacgcagcagatgacgccgatgaccactccctttgccatgacaataccgatgttcatgccaagggcaaacgtcataaagcacagggccgcaaaaccagcaatggtggtgacagagcttcccgcaacggacttaaacgtattggagatggcgtgggccatggctctctgcttgtcattgtcaaaccgaaccttgttgtcttcatagctgtggagcagaaagatggaataatccatggtgactcccagctgcaggattgctgtcagcgcctttgttatgtacgagatctctcccagaaagatattgcttccaaggttatataggatagcgatgccgatgctggccaaaaacaacaccggagtcagcagggattccatggtgagacataaaacaagtaaagacatggcagccgcgatcactacatagatcggcatttcttccagtgccagattcttgatgtcggttacgatgccggacatcccgctgataaagcactgcttgcctaccacatggcgcatctcgctgactgcgctcatggtctcgtcggaagaggtagtattgtcaaacagcgcgatcatcatggtggcattcttgttaaaaaatacgttccggatcttttccggcagcatttcttttgggaaagtggtgtccgcgatgtcatcataccagagtaccttttttacatggtccactttctcaatcttgtgtttgatttcctgtacatccttcagtttggcatcctccaccacaaccatggaaaacgccccggttccaaactcatctaccataatatcctggcccttgacggtttccagagaacttggaagatagcttaggatatcatagttgatccgggtctttgaaattccgatcagggatggaatcaccagaaggagggagagcagaacgatcagtttccgatgctttgctatccatttcccaaatttaatcataatcaatcctcctaaatgaatgactaaaggtcattttcttattactggtatactataaaaatgactaaaagtcaataattatcggtttatttttacggttttttaataattattgacttgtggtcattttttgatatataatgataacaaaagaagtccaaaagggggatgaacgccaatgagtaaagtagaagaaaataaaaagagaaagaagacagcgttgcttgatacggcgtatcatctgtttacgcagaatggctatcaaaagacatccatctctgatatcgtcagtcaggcgggagttgctaagggaaccttttatctctattttaaggataagacagacatccgttataaactgatcgcgcaccgggccggcctgatctttaaaaaggcttaccgggatctggaaaaagccaatatccggctgttcgaagacaagatcgtatttctggcggacaatatcattgaccagctgtataaaaatcctacgctcctcaagctgatctccaaacatctgggatgggggatctttaaaaatgccatgaacgaacccatggagggcgaccacgagaacatctatgaggtctacatgaacctcatgaaggaatccggccgggaatttgaggaaccggagaccatgatctacctgatcgtggaactgatttctgcaagctgttataatgctattttatttgaacagcccgtgacattagaacagttgaagccattcttgtacaaaacgatccgaagtattataaaaaatcatgaaaaatagtaaatgtacggtattttgagcaaacaaccacaggaaatcatgctataatgagggatacgaaaactgttaatcagatgatgagcctctcatcagtagttataaggagtaatgaatgaaatcttgtggtattttgctgcctatctttagcctgccgtcctcttacggcattggatgcttttcaaaagaagcctaccagtttgtagactttctgaaatcaaccggccagtcttactggcagattcttcccctgggaaccatcggggaaggaaattctccatatttatcctattcaagcttcgcgggaagcgtattatatattgatttggagcagcttcaggcagagggacttctgactccagaagagtgcgacggctgggaattttccgacagcgaagaaaaagtggattatgataaagtatttatgtccagggaaatcctgctgtggatcgcatatagccgcttcagagggggaagagactacgaagatttcaagaagacccataaagaatggctggatgacttctgtaaatacatgaacttaaaacagccgggaaaaggaagagagtatttttgcttcgtgcagtacaagttcctgagccagtggctgaaacttaagcagtatgccaacacaaatggcatccagatcatcggggaccttccgttttatgtggcaaaggagggcgcagactttctggcccacccggaaatgttccagctggatgaagacgggaaaccaagggtgcaggggggatgtccaccggatgcttttgcggagaacggccagctgtggtcaaaccctgtctatgactgggagtatcataagaatacagattatgactggtggatgaagagactaagccacaactttctcttgtacgatgtgctgagactagatcatttccgggggtttgacgaatatttcgtgattcctgcggatgcagagacagcggccggagggaagtgggaaaaagggcctggacttgatttctttctcgcgttaaaaaagaagctgggagatgtaaagatcatcgccgaagatctgggattcctgacagactccgtgagggagctgcagagggagatcggttatccgggtatgaagatcctggagtttgccttcggtgcatgggacgacagtgcttatctgccgcataagtatgaggataattgtgtggtgtacacaggaacccatgacaatgacacagccattggatggtatgagaatatgtcagaggaggacagaaactttctgcaccattatctggaacacagcaccatcgttccgaccggacgtgtgaatttggatctgatatccctggcccttgagagcaggggggatacggtgatcatcccacttcaggattatcttgggctcggcagcagcgcaaggatcaatacaccttctacagtgggagagaactgggagtggagagtgacaaaagaacagctggacagcgaacttaggaccaccattttgacactgcatgaccgctaccgcaacgaagaaacgatagagaagaactcataaggagcgtaaaacctatggcgaaagtatccaagagggtaacgaaggaacgagtgagaaagatctgcgatattttaaatgaaacctataccacagagtataaatgttacttaaatcatgaaaatgcatggcagcttctgatcgcaacgatgctcagcgcacagtgtaccgatgccagagtcaacattgttacggaaaagctgtttaagaagtatacaagccttgatgcatttgcgaaagcagatctgaaagaactggaaagagatatctattccacgggattttataagaataaagcaaagaacattatcggtgccgccagccagatcttagagcggcacggaggggaagttccggagagcatagaagaattgactgctctggacggtgtgggaaggaaaacagccaatgtgatccgcggcaatattttccacgaacccagcatcgtggtggacacccacgtgaaaaggatatctaagaaactatgtctgacaaaaaatgatgatccggttaagatcgagcatgatctgatgaaagtcctgcccaaagagcagtggattctttataatatccagatcatcactcacgggaggaatgtctgcatcgccagacggcccaagtgcggggagtgtacccttcagtcagtctgcccgtcaaacgaggtgtagcctatgaaggaatatgttgcttttgacctggaaaccacgggactatctgtggatgaagaccaggtgattgagatcggcgccgtcaaagtcaaggacggcaggatcgccggaaaatataactgtatcatttatccggagcgggaggtctcagattttatcatccagctgaccggcatttctaggaaaatgctggacggcggtatagcactgagagacggtgtagaagggtttttatctttcagcgagggctttccggtgctggggcataatctgatgtttgactatcgttttatgaagacagcggctagaaagttttcttatccctttgaaaaggaaggggtggatacgctgaaggccgcgcggatgctgcttcggcagttaaagagcaaaaaactgggatgcctttgtgagcattatcactatgtgaaccaggcggcccacagggcctatgatgacgcgctggccacggcggttgtgttcgagtccatgaaaaaagaattcggggcagatcaaaaggtctttgagccggagccgctcatgtaccgtcccaaaaagcttcagatgatcacagcaaagcaaaaacggtacttgaatgaactgcggaaatatcataaaatagaggataacggcaacatagatggactgacaatgagcgaagcttccagaactatagatgagattatttcaaaatatggggtgatgcgatgaaaaagaaaagaatgatcgccggaattattgcgattcttttggcaatcgtaatggttggcacaacagttgccggttatttactggtgtaaaacggacaacatttgtacacgggaacaaattaggaaggataggcatgtctaagaagatcaaggccggtatcgctgccggggttttagcagtgatctgtattggcgtatttgtttatatcagccagacagtaaaaggagccaccaaggaccacaagatcgtccagggggtagtatttgaaggaaagtccctgggagggatgacaaaagaagaagcgaaaaaagagattgaaaattatatagagaaagaaaaaacaaaggatatcacattttatgtggacgataagaaagcggtgacaaagctttcaaagacaggcgtctcatgggatgtggagaaaacagtcaaggatgcctacggcgtgggaagatccggcagcatcatcagccgctattcccaggttaagaaagatcaggtggaagtaaagatcgagcgcagctacgaccaggagacctttgacaaagaactggaatcagcagcgaaaaagattgtatcagagcctaaaaatgcatccttaaagaggaaaaacggcaagtttgtcattgttaaagaaaaaaccggatatgcacttaataaaaaaagtacattccaggcttataaaaagcaggttgaggcggagagttttaaggtgccgctgaaggtcacaaggaaaaaggcagagtataccagcgaggatatggcgaaggtcaaggataagctgggtaccaagacaacttactacggttcttctgcaccgggacgaaaaggaaacgttgccaacggggctaagatgatcaacggcagtgtggtctacccgggagagaccttttctgtatataaagcagtctcaccgtttaccagtgagaatggatattatctggcaggttcctatgagaacggccagacagtacagacctacggcggaggaatctgccaggtttccacaacgctgtacaatgccgtgatccgggcagagcttaagatcaaggagagacatccgcactctatgacggtatcctatgtgccgagatccgctgacgcggccatcgcgggaacatacaaggaccttaagttccagaaccagtttgatttccctatttatatagaaggaatcgctgatggctcaaatatcacattcactgtctacggacagaaaaccaatccaaaccgtcacgtggagtttgtctctgagaccacttctgtgagaaacagttccggtgaaaaggtgattaaggaccctacaatggaagaggggaaacgtgtggtggaacaggtgggccatacagggtatgaagccaggctttggaagattgtcaaggaaaagggcaagaagacaaaaaagattctgtttaatacatccagctacatggcaactccgaataccgtaagagtgggtaccaaaaagaaggaaaaagacaaagacaagaagaaagattccgacaagaaaaacaaagacaaaaagaacaccgaaaaatctacggaaaagacaacagagaagaacaagactacagaaaagaagaaagaagcgaaaaagaagagtactgagggaaccaaaaaatccaaagaagattaatcagggaaaaatcatgaagataggtaaaattccagaatccacattaaaaaaggtcatattggaacagctggggacaaagagagaggaagtcttgatcggccccggcatcggagaagactgtgcggccttgaagcttaaggagggggaagtgtttgtgctttccactgaccctattaccggcgcggccgaggaagctgggcgtttggcggtgcatgttaccgccaacgacttgatttcctctggggcagagccgatagggctgatgcttacggtcctgctcccgccggagacaaaggaaaaggaattaaggcagctgtcctcagaagtgcaggaagagtgtagaaagcttggcatcgcggtcatcggcgggcatacggaagttacggatgcggtaagaaagcctttgatttccgttaccggtgttgggaaagtaaaggaagaccagctgctgtccaccaaaggcgccaggcccgggcaggatatcattgtgaccaaatatatcggcttggaagggacagggatcatagccagagagcaggaggatctgctgaggaaacgtttttccggagagtttcttgatgaggccaaggcctgcctggaatatgtctccgttgtcccggaaggaaagatcgccggagcttatgcatctgccatgcatgacattacagagggaggtatttatggggcactttgggaagtggcccaggcctctggtgtagggctggaagtgactatcgaagatattccggtgaagcagcatacggtggagttatgtgagttttttgacttgaacccgtaccagctgatctccagcggttccatgttgatcacaacagatcatggaaatgctcttgtgagagcattggaacaggaagggatcaaagcttccatcatcggccgcacgacagattctaaggataagatcatctaccgggatggaaaagcggcaagcctggaagctccgaaacaagacgaattgtataagattggagagagatcatgaatcaagagctgagagagtcaattttaaaattattagaaaagaacagccgtctggatctgaaagaactggcggtcctcttggattccacggaggctgagatcgcaaatgaagtggcggagatggaaaaggaacatatcatctgcgggtatcacactctgatcaattgggatcatacaagcagagagcagcttacagcgatgatcgaggtaaaggtaacaccccagagaggggaaggatttgacaagattgcagagcgcatttacaattttccagaagttaaggcattgtatctcatgtctggagcctatgattttatggtcatgctggaagggaagacaatgaaggagatttctatgtttacttcctccaagctcgctcctctggaagcggtgttgagcacagccacccattttgtacttaagaagtataaggaccatggaactgtattagaagcaaaaaaggtagataaaagacaggcggtgactccataatgaaagatatgctttcaaaaaaggccgttatgctggagccctccggcatacggaagtttttcgatatcgtgagcgagatgccggaagcaatttccctcggcgtgggggagccggactttgatactccctggaggatcagggaagagggcatctattcccttgagaagggcagaaccttctatacatctaatgcaggtcttaaggaactgcgggaagagatctgcagatatttaaaaagaaaataccatatgcgttacaaaacggaagaaattctagtgtctgtgggcggaagtgaagggatcgatgtggcgttaagggccatcatcaatccgggggatgaggttatcgtgccccagccgtcctttgtctgttatgtgccgtgtgttgtcatggcggacggagtgccggtcactgtggaactgaaagcggaagataaattcaagctgacaagggaacagctggaagccgttgtgacagataagacaaaagcgatcattatgtcgttcccgaacaatcctacaggggccattatgacgaaaaaggacctggagccgattgcggaatttgcaaaggaacatgacctgctggtgatttccgatgagatttattctgagctcacatacggacataagcatgtgagcatcggtgctcttccggatatgaaggaacggaccattgtgatcaacggattttcaaaggcgtttgctatgaccggatggaggcttggatatgccgcggctcccgggatcattatggagcagatggtaaagatccaccagtacggcattatggctgcgcctaccacaagccagtatgcggcggtggaagctctccgtgcctgtgacgacgaggtggaggagatgaagaattcttataaccagagaaggcggtatttgctgcaccgtttccatgaactcggcctggaatgctttgagccggagggtgcgttttatgccttcccgtctatcaaagaatttgggatgtcttcagagaagtttgcagaagagctgttaaaggaacagaaggtagccatcgtgcccggaactgcattcggtgcatgcggggaaggatatctaagggtgtcctacgcatattccatcgatgagctgaaggaagccttgagcaggcttggtacatttattgaaaaactaaggagataatcatgctgcatattgttctgcatgagccggaaatgccggccaacaccggaaatatcggaaggacatgcgtcgcctgcggtgcggtcctgcatctgattgaaccgctgggatttaagctgaatgaaaagatgatcaaaagggcaggattggattactgggagcatctggatgtgaggacttatgtgaatttccaggaattcttggacaagaaccaggaccccaggatctatatggctactacaaagtccagacagacttatgcagatgtcacttatgaaggggcagacgaagacgtctatctggtgtttggaaaagagagcgccggaataccggaagagattttgcttgattataaagagaccgcagtccggataccgatgcttccagaaatccgttccctgaatctgtccaattccgtggcaattgtagcctacgaggtgttaaggcagcagggattcgaccatttccagagagagggtcagttgcaccattatgagtggtagcggataaagagaggtatcatgagagagagaatgagttttaaggagatccgtgcgttttcaaaggagaagcttaaagaaaatttaaaagttttagttatcattgagttcattgtagttgttatctgtgtagggctgctgacttggcaggagggaattgatttaatgtttccctcttccattctatcgctggtgatgcagattgtcatttatgggctgctggctgttttctttacaggaaatgtcgttgcgtgtctaggggtatctaagggccaggagcctaaggtagatcaggtcttttacttgttcagaaataagacgaaacaggttttatggctgattgttagaaaaaatattataacatttctgattatgtttatcatagatttttttggaggtgttgtgtactattcagcaacaaacgaggattttccatatatgatgacaatcgcgagtgtgctggctacagttattgttgaactgagatattttccggctctgtatctgctgctggaaggggaagaacaggtatgccggaaggcaatatggcgtggaaacgatttgatgcgcgggaattatatgagattaatgggtctctggatttcgtttgttccatggatgctgctcggcttgattccctgcggactgggagtatttgttgtagctccctggttccagatcagtctggctgtattttatacggatttaaagaggaaggaaataataaaggattagaaggagattatttatatggcaaaagaaaagaagcttgtggaagccatcacagcaatggatgaggacttcgcacagtggtatacagatgttgttaaaaaagcagaattgatcgaatattccagcgtaaaaggctgtatgatcctgcgtcccaacggctatgccatttgggaaaatattcagaaggtactggattcccagttcaaagaaaccggagtggaaaatgtggcgatgccgatgtttattccggaaagccttttggagagagaaaaagatcacgtggagggctttgcgccggaagtggcatgggttactcacgggggaaataaaaagctggaagagcgcctttgtgtgcgtccgacttcagagactttattctgtgacttctattctaatatcattcagtcttacagagacctgccgaagttatataaccagtgggtgtccgtagtacgctgggagaagagtaccaggccgtttctgcgcacttctgaattttactggcaggaaggacatacagcccacgctactgctgacgaggcagaggagcgcacggtccagatgttaaatatgtatgctgatttctgtgagcagtacctggcgattccggttgtcaaaggacagaagacagagaaagaaaagtttgcaggagccaatgccacctatacgatcgaggcgctgatgcacgatggaaaagcacttcagtccggtaccagccataacttcggggacggatttgccaaggcatttgatatccagtatactgacaagaacaataaactgcagtatgtgcaccagacttcatggggaatgtccacccgtatcatcggagccatcatcatggtccacggagatgattcaggacttgtgcttcctccgaaaatcgcgccggtgcagactatgatcgtgccaattatgcagaaaaaagaaggggtgcttgagaaagcggaagagatccgggcacgtctttctaagaactataaagttaaggttgatgattctgacaagagtccgggatggaagtttagtgaacaggaagtacagggaattccgaccaggatcgagatcggaccaaaagatatcgagaaaaaccaggcagtcattgtgcgccgtgacacaagagaaaagatcattgtctctcttgacgagatcgagacaaaactttcagaggtgcttggccagatgcagagcgatatgcttgagcgtgctaaaaagcatttagaggcgaacacccatgaggcggcagactgggatgaattcaaagagatcatcgacaaacagcagggctttgtaaaagctatgtggtgtggagagacggagtgtgaggaagctatcaaggatgagaccggtgctaccacacgctgtatgccgtttgaacaggaacatctgggtgacgtatgtgtgcactgcggaaaacctgccaagaagatggttcttttcggtaaagcatattaaaggaaatttatgtttaaaatagtgatacctgaaaaagcaaaacaaatcataaatcagctggaacaggccggctacgaagcatatgtcgtaggcggcccggtccgggactgcattttgggcaagtgtcctatggattgggacatcaccacatccgcatctccttaccaagtaaaggagattttttcatataccattgacaccgggattgcccacggcactgtcacagtcatgatggacagagaaccgtttgaggtgaccacttaccgggtggacggagaatataaggaccacagaagaccggaggaggtctgttttacaaaatctttaaaagaagatcttctaagacgggatttcacgatcaacgccatggcatataatgatagggatgggctgatcgactactatggaggtgtggaggatctgaaacgtaaggtcatccgctgcgtgggtcaggcttccaaacgttttgatgaggatgccctgaggatcttaagagccctgcggtttcaggcacagctgggatttaccattgaggatcagacaaagcaggcagtcagagagcaggccaaatacttaaaggacatcagcgcagagcggatccaggtagagcttaccaagcttcttttgtccaaacatccggaaacaatcctggatgcatatgaactgggagtcacaagcgtggtactgcctgaatttgaccggatgatggagactccccagaataacccccatcatcgttacagcgtaggggttcacacggtagaggcattaaagaatgctgaggcggaccatattctgcgctggacgatgctcctccacgatgtgggaaaaccagatgccagagtggagggaccggacaaagaccggttccaaggacatcacgtgatcggtgaggagatggccagaaagattctaaggcggttgaagttcgacaatcagacagtgaagcaggtgacaaaactggtctactggcatgatattcggttcggctctgcaaaggaagtgaacaaaaggacggtgagaaggtgggcaagcaagctttctgtcccgttgtttgaaaagcttttaaaggtccagcaggcagatatcctggcccagagcagttttatgctggaggaaaagcaggagattcttgaccgcaccgcagtgctgtttgaggagatcaaaaaggaaaaggattgtctaaaggtaaaggatcttgcccttgacggaaaggatctgatcagccttggcatgaaacctggaaaagaattgggtgaaatgctcaatgaacttttggagcttgtactggatgatcccggcaaaaacagcagggagatactcacgcaggctgtgaaggagaaaagaggaaagcaatgattctcattttgataccagtttttgttcttttatacttgtatatgatttatccgggaaagttaagaaagcatccggtgctggagacgaaatactttgcgcaccgggggctgcacgggtttgacggtattccggaaaactccatgaaagctttccagaacgcggtggatcatgggtatgggatcgaactggatgtacagcttaccaaagatgacgtgatggtggtccatcatgattatgacattaagagaacctgcggtgtcaacaaaaaaatccgggatctgacctatgagcagctgagaagatatccgttgatggaaacgaaagagcgtattccaagatttgtggatgtgctggaaatggttcacggacaggttccccttttggtagagttaaaaatggagcactgtgaccggaagctgtgccggctgtcggcggaggcgctggaccgttatcacggcctttactgtatggagtccttccatccctatgcactgttttggttccggatgaaccggccggaagtgatcagaggacagctgtcaatgaatttcagaaaggatcagcacaagggcaatcagctggcctactgggcagaacagaaacttttgaccaattttgccacgaaaccggactttattgcatataaatatatttactgggatgaaccatcgctgaggctgtgccgcaggatatccggcatccctgtctatggatggaccttccggaacaaaaaagagtatgagaaataccgtaaaaagttttatggatatatttttgaaaagtttctaccttaaaggtatgatataatgtcaccatgatgaaaaggagatgtaagacagatatgaagaagaatgtcgctgtaattttcgggggtagatcctccgaacatgaagtgtcctgtgtttcggctgctacagtcatccggagcctggatgagaataaatataatgtgatcttagtggggataacaagaggcggccgatggctgcttgtggataaactcaaggacatcgaggacggaagctggagagaatccaaagtgaatgcggtcatttctccggatacacaggatcaggctctcgtactcctggcggaggggacttaccgtctccagccggtggatgtgatctttccggttctgcacggcttaaacggagaggacggaacgatccagggattgtttgagatggcgcagattccatatgtgggctgcggggttcttgcctcagcggtttccatggataaggtctacacaaagattatagtggaggatctggggatccgccaggcagagtttgtacacatccggagaagtgatctggcccggatggaagagacccttgacagagcggaggcaaagctttcctatcccatgttcgtgaaaccttccagggcaggatcttctgtgggagtttccaaggcagagaacagggaagaactagctgctgcccttgtgaaggccgcagagcatgaccggaacattttggtggaagagaccattgtgggacgggaagtggaatgcgcggttcttggcggtaaagaggtcaaagcttccggcgtaggggagatccttgcggctgccgatttctatgattatgacgccaagtataacaatgcagagtccaagacagtcatcgatccgccgatgccggaggagacgagggaggagatccgcaagtcagcggcagagatctttaaggctgtggacggatacggtctttcccgtgtggatttctttattgcggataacggagaagtggtatttaatgagatcaatactctccctgggtttacttccatcagtatgtaccctatgttatgggcagcccagggaattgagacaccggcacttgcggatgagctgatccgtcttgcggaagaaaggtttgagtaataatgagcagcacacatgacaatgcacccatcggagtgtttgattcaggtgtgggaggtcttactgtggccagggagatcatgaggcagctcccggatgagagcctgatctactttggagacacggcgagagttccctatggaaccaaatcaaaggatacggtcatccggtattccagacagatcgtaaattttttattgagcaaaaatgtgaaagccatcgtggtagcctgtaatacggccagtgccctggctatgtcaaaacttcaaaaggaatatatcgtgcccatgatcggcatggtgaggcccggggccattgcggctaccagagccacaaagaaccagcacatcggtatcataggaaccaacgccaccataaagagcggccagtacggcaggtatttaagggagctgaatccggaggtgacggtcgtgaccaaagcctgtccgatgtttgtgcctctggtggaagaggggctcatcgatgacaggatcacggaggatatggtgtccaggtatctgagggaattcgaccagtatcatatcgattctctgatcctgggatgcacacattacccattgcttcaaaaccctattaagaattttgtaggggaaacggtgactctgatcaaccctgcctatgagactgcaaagtctctgaaggaactgttaaaagagcgcaaaattgccgcagaaagcggacacgccgcagaatatgaatactatgtcagtgacatggaagaccagtttctcacctttgcggaccgagtgctgccgtgtcatgtagaaaatgtacagccgattgatattgaaaaatattagaggagacaaatgaagaaagaagtaattataaatatttccggccttcagctggatgtcagctcggaggaacccatcgaattgatgactacaggggcttactatctgaaaaatggaaagcattatatcatgtatgatgagctgactgatgactctcagattgtaaagaaccggcttaagatcagtccgaaggttgtggaagtaacaaaaaagggagccagcagctcccatatggtttttgagcggggaaaagaaaacctcacttactacgatactccgttcggcagtcttttgcttggcatcaacaccagcaagattgaccttcaggagacagaggacagcatggccctgcatattgactatggtctatccatcaactcagatcatatttcagactgttccattgacgtatccattgcgtcgaaaaacacggaacacaaagactgcgcaaactgtacccagtaaaataccgccgaggacatcggtaggataatgtacatacaggtacagcctgctgaatgcgatcagcgctgccaggacaaaagctgggatccccagctttttgtcgtataagtacaaaaatactgccgcgccgaacgaggatgcggaatgtccggacggaaatgaatagcggccgggaggcgggatcagcagtttgatatcccggtaggtaaaaggtcttgccctgcctatcagaggtttgatgatctggtccccgatgatgttggcgattagcataacgatcagcatccccaggcctgcctttcggtatttttttgtaaacagaagaatgacggcaatcagaatccagacggtccctgcatcgcctaaatgggtgatccgggtaaagaaactgtccagaaacggagttctcatgtgcgtttggatgaagtctagtatttgaaaatccataactgctccttactttttttcttaaattatatcacaaaagatggcttcgtgttataatatcaaaatgaattacaacagatagaaggaataaaaatgattacactagttgcaaaccacatcggagtggatacctatctttggctccgcgaagccgtcggttttaaaaagctttcaaggactcaggcagttaaagcgctgaaaaacagtctatatgtagtagcggcctatgcggatgacagaatcgtgggcatgggacgtatcgtaggggacggagcagtgatctgctatattcaggatttgatgatacatccggactatcagagggccggcgtcggaagtaagctgatcgagaatctggctgcttttgtggaaagtatccgggaagacgatacggagatgatgctggatctgatgtgtgcaaaaggaagagaagccttttatgaggcacatggttttatggcccggccgaatcaggatctggggcctggcatgataaggtacttaaatgaaaggagagaatgaatagatggaagaaaaaaagtatgacccttatacaggggaagaaatcaaggagccagtggaggaggttggagaccaggcagagcaggcggcagtccagagcgaacctgtggcagagcagacggagtccgaaccatctcctgatacgatcgtagtgggggaaagcggatattattatcaggaagaaagacagcaggattatggatatcagcagaaccagacaggggcacaggcatatgcggctcaggaggaacctccgaaaaacaatcatgcgactgtttcacttgtgcttggcgttgtatccatcgcattggcatgctgctgttttcccgtagcttttgtgctgggaattgtggcagttgtcttgttttgtatttcacctaagtttatgggcaaaaaggacggaaaggccgttgcaggcctgatctgcggtatctgcggtattgttttgtccataatgatcactgtgtttgtggttgtaaatattgcaagcggtgactaccagaattatgtgaacaattatgacactcacagcaatgatgatgacgatgatgacttctgggatgatacggatgacacaaattccgatgatgtgaatacaagtgacaactggaatgaagatgtctaaatgatggataagatatggacactgatcccggccttcccctgcgtttttaaaatggtcacgcatctttattgtccggcctgcggaggcaccagggcggctctcgcctttatacagatggattttgttacttcactgaaatgcaatcctatttttatgtatttggtgttggttggaggctgggttggtattggtgccctgatccgaaaggctgggaggggtaccggaagttttttccgtttccgcatgtggatgctgtatgtgggtttggtcctgttttttggatttggaatcttgagggacataggactgtatttttatcactatgattatttgggagatttttattagagcagagataaattccggagctgaaagacagtttccggaatttttaattaagtgtaagtgttttgtattatatggttgctggatactgtgaccggattttaagattggaatagtggtataattttatgaggaaggggtggtaccatgcagaaaaaaagcctgatcagccatatttgctgggtgtttgtgtttctaatcctgtgttatggatttagatatatcgatgcttttttgagaaatgggtttttagtcaaaagacagctaaactatatttccatcgtcatgacagcagagccattgatgtatctgatcttgggtgtaatgctgggactgctgcttttgatcagtatgagttacaatgtctccagacggcagatggtaagtgaactgttgattgcagaaattccggttttattttctgtgttgaatgaactggtgagggacctaatggtgaatcatggatttatggtgaacagagttatcaacaggtcattctcttcagcacgatggatcgcagttccatacattttgtttttgtatatatgtagaataaaatatttacatagggtgggaagataaagagaaggcagaagaagcaaggatcaaagatttgctttttctgccttccacttttatatggtatcctcccactgttcaaagtcagggaccgacagcggttttgaaaaataataaccctggacagtttcgcagtggacactctcaaggatctggatttgttcctgtgtctctattccctcagctacaagctggattcccagtttatttgctatttcgataaaaccagagataagatgtacagcttttacatttgtcatatctgcaaagaactggcggtccaattttacggtatctatgtcaaagtccttcaacagggcaagtgtggaaaaaccaacgccaaaatcgtccagggcacattggaatccaagcctgtgcatctctgtgatacagttctttaccagcttccgctgttgttcatccagaaaactgtattcggtcaattcaaactcaatgatcccgtcgggtatttgatacttcttcttgatctctgaaaattttcttagaaaattgagatttttaaaatgtgcccgggacagattgacggatataggaaacagcgccttctgtcgtttgatacgggcttgcaggtaaatacagacttcttcaaacacataaagatcaagcctgcatattttatcgttttcttcaaagagaggtataaaatcaccaggacagatcattcctttctccggatgaatccatctggccaacgcctcggctccggttattgtccggtcagacaaccggatcttgggctggagatagacctgaaaataacggtttttaatagaactttcaaaaagagagttcagctcatattctatccgtagttgttttgccataccaggatggtagatataacagggaccagcaccatcctgtttccggcaggcactcctggcccggtcctgtacgatggtgacatctaaacttggatcatccaccagatagatgccatataaaagtgtgagttcatattctatatcagtaatcttgttaaaagaattaatatccgcagacaaatccagaagacggcgtgtgatgttctgggcgctgtgttccttgagacagaggaaaaaacagtccgagttatctctggctgcggtctcgccggtgcggataaagtgctccagtttactggatacgtactttaaggtggcatttccggcggaagatccaaaattttcgttgatcagcttaaagccttttatattcataaatacaacggcatatgttcctgctttcatatgggcggccagtttttcatatgccaggcaaaacgctgcctcattcatgccgccggtcaacgggtccgtcaatgcagcggttttaagctgtctgaatcttgatctgtaatacaggactagtgacacgaaaacagaacatattatcactgtctttagtttgaaagtgcttgagatcataagaaaactaagagaaaccaacacaatccaaacgcaggcagaccggattttaagaaaagcaaaagctcctttatcccttacgattcttttgttatttttcatccttatcactccattcataaccccttctaataaaaaaataatatcattgtttcataggtccagcaataaataatctgcgtacgtatacaaatagcttgttggaactttttgattattgtataatttattgaaatcagactaaagggaggcggaacgtatgaaacaaaagcagacattgtttaactatgtataccagaatttgaaagagcagatcctttccgggcgtttgcagcacggggaaaagcttccgtctatgagccgcctttgcgaattttaccatgtgggaatacgcacagtgaaggatgtgctgctccgtctgaaagaagaaggctacatccaaaccgaggagagaaaggctgctgttgtcatttacaggcaggctggaacagatgctgcggtccggtttgttctggaacggaagacctcaatcctcgcggttcatcagaccattgccgttcttgtgccgccgatcttatctttttgtgcccaacattacagtaaaaaagatttggattccatgttccggaggcatatgaatacaaaaaaacaaagtccggaagaaaaggggcgtatttgtgtcaattgtatttatgaaatgatggaccactcagagaatcttttactccgtgatttattcgcaagtcttgaaatctatgcgcggatgccgttcttccagaactatgagcattttgtagagctagtgttgaaatacaatgaatttcacagtattgaatgggtgctggaggcgtttgcggcaaatgagccggcagagattgtctcccggttccgcttgctgtttcagtctgtcgtaccggctgtgggccagtttatggaggaattatccgagcagtgcgttaatatacctgaggacccggtttatggttacagatgggcagctgactgtggaagggatcattattatatgcagattacccgggatctcattgataaaatcgggacaggcagatacaaagaagggacattcctgccgccagaggcacagcttgccagtcagtacggtgtctgtgttgcaactatgcgcaatgcgctttccatgctgaatgagctgggattcggacagacgatgaatgcaaaggggacaagagtcattctgcagaacgatgattcagctgcgcagtgtctcagaaataaagcttttcaaagagacactttggtctatctcagcggtctgcagctcatggccattgccataaagcccgccgcggtcatggcttttgacagaatgaaagaagagggaacacagtatatccaggatcggctgggagaccctgaattcattttgctggacgggctggtccgctgtgtggtaaggaacctggaactggatccgttaaagatgatccttaaagagacaggaaatctccttcactggggttattacttttcttttttcaatgagggtatgtcgggcactgacctgctcacattaaagagcctaaaagcctatgagaagttgaagcacggaagcgcagaagaatttggagagcatatgtctttgtgcttctgccatatccttgattttgtacgagatcacatggtgaaatttggactaagcaaagccgcaagactgatcagccctaaagaatcattggaagagggatgaagaaaattccaatttcctattgactttatatgaaattatccttataatacaacacaacaattcatagtaatcatataggaaataaggagaagcgccatgtatcagaaaaaaaccaggaatgaaagaaatttgaaatttgagacattacagctgcatgtggggcaggaacaggcagatccggcaacggatgccagggccgttcccatctatcagacatcttcctatgtgtttcacaacagtgaacatgcggaggcgagatttaacctgagtgatgcagggaatatttatggaaggctgacaaatcccacacaggatgtgtttgagcagcgtgtggctgcattagagggaggagtggcagctctggccacagcatcaggtgcggcggccattacatatactttccagaatctcgcacgaaacggcgaccatatcgtctcagcaaaaaatatttacggaggaagctataatcttctggcccacactctgcccgagttcggagttaagacaacgtttgtggacatttttgaagacggggcagtggaagcggctataaaggaaaatacaaaggccgtatttatcgagaccctgggcaatccccactctgatgtggcggatatcgaggccttggctgagattgctcataagcataagatccctctggtcattgacaatacattcgggacaccgtatctgatccggcctattgaattcggagctgacattgtggtccattctgccaccaagttcatcggcggccacggcacagccatcggaggggtcatcgtagacagcggaaattttgactgggaggcttctggaaagttcccgttccttacagaaccaaacgaaagctatcacgggatcagctttacccaggcggtcggcaaagcagcgtttgtcacaaggatccgcgctgtattgctgagagatatgggagccaccctgtcaccattccatgcttttttgttcctgcagggattggagacactgtcactgagagtggagagacatgtagaaaacgctttaagaactgcttcctttttaaatgatcatccacaggtggaagcagtccaccacccgtctcttacccaggatgtaaggcaaaaggagttatatcaaaagtattttccaaacggcggcggttccatctttacttttgagatcaagggagacgcacagacagctaagacatttatagacaatttggaaatcttttctttactggccaatgttgctgacgtaaaatctctggcaatccatccggcatccaccacccattcacagctgaatgaggaagaactgaaggaacagggattgaaaccaaataccatcaggctttctattggaacagagaacatagacgatatcctggaagacttaagcgaggcttttaaagcagtcagagaatagaagggtttagcaaagcagcgtctgaaatggcgttgcttttctttgttccataggaaagttccccctatggaacaaaaaagccctacgggcactatgcacacaaatgcgtaaggaaactatttgactacgtcaaatcgcatttggcgctcaaagttgtcaagcccctcaaagagtgaggggttggggagatgaagtgggattgcctactttgttctagagtagacaggaaaattctaacatgataaaattgctttaatgtattacagggataaaggagaagcagatgaaaatatcagagttactaaaagaaaaagcaaccatatcgtttgaagtatttccgccgaaaaataaggaaggagatatttcatccatctatcataccattggggagcttaaaaagcttaaccctgattttatcagtgttacttacggagcagggggctcctccaaaggaaagaccgtggagatcgcctcagccataaaaaaccaatatcagatcgaatctgtggcccacttaagctgtatcacatccaccaaagaagatgtcctcacagaatgccgggctttaaaggagcaccatgtggacaacatcctggccctgcggggtgattatccagccggggaagaagagaaataccgggaaaaggagatggaatttcattacgcaagcgaactgaaccagttcattaaggaaaacttcggggacacgttctgtctttccggtgcatgttatcctgagattcaccaggaggccgactgctttcaggatgaccttcaggcactgaaaaagaaggtggatgccggcgcagaatatctgatcacgcagatattttttgacaacaattattactaccggctgataaaagaggcaagaaagatcggcatcacagttccgatccttgcagggatcatgccagtgaccaacgccaaatcccttctccggacagcaaagctgtgcggatgttccatcccgttccagctgtcaactatgatcgagacttattacaactacccggaggccatgaaagagatcgggatcaactatgcggcccaccagatcatcgatctgatcacaaacggcgtggatggtattcatatttatacaatgaacaggccggagattgcgcagagaattttcgccaatattcctacggtcttaaaagagctgaaccatgattaaagaaacggcactgaaatatctgggccatacaggacagaatattacagaggatatggaaaggctgctggacgagtgcgtaaaagaggtaaggcaggtttcacagcctaaggtcatttcaaagcggtttgacttgtcggcagagcctcttaagatcaaagatctggatctttgtcttccgggggagcagttaaaggatgctttcgcccaatgcacccactgcctgctgcttggagccacgcttgggatcactctggagaggaagatcaaatactacggaaaaatcaacatgaccaaggcggctgtgatggacgcagtgagcagcgcttatctggaggaatactgtgatgagtatgaggagggactcggataccccaacagaacgttccggctctgtcctgggtacggcgatatccctctgtccttcaaccgggaaatcgcaagggccctggatattggaaagagacttggaatcactctgacaccggacaatttgatgatcccccagaagtccatgcttggacttatcgggatcggggcgccaaagcgaaagaaacagtgcggacagtgtgtaatgagagaagactgtccgtttagaaagagaggccagagatgttactagatagaatcggaagagagttattactatttgacggagccatgggaactcagctccaggaagcgggactgaaggcaggagatatcccagaagaattaaatatcgaacagccggaactgatccggtccatccatgagagatatcttaacgccggagctgattttatcaccaccaatacgttcggatgcaataaactgaaaatggaggagtccaaatacagctttcaggacatgcttaaggcagccacagccaatgccagacaggccagggaaaacgcaggccgtgaagaggatgcctatattgttctggacatcgggcccatcgggcagctgctggagcccatggggactcttacatttgatgaggcatatgacatcattcttgcacaggtggaggcggtgaaggaggatgtggatgcggttctgtttgagactatgagcgatctgtatgaggtgaaagccgggatactggcagtaaaggaaaacacatccctgccggtttttgtgaccatgacctttgagtcaaacgggcggaccttatccggaaacgaccctgtcacctttgtgaataccgtgcagggactgggagccgatgttctgggcgtgaactgctccctggggccggcggagcttggaccgatcattgaggaaattttaagcgctgcatccataccagtgatgatccagcccaatgcaggacttccctgcctggaacacggggagacacactaccatgtgagcagccaggaatatgctcagctcatgcagggttacctgaaagacggcgtttccatagcgggcggttgctgcgggaccacgccggagtttatccaaaagctgaaagagacagctccgttaaaggcagctccccgaaagattgtaaaaaagaccagggtgtccagccagacaaaaacagtgacctttggggagcgggttattgtctgcggagagaggttaaaccctacaggaaagaaaaaactgaagctggccttaaaggaagaacggtacgatgagcttgtgacggaggccatcaaacaggatgaggcaggggccgatgtgctggatgtcaacgtggggctgccgggcatcgacgaaccagccaccatgaagcatgtggtcaggcttcttcaggaggtcatcacactgccgctgcagatcgacagttccaacgcagatgccattgaactggcatgccgttactacaacggaaaaccactgatcaactccgtcaatggcaaggatgaagttatggaagccattttcccgattgtaaaaaaatatgggggagtggtcatcggtcttacgttagacgagggaatcccgttaaaagcagaggagaggtttgccattgcacaaaagatcattgcgaaagcgacggaatacggcatcggcaaagaggatatcatcattgactgcctgaccctgacagcttcagcccagcaaaaggaagtcaaagagacattaagggcgatcgagatggtaaaagagctgggggtccacacagtcctgggtgtatccaatgtatccttcggactgcccaaccggcctcttttaaatcggacatttcttaccatggcaatgcaggctgggctggaccttccgatcatcaatccgctggaccgggagcttatgagcaccattgatgcattccatgtgctgttttacaaggacattgatagtgagcggtatattttaaatcagtctgatgccgtgcagatgaagtcggagactaagacagaatttactcttcacgatattatcatccatgggttaaaggatgaggtggaggcaaagacaaaggaagaactccagaatacagaacctttggaactgatcaacaaagtcatcattccggccctgaatgtggtgggcaaggattatgagaccggaaagatttttctgcctcagctgatccagtcagcagagacgaccaaaaaagcctttgaggcggtaaaacagtgcttcagcggcagcgcggaccaggagaaagggcctgtgctcatggccactgtggagggagacatccacgacatcggcaaaaatattgtcaaagtggtgctggagagctatgggtaccgtatcattgatctgggaaaggacgttaaagttgaaaaagtggtggaggcatggcataagtaccagcccaaagctataggcctcagcgcgctgatgacgaccacagtcctttccatggaaaggaccatcgaaagtcttagaaaggaacagtgcacctgcccgatctgggtagggggagcggtgcttacagaagacattgccaagaatatcggagcggattattatgcggaggacgccatggcgtccgtggcgcttctagaaaaacttatatgacatgttctacctgatttccgttcgtctcttagaatgcctcactccaatcatgtagaacatggacgtagtgtctgccagatagtattaaattaggagaatttcagtgagtgataaaagtcaaaagaagaaagagaatttcagatatgctgtggcgaaatccgttccggttttcttcggatatatctttttagggatcgcctttgggatccttatggccaaggccggttacgggccgctctggactctgggagccagcctgtttatctatgcgggatctatgcagtttgtcttagtgtcctttctggcagccggagcgcctctgggccttgtggccctgactacgctgttcatcaatggaagacatattttttacgggttatcctttgtggaccgttttaaaaagatggggaaatattacccctacatggtcttttccctgaccgatgagacctactctgtcctttgttcctgtccggaagaaaaagtagagcaggaaccccggatcttattctggatctcggctctggaccagagctattgggccgccggctcccttattggggcgttagccggaggactgctcccctttgactttcaagggattgagttttccatgaccgcactgttcctggtgatttttctggaccagtggaaaggttcaaatggacacagcccggcaatcgcaggactggctgtgtccgctttctttttggtactgctgggtccaaaccggtttctgctgcctgcgctgctggtcatcgctgcggtgatgtgcattggatatatcagagaggagagaaagagatcttgaacaatattgtttatggaatctgcatcatggcagtagtggcatttgtgactgtttttacaagggttcttccctttgctttgttcggcgggaaaaagggtatgccgaaaatgatcggttatctggggagggtgctgccggcagccatcattgcggcgcttgttgtgtactgctttaaagagctggtcgtccaggcggcttcagacagactgtgcagtctggcggcgggagccgcagtggtttttctgcatctttggaagagaaataccttgttaagtattgcgggcgggacaattttatatatgcttctgatccgcctataaatggaaaagctgtgacttgcgaaacttggacaaataagatataataagtgtgatgtgaaaaaaataacaattcattaaagaattatggaggatttatcatgttagtatcagcaaaagagatgttgaccaaggcaaaagccggacagtatgctgttggacagtttaacatcaataatctggagtggacaaaggccatcttattggcagcagaagagacaagatccccggtgatcttaggtgtctctgaaggtgccggaaaatatatgacaggatacaagacagtggttggaatggtaaacggaatgttagaaggactaaacatttctgtaccggttgcccttcatttagatcatggttcttacgaaggatgtaaagcatgcatcgaagcaggattttcatctgttatgtttgacggatctcactatccgatcgaagagaatgtagaaaagacaacagaacttgtgaaagttacaaaaggaaaaggaatgtccatcgaagctgaagtaggttctattggcggagaagaagacggagtcatcggaaaaggtgaatgtgcagatccagaagagtgtaaagcagttgcagacttaggtgtcacaatgcttgcggcaggtatcggaaacatccacggtaaatatcctgaaaactgggaaggcttaagctttgagacattggatgccatccagaagctcacaggagacatgccgttagtacttcacggcggtacaggaatccctgatgatatgatcaaacaggcaatttctctgggagttgcaaagatcaacgtcaacacagagtgccagctggcatttgctgaagctacacgtggatacatcgaagctggaaaggatcaggaaggaaaaggatttgatcctcgtaaattacttgctcctggtacagacgcgatcaaagacatggtaatcacaaagatcaaattattcggatctgaaggaaaagcagacgaatagatctcaataaaacagattgtacttgcatagctggattcaggctatgaaattgtgaggagaacatcccggatgaagggggtgttcttctttttacgtctaggggcagaaaacatcaatatgttccgtcatatatttgtatttttgtcgcaaaagctagtataatataaaaaaagtgaggatcacaggaaaggacaaacagttatggatatactggtaaatctcctggccgctcttgagatgctggctgtcaacttgagcgtgaccaatttctgctctacaagaaaatattctctaaaatggactgtgtttgtactggtggctttttctgtgccagtgattactgtcacctacacaggactttccagagggagaggtttcgggaatggaaacgggatgtttgcgctgactgggattctgtatctgatccctctaaattatttgtatcgagagacggtaaagaggatcatcagtattgcctgttcgtcatggatctatacgatgctgatcttctccatctcggtcctcactggaaagatggctgggacaaaagatctggccgccacggttctggcagtccagacagctctctatctggtcacagtcacattatttatctcatggattaaaaaacggctgatgagggtgctgcagatcatgaaagacggcacaaaaaacatatttttggtcttcagcctgggctggttttttacagtcgtcttatttaatgtgcattttacgtatccccagaacggcatcttgaaactattatgtctgctggctctgacattgaatgtaagcctgaactttgtgattatttattatcttgtggtaaacagcaaaagcatcagtgacctgaaagagatcgcatatacggacagcctgacaggattaaaaaaccggaacagcctgttccaggatgcggaggaaatgatccacaaggatcagaggttcagcctgatttttattgacctggaccggtttaagcaggtcaatgatctgtacggacatttggccggtgacggatacatctgcgagtttgccagaagaaccgggcggctcctgagaaaccagggcactttctaccgtatgtccggggacgagttcatctgtctttttacagatggggatcccagagaattcatgaagaagctttcacagctcagctacagtgtatcggactgctacattccgtttaaagggtgcagtgcaggcagagctgattttcctgaggacggcagatccctggacaagctgatctccctggcggacacgaagatgtaccggaataagcagaaacaccagcctagttgagtattttcctcgattatatttgttgacaaagaattgtcgccgtattatagtattcctataaaggaacacgaatggaggcgcagaatggaaaatgttgaatgcctgatgaatttcgggctgaccagacaggaagcgaacctctatgttcttctggtcttggaaggggagctcaatggatacgaggcagccaagaaaagcgggatctcccggtctaatacctacaacgcattagccggactcgtggaaaaaggggcggcttatatgtctgaggaagacacggtaaagtaccaggcagtcccggtagaagaattctgcgaaaacaggcttcgggatcttaccaggagcaaagaagagctggtggccaaacttccaaaacagaggatgaataagggagcgtatctgacggtcaaaggggaaaaacagatcctcgataagtttaccaatatgctgctggagacaagggagcgggtctatgtgtccgcctccaatgaaaagcttacaatgttccggccgtattttgcagatcttgttggccgggggatcaaggttgtgatcatcacaaatgaaccctttgaactggagggagccatcatctacctgacagagcgcaagaaggagcagattcgtctgatcacggattccacctacgtgctgaccggcgatctggtggaccagtacaatgctgcctgtctatattccagcaatcataatctggcggaggtatttaaggacgctctggccaatgagataaaactattagagatcaagaaagggaattaataaaatgggaaaaaaaccgtttgtaacaaaagagcagctagacaacatcgtaaaagagtatccgacaccatttcacctgtatgatgaaaagggaatccgggaaacagccagaaacctgaataaggcgttttcatggaacaaaggatttaaagaatattttgcagtgaaggcaactccgaacccaacgatcctgaaaatcttaagagaggaaggatgcggaacggactgctcttctctcacagagcttatgatgtctgaccgctgtggatttcagggaaatgagatcatgttttcatccaatgacactccggcggaggagtttgtgctggctaagaagctgggggcaacgatcaatctggacgatatcacacatattgaattcttaaaagaggcagcggggatccctgaagtgatttcctgccgttacaatccgggaggagtgttctctctgggcactgatatcatggataacccgggggatgccaagtacggcatgaccaggccgcagatgacagaggcatttttgaagttaaaggaactgggagtgaaggagtttggaattcattcatttttagcaagcaacacagtgacaaacgaatattacccggcccttgcaaagcagctgtttgaactggcagtggaactgcagaaagagacaggagtccacattggattcattaacctgtcaggcggcgtgggagttccgtatcttccggaccaggaaggcaatgacattgcggtgatcggagaaggagtccataaggcatttgatgaagttcttgtaccggcaggcatgggcgatgtgaagatctttacggagctgggacgttatatgctggcaccaaacggacatctggtgacaaaggccattcatgaaaagcatacccacaaagagtatatcggggtagatgcctgcgcggtcaatctcatgcgtccggctatgtatggagcatatcaccatatcacggtcatgggaaaagaggatcagccttgtgaccacatgtatgatgtaactggttctttgtgtgagaacaacgacaagttcgccattgaccggatgcttccgaagattgataagggagatgtgctggtgatccacgatacaggtgctcatggatttgccatgggatacaattataatgggaagctaaaatcagcggagattcttatgaaggaagacggaagtacagaaatgatccggagagccgagacaccagaagattactttgctactattgaaggatttaatttttaagaataattatatataagggaggcacattctgtacacaataagacagaatgtgccttctttttctacatatgtggaaaacttttggcatagattgcctggttgtggatatgctacactttttgtatcaccagaattatcttgaatgaacgatacagaagaaagggagagagcattgctgacggagagacaggtgcagttaatgaaatacttgcagggatgtgaggactatactacaacgggaaggctggctgaggtattccatgtcagcagcagatccatacgcaacgacctggatgctatccaatattttctaaaggggatgcctgtggagatcgagaggacgccccggcttggcattaaactgattatccagaaagggtttgatatcacgggtttgtattccaacaacgagatcaaagtatactccagggaggaaaggatcgtcatcattacagtgcttctcaccatatttgataagatgaccattgagcagctggcccaaaaactgcagatgagtaagaacaccattgtacaggatatacggcaggcagatgattttctctcacgccgcggcatcactctggtaaagaaatcatatttcgggctttccttaaagggagatgaggagcagatacggaacatgctttttaacctttacataaaaacggagagccaagggagtctgaacatcctggaggttctaagggaacacgccgtgattgatcccgaaaccggcaaaaggttgatacaccgcatggagcaggccatgggactcaagtttgtggatgagtctatcggggagctggagagtatgatcctggcatccctatgcaggatccaccacggttttcatgtggaggataaggaagcagagggtgagttggcggatgatccttatgcacaggcaatcttacaggaactgcaggatttttctctgacagagggagatctgcggtattttgcaatgctgtttcagagcaccaaacggatgaatggggagcttaagagggagagtgaggaagaccggaccatcatcaaggccacggagcttctcatccggcagttctgctgttatctgaagattggatgccgccttcagtcggatatccgcaaacagatcatgatgcatttaaaggtggcagtgttccggctgaaaaataagatcgagatccagaatcctcttttggaggatattaaatattcccactcctttatgtatgagatcaccgaacggcttttgaaggaacaggaggaaatgctgggtgtggtatttcctgaatcagagattgcctataccaccatgtattttgaagtgttgttccaggaaaatttcagcctaaagctatccccggaaatccttctcgtatgcggaggaggaacagctacagcggttctgctcaaacagaggctgcaggagtgttttcctgaactacaggtcaggaagatatgtcgtgccagcgacgtggaagaggagatcagaaaggccaggccggattttatcattagtaccgtgccgctgcatctggaaaaacaacaggtgatccaggtgaatcctcttctcaaccctccggatatcgacaagatcaaaaatatcatttccgtgctagtctataaccgcaaaaattcctatttggtccaccgcatccatcagacgatgaataaaggcatccgggagcttttgaaggaagaatactgccagtttgatgtggagacagatgactggagggaggccattgcaatcgccgcggctcccctgatcaaagacggccttgttgaaccttcctatgtggatgagatggtcagaacggtccagaacctggggaactacatggtctttatcccggagatcgcctttgtacatggaaaaaaagacaaggtcagagaaaactgtatcagctttttaaggcttcatcatgccatcgattttggaagcaaagcaaaggtggatgtgaaggtggtcattgtccttggcaatgtgacggagaatgaaaatctggcagacttggtaagaatccttgcacagggcgggaacatggagaagatcaagcagatcaactcttaccaggaacttgtctccctcagggaagatgcagaggaggagctatgatttacgcagagatcatggacggtgccgccctgtacacagaggcgattcaaagaagctgtgatgttctggaacagcatggcattgtcacaaaacagtattatcagggcatcttaagcagtattagtcagtacgggggctatttttatctgggagaaggggtctgcatgccccatgccaagccggaggacggagtactggcatccggtctttgtattgtaaagctcaatacaccggtagattttgaggggaaaaaggttcatattttttttactctggctgccagagacgagagttcccattacacactgatgaagcagattgccggggtctgttcaaagaaacagagcttaaggaagatgctggggtcaaggacgcgggaggagatgcttaagattatggaggaaaaactatgaaaaggatcatgacagtctgcgggacagggcttgggtccagctttcttgtagagatgaacattcaaaagatactctgggagatgggaaaggagacagagtttgagacctgtcattcatcagtttatgagatgagtgccatggacgcagactattttatcgtagcaaatgatctaaaagacagcattccacctgtggggcacctgatcgtgctggaatcgctgatcgatgaagaggaactgagagaaaaactgacaacagtcttgctgtcaagataaaagagggatcgatatgctgaaaatgctgaaagaccttgtactggagccggccattgtagtgggaggcattgtgtttttaggcctggtgctgcagagaaagagcctggaggcaacggtgaagggaacactgaaatcggccattgggtttatggtcatacggattggagggaatatcatcgccgaatgtgtggaaccgttcgggaaaatgttccaatacgcctttcatgtatccggtgtcatactgagcgtggaaggggccgccggcattgccgtgggcaggttcgggatggaaatatccctggtcatgctgcttggaatggcggtcaatcttctccttgccaggattaccagattccggtatgtgtttgtgacagggcaccagacgttgttcatggcctgtatgatcgtggtctccttaaaaggggcggacatggagggctggattttctatgccatcggagggctggctcttggtattgtcatggtgatctcaccggctattcttcagaagtatacaagggagatctgccataatgactctgtggccgtggggcatttcgggggaagtgcatattttctgtctgcatggctgggaaagatctatggggaaaattccaggtccacggaggagatgaaaataccaaaaaagctggcgtttctacgggattcttctgttactgtctccatcacgatgatactcatgtaccttgtggccgccgtggcgtgcggcagtgattttgtggaacagaatctgtcggaggggaaaaattatctggtctatgcaatcatccaggggctgacttttgccgttggattttctgtggtcatcaccggggtccgatggttcatcaatgagatcgtgccggctgtcaagggaattgccgacaactggatccccaatgccaaacccgccgtggacagtccggtggtgttcccctatgcgcccaatgcgctgattgtgggattcatctcgtcgtttttgggtggactcatttctttgggtattatgatggcatgcaatctgactataatcctgcccggtgtggtgcctcattttttctgcggggctacggcaggtgtgtacggcaattccaccggtggaaggcggggagcaatcttaggcgggtttttaaacggtgtcattatctcctttctgccggtcattttccttcctcatctgggatctttgtccgatgcatcggttacttttcctgatgctgacctgggctttgtaggtgcttttcttggggactggctgaaccggatcggcagctatgggacactgaccatcctgatcgggatcgtcatcatcatgatcctgatccctgaaatgatggatgacatggaggacagccaggaggattggttttcctttgatacagacaagattctggaggaatccaagatgtcacagaaaaaatagaagagaaagcgggaatctgggtttattcaggtttccgctttccgcaatactggaaaacaaatggtatggcggggatgtttgggtgccggtacactaaagatacatcaaaagaaaaggaggaagtattatgttaatttcagcaatcttggtggcgttgatcgccattggaagccagtggtggttcagccacacagtgacccgtacatggctgtatccgatctgggcaggatttcttgtggcagtcgttatgggggaaccagtcacaggaatgaaagccgccgcctatatccagcttacatatctgggatggatcaccgcaggggggaccatgccggggaacctaatggtagccggtgtcttcggaactgcactgactatcatctcaggggcatccccgaacctggcgccgacttttgcggtaccattcagtctgctgggcatcctgatcaaccaggcgtatatgaccattaatagtttctgggtacataaagcggaccagtatctggagaaaggcaacataagggggctcaggctgatgaactacctgccttccggtattaccgccacagtgctttacggtatcccggcctttgcccttgtgtatttcggaggggattttgccaccaacgcactgaaggcgattccggaaccgatgatcgatgcgctgaacgtggtgggagccttaatgccggcacttggaattgccatgctgctgagctttctcgggaaaaagaagatcgtggcctttttcttcatcggttatttcctgaccatctatgcaaaggttgataccatggctgtcacagtatttgcggcggcagtggcgatcctcatttatctgttcacaggaaaagcagagcagggacaggaggaaatacaggagacagaacttaacctggaggaagagaagcagactggttccaagaagcttctgaaaaaggatcttgtgaagcatttccttctgggctactccagtgagacctgttacaactatgagcgtctccaggcacttggaaccgccaatgctatggtgccgattgtgagaagactgtatgacaccaaggaaaagcaggcaaaagcactgaaaaagtacatggtattcttcaacactgaaccgtcatggatcggaaccgtgatccacggtgtcaccgcatccatggaggaacagtccgccaacggggcagacattgacgcggaggacatcaacgcagtccgtaccggtcttatggggcctatggctgggatcggagatacggtatcacagggaatcgcttacccgattttagccggtatcgcctgcagtcttgcattggcaggcaacatcgccggaccgattctgtttgagatcgcgtacaaggtgctcatgatcggtatgggttacgccatgtacatgatgggttataaacagggtaaaaatgcgatcgtgaaaatcttgagcgcaggtacgttaaaccgcatcacagaagctttcagtattgtgggattgatggtagttggaaatatggcggccacacgagtcaatatcaaaactccgattgcctttaaggttggggaagtagggatcaatcttcaaaatatcttaaactcccttcttccgggaatgctgccgctcattgcaactttgcttgtgtggaagcttctgagcaagaaagtgaaaccgacctatatcattgttattatttttgtagtcggtgtgatcacttccctgatcggtctgctggctgttgcgtaatcagaacaggaggaaaaaatggtaggagttttaatcatcagccatggaacgctgtgtaaaggtctggtagacagcgtatccatggtggcaggagacatagaacagtccaagtgtatttctctacttcccgggcaggagcccggggagttcagggaaacggtaacaaaagcactggaagcactggatacaggaatgggcgtgctggtgctcactgaccttttagggggcaccccgtttaataccatcgccatgttgagccaggaatatacggtatcggtcatcaccggtatgaacatggcaatggggatctgtacagcccttcagagagaggcggatatgtctcttgaagaactgtcaaatctcgccgaggcagcgggacacgacggtatcaaaaggctggggatacagaagagaggagcggcagaataaatgaaagcagtgagactgaataaaatcggggacttccgactggaggagacagagatcccggagataaaaggggaagaacttcttgtaaaagtggaggcctgcggcatctgtggttcggatcttccgagagtgtttgaactgggagcccatgtccatcccatcacaatcgggcatgagtttgcgggcactatcgtaaaagcagccagggatgaagaccaggagctggtagggaagactgccgccgttttcccgctgattccatgtaacgagtgtgagttctgcaagacagggcattatgcccagtgtgagaactataattacctcgggtcccggtgcgacggagggtttgcagaatactgcgtggtaccgtcccgttggaatctggtgttttcaaacagccccgatgtgaccaaagaagaattgagtcttgtagagccggcaacagtggcccagcatgcagtgcgcagatccaaagtgcaggcaggtcagagcatcgccatcttcggggcaggtcctattggaatcatgacagcccgttgggcggaactttttggagcagagaaagtcattctgtttgacatcagtgagcaaaaaatagattttgccagggagaggggactcaccatcgtaaattccatggaggaggacccgaaagaagcactgagacggatcctggggaccggctgtgtggacgttgtcatcgagggaaccggcacttcggcagcccttaaccaggcggtggagatcgtcagaacattcggaaggatcgctatgcttggaaatcctcatcaggataccttcctaaagcttggaaaccatagcagtatcctgagaaaagaggtggacatcgctggggtatggaattcttattatgcacagatgcccctcaatgaatggaagtatacggtccagatgatggacagagggaagttgaagacagacgatctgatcacccacgtatcagaccttgaccatctaagtgaactgtttacaaagatttaccggaaggagatcaccatctgtaaagcaatctacagctccagggcataaaggacggaggaaatcatgaaagagaacttttctgtttccctgatgtgtatggatttcttaaacatcagggagcagcttgaaatattaaatgaacaggttggtatgtatcatgtggatatcatggacggccactactgtaagaatatcaccctgtcaccggatatggtcaaagcatttaaaaaggtgtcaaaggtccctcttgacgtacaccttatgacaacaaatcctgaactttggattaacaccgtggcagaagccggggcagacatcatatccctgcatgcggaaaccatcaatgggcaggcgttccggctgtataaccagatccgggagctggggttgaaaaccggactggtactcaatccggcaaccccgctttcggaggcggcccattatctgggcaggattgacctgctgaccattatgaccgtggatgtgggatttgcggggcagccgtttattgaagagatgctggacaaaatagccgaggccaaaaggctgcgggaagaaaacggataccattaccgtatacagatcgacggttcctgcaagccgtccacatttaagagacttatggatgcgggggccgatgtgttgatactgggaagttccgggttgttcgggctggatcaggacttacatgaggcatgcaggaaaatgacggaaagctacaggaaggcactggaaggatcggaggtttcttgtggattataaagattacaaagagctgatcctgggggaacttgaccagtcactctccgcggtaaacggacaggaagtgcgggagatgacagaaatgatcctaaaagcagagaaagtatttgtgaccggagtggggagagtgtttatgatgatggaagcatttgcaaaacgtctgaatcatctgggaatcgaagcttactgtgtgggggatgtgaatgaacctgcagtcacaaaacatgatgtgctgatagccggctccggatccggggagagtatcatacccctggagcttgcgaaaaaggcaaaacagtatgggacatccgtcatccacatcggttccaatgcggaaagctccatgtcagcatatgaagatctgtttgtaaggattccatgcaggacaaaactgcaccttgaggatgaaatagaatcagcacagatcatgagcagcctgtttgagcagagtctgttgcttcttttggatgcggccgcgctgatgatcatgcaggagaagaagatcgaagatatagactccctttgggagaagcatgcgaatctggaataggaggaaaagaaaatggaacatttactattggcccgggtggacgaccgactgatccacggacaggtgatgacggcatggatgaagctgctgccggcaaaagaaatactcatcgcggatgacaaagtggcaaaggacccgtttatgacacaggtcctgacaatggcggcgcctgggggtgtgaaggtcaaggtctactccgtggaacaggcggcacaggcactgaaagaagggcttaaggccccttccattatgctggcaaagactccgctgacctacaaaaagatcatggatctgggagcagagataccggagatcaatatcggaggtatgggaatcagtggtgagcggaagacattatacaagaatatcgcagctgacccgcaggagagggatgccataaaagaatttatcaacaagggcatccaagtgaagatccaggtaattcctgcggataaagttgtcgatgtgtccggacttttataggacggggagggacagaaaatgaaagcaatgagactgcatgagatcgacagatttacgctggatgaggttgaaaagcccaaaccttcaggacgggaaattcttgtgagggttgaggcctgcggcatttgtggttcggacattccgcgggtgtatgaacttggcactaaggtttatcccgtgacgctgggacatgaatattcaggcacagttgtgagtgtcggggacgagcaggacacagatctgattggaaagacaggagcgatctatccagtagtaccatgtatgaaatgtcaaagctgcaggattggacagtatgcccagtgcagtaattataaaaatcttggttccaggaccgacggaggttttgcacagtactgtctgctcccgtcagcggaccacctggtgttcccaaagaatgaggacgtaccggcagagtggctggcgctgacggagcctgcctgtgtggcactgcatgctatccgaaagggagagatcaaaggcggggataccgtagtgatttttggcgcagggccaattgggatactcacagcgcgctggtgccgattatttgggattcaggctctgctggtagagatcgaccggaagaaaacagaatttgcgagggaaaagggactgacggtcatccacccggaggatggagaagttgaggagcaggtaagaaaactgaccggcaaaggcatggcagatgcggtcattgaggggaccggaagttctccggcactgaaccaggcagtagagtgtttaaaaccgtttggcatgctggtccttttgggcaatccccacaaggatactgttctggcgctggacagccacagccagattctccggaaggaattgagacttactggggtgtggaacaattattttaacgacctgccgtttaacgagtggcagtatacggttgacaggatcgcggacgggaggcttttggtggaggatctgataacacacaggtcggatcttacacatttgaaagaaatgtttgaccagatttataaaagagagatcaccatatgcaaggcgatctgtttgccggaagaatagcaggggatgtccattatgggaattctgacacctccggccagtaaaccggtaccgacaaaattactgacgggcagtgaaaaagatcagagaaagcttctgatcttttttatttgacatctatcaggatcaaatttacaataaaaaagatagaagaaaatatatccaagattctgggagaacagcaagatgaagaatgacagatttttaataaaggtagtggaattgtattatcaggatggtttgtcgcaggagaaaatagccaagaaactgaacacatcaaggactaccatatccaggacactgatcaaggcgaggaaagaaggatatgtccagatccacatcaattatcctgaccagagtgatttgaaactagaaaaacagatagaacagaaatttgatctgaaagaggcgctgatcgctgttccgggatgtgaccagaccgtggagcaggccgtttcatttcagaccgcagattttattatcagggtactgaaaaagaacatgacctttggcatgacctgggggagagctatgttccgttttgtagaacagctgaagattgatgcaaggatcagatctctttctttccagaatgtcaaagtcgtgccgttcctgggcacacccagcggcatcaacagcgactacaaatatacgatgacatactccaacacattggccacagaagtgggaggaattcttggatgcatcagctataacctgtcagctcccatgtccgtggaagatgaaaagacgaagcagatgatcgagagtatcggagagatctcaaatgtacttaagatggcagaacaagctgatatcgctttgtttggtatcggctccatgggcaaagactcctctatactgaaagccggtataaggacagaagccgaatacctggaattagtggagaggggaggcatcggagagattgtcggcaggatctatgatgctgagggaaatcctgtggaccaggaaatgaagaaaaagatgatcggaatctccctggaaagtatgaaaaaaatccccatccgtgtgggagtcgcatatggaaaagataagatagaggccattcagggcgctataaaagggcagattatcaatgtgctcatcacagatacagccactgcggaagctgttctgggctgagcagaaacagtgaggaggaaaagaacgtggcgcatattcctgtgtatggaaaagagcatacctttctggacgaaaaaaccgggctgctgtttcgcaactcccggtttcaagagacggcgtctatccacacccataccttttatgaattttttatcgttgcggggggcagtgccctgcatcttgtgaacgattccatacagaccattactcagggagacttaatctttatacgccctaaagacacccacagctatgagttctattattcccaggacttccggattgtgaacatcggattcagtgaacagctgtttttgaatgtcaggctgttcttagaccacacagtcatgctgcaggatatggtggacgcggagctgccgccatgtgtccatatggatgcagatgagaaaaaagagatcatcacccgttttgaggaaatcggatctcttatgaatggttcgtccgtgcagaaaacggttctctatgccaaaagctgccttgcagatatatttacaagatatttcttctcctacgatgcagaagaattaccggcggtcagctgtccttcctggttccagcctatgctggaggaaatgcagaagatcgacaatctaaggatcggttttcctaaaatgatcgaactgtccgcatgttcttccaatcatctgtgcagggtatttaagtcggttatgtccgtgacacccacagaatatatcaacagcaaacggctggaatattcggtctatcttctgacccagacttccaaggagatcatagagatcagtatgctttgcggattttcatccctgagccatttttaccatctgttcaaaaagaaataccaatgtcctccgtcaaaatttagaaagatgaatgggagagcaccgtcacagtgatgtctatcttggggcggtgcttcttaatttatcctcatatatctctttcagttcgtaaaaagcattcataaccacatctgggatctgcacctctgcaatataaccgcgtcccattggaccgtatccctcttcattattggataagcgggggacctcactcataagcagcgaaatatagtgatccatttcccacatgccccacaaagtgctgtcgctgaactgtaattctccgtcctgtactatcacctgattacggtaagatgcatagttgatcactttgatgctgggtgcgtatcttttaaagcccgcacacatacgccgctgcatagaagcgtcctgcatcaaaatgatatgtttagcatctatatggtgaagccgcagaatttctagtgcattggtcacattgtttccgcagttagtagagttacgttccagcaggatatcccggattccatatttttgtgtgatatagtcctgcatgatatccgcttccatcctgccttccacaggtatttcaggatatctggcatggaagcggctgcgcagggcatccgttgtatggccctctccgccgacgatcatcagccgggaggcagttccgttaaggaacccctccgccgctgtatcacatcctgcgggaatactgccgccgaataatattaagacgtcagcctgccggatcccataggtttcattcagagaaaccgaatccagatgttttatgtctcttatgccgcagaaatcagccagaatatttaggttcttcgctgttctttctaattctgctgtcatcattctcaggaatccagccccaggactacaggcactgatttatatcccacgcccattctgtcaattcccatgtcgatcagttgtaagaaatgctctcttgtacggatagacccgcttcccttgatcttacacttgtcaccaacctcgtccatcataagcttaatcacctccggtgtggcaccgtgcagctcaaagcctgtcaggaatccagtactggtctttacaaaatccacacccgcttcgatacagcactgacaggtctttttgatctgttcttctgtgagtgcatcggtctcaaaaatggctttcagttctttcccatgcttgtgtgcagcatccgcgcaggctttcagatcctcggtgactttgccgtattctccggaacggatccatccgaagtttgccaccacgtcaatctcctttacacattcataacgggccgcgatctcgatctgtgcaaccttggattctgtggcgcttgtgccgaacgggaagtctgtcaccgggcagagtcctgtattagttccttctacatatggtgtgcagagttcaatgtatccagggttgatgcagattgtggcacatccctgttttaccccgtcttttgtcagatcaatgatctgctcctctgtgaattccggcttcagcacggaatagtcaatgtaggctgccagttctttcactgtcatttcacttgcttttttagatatctttttcatgatttacctcctgaaagtgcttttgtttgtttctgtaattgtaatatatcatcgttccataagcttttcttgttttggaaatccaagtttttgtaatatattgatatctctaaaaaacttattattctcaatcccgacatatccgatcactcatatatattgtagaaaaaggtatctagaaaaagtttaaaagagatctccattttcttctatccaggttccgtttttctacagatttgaaagttttcttttattatttccaaaatcatcatcagcaataaaactataaataacaattgtccatgtgcagaattgctgaaaaaaatgaaaaagttttatggttattgacaacccatacaaacgaacgtacaatgtagaaaacgatcaatagaacaggaacatggtcaaatgaccaaagacatcagagaaaggaggacggagaaagtggaagacaatcgatttttgatcaaagtgtcagaattatattttaaggatggactgtcccaggaaaaaatagcaaaaaaactgaatgtgtcgaggactaccatctccagggcactggggaaagcaaagcaggaagggatcgtccggatccacattacatatcccgaatccagcaacatgatgatggaaaaagagatggaaaagagatttggactgaaggaggcactgatcgccgtacctgtggagggacagacatccgctcaggctgtggctggtcagactgcagactatgtcatccgggtcctcaagaagaatatgatcctgggagtgacctggggaagagctatgtatgagtttgtgaggcgtctaggcgaggatgaacggaccagggccctatcctaccggaatgtaaagatcgttcctttccttggaacacctagtgaggtggaccggaattataagtaccgtatgacttactctaatacactggccaccggcatcggggatattttaggctgtaccagctataatctgtcggcacctatgtttgtacaggatgagcaggctaaaaatatgattgagagcatcgatggagtttcaaaggtgttaaagattgcggagcagtcggatatcgccctgtttggcatcggctccataggagcggattcctcgatcataaaggcagggatgaggactggggaagaatatgaagaattgagaagacagggcggtgcgggagagatcgtaggcagaatctatgattcttttggaaatacaatagatgaaaaactgaacaaaaagatggtagggatctcattggaacgcatgaggaccataccaatccgggccggggttgcctacgggcctggaaaaacagaagccatcaggggagcaatgaaaggaggaatcatcaatgtgctgatcacggatgccgcaactgcagaaaatatcttagagatttagggaggtgtatgtatgaaattaacgatggcaattgtatttggaggaatcgttattgcatggctgctgcagggattctttgcattcagccaggccaggaacatccagaagacctacaaagaactgacagaccgatacgccaaagactactgtatcggattcggccaggcaaagggaaggttcttcggaaaaggctgcatcctgcttgtggtggcggaccggaatatgatcgtaaaggattctgtgaaactggcaggagtttctgtgttgagcaggatgaggcccaaccgggacctgatcggcagagatctatcgctgacagtcagaaaggaggagtttttacaattaagagatcagccaaaaagaagatttattaagaaaagagaccaaagaaaaacaagtgaggaaaaagcaatcagtctggccgctagaaatatttatgattatatcaatcagaaaaaccaagtgagccaggcataaccaaaggaggtaattatggacgcagttagttctttttttgaaggtttcatcaagatgttcaacgcaggaggcgagaatctgatgggactgatcacatcaattctgccgacactggcatgtcttatgacattcgtgctggcaatcgtaaaactgatcggagaggagcgcattgaaaaattagccctgaaaggatcaaagaacgtgatcatgagatacacgatccttccgatgatctcttacttcgtgttcactaacccaatgaacttcgcgctgggaagatttctccctgagaaatacaaaggatctttctttgacgcatgctgtacggtggtacatccaatgaccggattatttccacatgtaaattcaggagaattatttatctggcttggaatttccagcggaatcacgaagctgggactgggaaccacagggcttgcggtgcggttcctgctgatcggtattgtgctcgcgtttatccggggtgtgctgacagaaaagatctggatgatctacgcaaagaaaaacgatgttccgttcagagattccaatgaactgacaatttaatcaaaggtgatataaggaggatatgaatcatgagttataaaacagtgaaagttgaaaaaggaagaagcggatggggaacccctttaatcgtgacaccaaaagaagggcagaagattgtcagcgtcactggaggaaagattcatccggtagctgagaagatcgcggagcttacaggggcaccggtggtggatggatttaaaaatccggtaaaagatgaagagacagcctgtgcagtcattgactgtggcggaacctgccgtctgggcatccttccgaaaaagggaattttgacgatcaacatcaacggaggagggccttccgggccgcttaaaagctttatcaaggaagggctttatgtatccggagtaaaaccagagaacgtttcattgagtgaagattagaggaggatgaactgatggaggaaaagaaaggcaatgtaatttccagaattattgatacatttggacggggagccggtaaatttacttccgtattctttcaggcgggaagagaaacgatggaagttatcacaggaacgatccttccctttatgttttttgtctcagctctggtggggatcattacagccactggggtgggaaatatgatcgccaacggattaaagccgctggcaggaaacctgattggattaattatcatctccctgatctgcggagttcctatcctgtcccctcttctgggaccgggagctgttatcgcccaggtcatcggtgttttgatcggtacagagattggaaaagggaccatccctccccaatatgcacttccggcactgtttgccatcaacccgcaggtgggatgtgactttatcccagttgccctgggattggaggacgcgcagcctgagacggtggaatgtacggttccttcggtgctgatggtgaggttcatcactgcccctgtaggtgtgctgcttggattcatcctgatgactggaatgttttaacggaggtagaggagacaaatgagccaggtaatatataagacagaagtgatccgtcttggatcagaggccatggatgcgctggaccagaacctgttgatcctgttcggacaggaagtgccggagatcctggaggacatggtgtttgtacataacaacaatgaagtgctggcagagccaaaaaagggagactatctcctggtggacgaacaggaatttgagattcttagtgttggggaagtggcataccagaatctgtcacagctggggcactgcaccctgacatttggagaaaatcaggaccaggagattcttccgggcagcatctatttaaaatcacttagggcgccgaaggctggtgtgggaagcatcatacagatcattcaggcatagcagaaggaaggaataaaaaagaatgaaaacgaaagcagttagaatttacggaaaagaagacctgagactggaagagtttgatttaccggagttgaatgatgatgagatccttatggagattgtttcagacagcgtctgcatgtctacttataaggaagcattacagggagaaaatcaccagagagtcaacaaagatatcaaagaacgcccggtgatcgtaggacatgagtgtgcggggatcattcggaaggtagggaaaaagtggaaggatcaatacaaggaaaatgagacctacactatccagccggctttgaacatcgaagggtccatggcttctgtgggatactcctttgaatactgcggaggggatgcaacctttattgttgtaccggacattgtgatggaaaagggctgcctgcttccgtttgacagcggcaatggctttttccaggcatctttggcagaacctatgagttgtattatcggggcattccattccatgtatcacggggagcggggagtttaccagcatgagatgggcattgtaaaaggcgggaaaagcgcgctgttagcctgctgcggacctatggggctgggagctatcggatatatgctgaactgcgtaagaagaccgggattgcttgtggtgactgacattgatgaagaccggctcaaaagggcgcagacgctgttttctgaggactatgcaaaagagcgaggcgtggaacttcactatgtgaacactgcaaaagaagaaaatgaagtggagactttgagagctctcacaggcggaacaggctttgacgatgtgtctgtatatgcaccggtccgccaggtgatcgagaccgctgataagatccttggttttgacggctgtctgaacttttttgccggaccggtagatccggaattgtcagcgatgtttaacttctttaatgtccactacaagatgacccatattgtaggctccagcggcggcaatacggaggatatgaaggaatgcctcagaatgtccggagaaggaatccttaatccggccgtgatggtgacccatgtgggcggaatggacgcggtcattgacactacattaaatcttcctaagatccccgggggcaagaagctgatctatgtgggaattgacatggaactgacagcgattgatgaatttgaagaaaaaggcaggacagatgagagatttcaaacacttgccaatattacacaaaaaaataatggactgtggtgtgcagaagcagaaaattatctcttagataacttttaacaaacggtcaaatttgttttctgaacaccaaatccatcattaagaccagaatatacgaaaacataaatcaagtcaacgtaaaggagcatcttatgttagtgaacagcaaagaaattttattggcagcgaaaaaaggacactatgcagtgcctgcgacaaatgtatttaacttagagagcatcaaaggagtactcagtgcagcagaagagacaaaccatccgttgatggtctgcttggcggaagtacatacaccggaacttgggattgaggaagcagcccatattgtaaaatattatgctgaaaaatgcagtcaggacattgtccttcactatgaccacggatttacaagtgagatggtaaagcaggccattgatgcgggtttcacttccgttatgatcgacggctccagccttccgtttgaagaaaatgtggagaaaacaaaggagatcgtggcttatgcccataagcgcaatgtaacagtggaagcagagatcggacacgtgggcgggggagaatcttatctggacccggaagatgacgacacaatgctcaccacagtagatgaggcagtaaaattcgcggagctcacaggagtggactccctggctgtatccattggcactgcgcacggggaatacaaaggcattcctcatctgaattttgacagattaagccagatcgcagagcgtgtggaagtgccgctggtactccacggaggttccggttccggggatgagaatctgacaaaggcagtccagcttggcatatgcaaagtgaatatttttacagacctgaccattgccgcaaaagaaaagacaaaagaaggatatgctgacagaagttattatgacagtacaaagttagctgtccagggaattaaagaatgtctgatgcactattatgaagtgttccagaccaaaggagaaaagtaaaaaccatgagatattatgattatatggcgccgtctgtgaattttatgggaccgggatgtattgaagtcctcggagaacgtgtaaaactgctcggcgtaaaaaagccgcttctggttacagatacatttttaaatgagttggaggacggccctgtcatgcaggcagcagcttccctgaaaaatacaggcattgaatatgctgtttatacaggagttgagccaaacccgaaggtacagaactgtctggacgggcttaagatctataaagaagaaggttgtgactccatcattacagtgggaggcggttcttcccatgactgcggaaagggaattggtatcgcggcaactcatgaaaaacccttgacagaatatgcagggattgagactctgaccaacccgctgcctccggtgatcgctgtaaataccacagcaggtactgcgagtgaagttacaagacattgtgtgcttactaatttagacactcaccttaagttcgtcattgtgagctggagaaatgtaccgctggtttccatcaatgatccgctgcttatgctgggtgtgcctaaaggtctcactgcagccacaggaatggatgcgctgactcatgcagtggaatcctatgtatccgtggacgccaatccggtcacagatgctgcggctgtccaggccatcaagctggtggcaggaaacttaaggcaggcaacagccaacgggcagaatgaaaaggcaagagaaaatatggcctatgcatcacttttagcgggaatggcattcaacaatgccaacctgggttatgtccacgccatggcacatcagctgggagggcagtatgacatgccccacggtgtagccaatgcgatccttctgccgacagtggaggaatacaacctgaactcagcgccggaaagatttgcggatctggcagtgcttctcggagagaacattgatgggctgtctgtgatggaagccggacaaaaagccattcaagcaatgagaaatctggcggaagatgtagggataccaaaaaccttaaaagagatgggagttaaaagggaagatttcgagctgatggcagagaacgcactgttagacggaaatgcgttcagcaacccaagaaaagggtcaaaagaagatatcatccgtttgtttgagaaagcttattaagaaaaacaatgtatgtcgtttggataaaaacaggtatgaatgttctcatacctgttttttcggcgtggattcataaaaagataccaaaagaaacataatatatacgaaagttatttcatacaaaaaatcggttaaaaaacagaaggcaatacctgcgattatttttctccattgtcgcaaggaggcctttccagagccgactggagataatggagaaaaatatgatgaatctatacgatattatgggccccgtcatggtgggtccttctagttcacacacggcaggtgcggcaaggatcggcctgatctccagaaagcttttgggggagccggtctggcgggcggagatcttgtttcatggatcctttcaggctaccggtgtcggacatggaactgaccgggcggtcatggcagggcttctgggcatgggacaggatgatctgagaatcccgcaaagtttagagattgccagggatgaggggatccaatggaggtttggaaagacgttcttaaaagatgtccatccaaacagtgtgaaacttctgctcacaggcaaaagcggaagagaacttgagatcgtcgcaagttctccaggaggcggcagggttttgatctgccggatggatgggcttgagacagatttttcaggagacatgcccacgatgatcgtacacaatgacgataatccaggacatgtggccgcagtggcttccctgctggctgaatcagggatcaacatcgcatctatgcggctttccagggaccggagagagggaaatgctgtcatggtgttggaatgtgaccaggagatttctaacgaaacagtgagacagatagaaaagatgaaaggaatccacaaagccgcctgcctggcgggaatggattgaggtgaggtttggaatgggatttcaatcaatggcggagatggaggaagcggcaaaggaggccgggatcccgctctggaaagcggtcatggaagacgataagagggagcgtcatgtatcggaagaggagacaatgttgaagatgagggagcgctatcatgccatgaaacagtcagacgcggactatgaggaaaatcttagttcatggagcggcctttccggcggggacggggccaaaatgcagagatttgtgtcccagggaaatgcagtctcaggggaactgatgggcgaagtgatcgcgggagcgctgaaaatgggagaatccaatgcctgcatgaagcggatcgtggcggctcccacggccggggcctgtggagtggttcctgctgtgtttctggcttacgaaaagttttataagataccggagaggtccatgctggagggaatgttcttagctgcgggcattggacaggtcattgcacatagggccagcatttccggggcacagggaggctgccaggcagagatcggatcggcctctgccatgtgcgcaggggctctaacccatatccgcggtgggaatacgcagcagatctgttcggcaggtgcctttgccttaaaaggtctgctggggctggtctgtgatcctctgggcgggttggtggagattccgtgtatacggagaaatgtgaccggtgctgtaggtgcagtggcctgttctgacatggcaatggcaggagtttactccagggtgccgtttgacgaggtgattgacgccatgggggagatcggtgagatgatgccgggaggtttaaaggagacaagccaggcgggacttgccgccacggagactggaaagaagatcgccctcgacctggcacagaggaaccagacgccccagtgctgaaaaaaatccccggtcaggaaaggcctgccggggataaatagataaaattagtatcggttctggctgttgcacatcttgatcttttcttctacaactgccgccattgcctcttttgcttcttttgtatagattctcggatcgttggcttccggattttctatcaaagtcttcctgagttcctgtgaataaggaatctttaattctgtggcgatgttaaccttgcagattccaagttcgatggcacgtcttacagcatcaccaggcacaccggacgcaccgtggagtacaagaggtacggaaacttctgcgcggatctctgccaggcggtcaaagtcaagctttggctcttccttatataaaccgtgggctgttccgatggcaactgcaagggaatcaatgccagtacgggccacatagtccgcagcctgtgcagggttggtgtacatggaatctttttcatccacaacaagatcgtcctcgcgtccgccgagacgtccaagttctccctccacagtcacatcgtggagatgggcataagctacgactttctttactttttctatattttcttcatatggaagcttggaagcatcgatcatgacagatcttgtgccaaggtcgatggattctttgatgccttcaaattcttcatggtggtccagatggagagccacgggaatgtcatatttatttgcagttgcctctacgatagcctgaaggtaatcgcggttcgcataggaaaatgttccgggtgttccggccagaatgatcggggaaccaagctttgctgacgtttccgctacgacctggattgtctctaagttgtgaatgttaaatgccggcacggcatatcgtttttcctgtgcatctcttaacatatgtctggttgataccatcttactcataatcatcctcctaaagctttcctgctttctgtcttagtttaaccatttacattataaaaaaactgccggtgaaaatcttttcaggttatgaaaaccaatgaaaatcatgtataataaaaaagatctttcacacagacaggagggacaagttatgattattgaattaaacagcaagattgctgagaacctttctaagactgaattaggggttgtcaattatatcaatgacaatgaggataagctttcagacctatcgattgtggatatagcctttgagacattctcttcaccggcaactgtttccagggccatccgcaaatgcggcatcaatggctttaatgagctgcggtataaattaacggcgaaaacagaaaatacggaagtaaaggacttaaatgagatcatgaacaagtctttgatcgaggccacttccgttattgagcatatgtccattccaaatgtgctggatatactccatgccattcgggatgccaaaagggttttgatcttctccaggggacctacccatttggtggcacaggagctgagcatgaagcttcaggtgctggatttttttgtggtggatgtggaagatccgcagatcatgaggatcatgtcaaagaacttacaggaagatgaggttgtgattattctgtcgttaaacggggagactaaggaactgatcgactcagccaggaacgcgaaactcagaggctgcaaggtcatcacgctctgctgcagcagtaccagtgagctatttgagtattcagattatacatggctgggctacaaacactcccacattgcaataagaaactatgaggtaacgtccaggcttccgctgtacattatgtgccgaatcctcgtagactttttagtcgagaatatagaccataaaaaataaggcctttgaaggtcttatttttttgtcgttttcaggatatgaaaagattttcatggaatacttgtctataataaagactgtaaaaagaaattgtattctatggaggagcagtatgatttatacgttaactacaaatcctgccatcgatatgaacatttccacaaaaggaatggaacgtgcaaaagtaaaccgcacattcgatacggtttacactcccaatggaaaaggtgtcaacgtcacgctgacattaaagcattatggggttgattccacggttactggattttttggaggattttcgggaaaatatattgtagaggaactggaaaatagacaggtggctgtaaagccggtctgggtcggtgacacaacaaggatcaatatatttttaaatgatggagagggcgaattcaaatttgtcaacagcggatcgtttgtcggaagggaccagcaggaagaaatgctgcatcttttcgagacagccgaagatctgagctgtcttgtgatcagcggcagtcttccgcctggaatcgaaccgagttattacgaaagtattttgtcaatctgtaaaaagaggggcattgatgtggtgctggatatcagttctccgaaactgaaagacttattaaaataccagcccttgctgatcaaaccaaacgatgaagagatcgaagagatcttcgggattaagatcaaggacgaagaagacatactgcatgtccttaccttcctgaaagaacagggggccaggaatgtactgctgacgctcggaagcaaaggagcgtatttcagtaacggagaagatgtgtattattcatcttcccagccggttaagttattaagctcggcgtgtgcgggagatgccgcattggcaagctttttaagcctttggctcgaccatccggaaaatgttgaggatgcattgaagcgttcagttgccacaggggcaaatgtggcggagagcaacgcactcggtgattttgccaaagtagatacttactttcacaatatcaaaataagaaaggtggagaaatgatatgaaaaaactattaggtgttacaggttgcccaaccgggatcgcccatacttacatggcggaggaagctttaaaggaagctgccgaaaagctgggcgctgaaatgaaagttgagaccaacggagctgttggtgtcgagaatgaattgactgctgaggatattgctgaatgtgacggaattatcgtagcttgtgataaaaatgtagacatggaccgttttaacggaaaaccagtcatagaagtgccggtctcagacgggatcagcaaagcggaagaattagtgcagaagatgcttgatggaaacgtttccgtaagaggcggggaagtgaaagcagctggaagcgaaaagaaagcagaagaaggaaaagattctattggacatcagatctataagcatctgatgaacggtgtctcccatatgcttccgttcgttgtagccggtggtgtattgacagccatctctttcttatggggaatttattctttcgatccgaactctgatcagtataatgtaattgcagccactatcaagactgtcggtggtacatccatgggaatgatggttcctgtgctggcagcattcatcgcccagtcaatcggtgaccgtccgggtatgatcgcaggttttgtaggcggtatgatcgccaacactacagggtccggatttatcggagctatcattgcaggtttctttgcaggatacttatgtaagtttgttgtaaatgcattaaaaggacttccaagacagtttgaaggtttaaaatctatcttctttataccgatcatcacagtggctgtcgtgggtattgtaatgcaggtaactgcgggtccagtttcaggaatcaataagggaatgatggatttcctagcagggcttcagaactccagcccgatcattttgggacttgctgtaggatgtatgtctgcatttgacatgggaggcccggtaaacaaagctgcatatgtaacaggaacaacacttttagcacaggggaacttttactttatggcaggtgtatctgcggcatgtattacaccgccgttgatcatcgcgcttgcagcaacatttgcaccaaagaaatttacaaaagctgaccgtgcagcaggacttgtaaactatgtgcttggatgcacccacatcacagaaggtgcaattccatttgcggcaaaagatccggtgagagtgctgccaattctgatggtaggttcctcaatctcagcgatcctgtcctacgtgatgaaggtccaggtaccggcacctcacggcggattcttgatccttccattagtacatccggctgtcacatgggtattatgtatcctggcaggttctgtagtaggcgcagtactttatgttctcactgcaaaggatgtagaacagaaataaacgtttaccctactgggtattagaaaggttggtaacttttatggaaattatagaattatttgatgagtcaacaatgaatctaaacttacagggagagacaaaagaccagatcattgaagaaatggtaacacttttagacgaaggcggagtactcgctgataaggacgactataaaaaagcaatctatgcaagagaagaacagtcttccacaggacttggattcgacatcgcgatcccacatgcaaaaactgcggcggttaaaactgcgagagtagccttcgggaaatctgacaaaggatttgacttcggtgccgaggacgggacaaaagcgcacctgattttcatgatagcggcaaccgatacagacagcaacctgcatctacaggcgctggcaacactctcaagaaatctgattaaagcagactttagagcgaagcttctggcagccaatactgcaggcgaagttatggatgtgttgaaaactttataaataatagcagaccggcagtggaaatagattttccgctgccggttttaacaatttatttatcattattggtagctgctttcgcaaattataaagaatgggccagctgaaaatcttaaattagtataacttccgtgagctcgctcaatgtcttataaacagcggacggcagatctttatccgtgataaaatagtcgatatccttccagttggcgtactgcaccagagagcagatatgggccttggagctgtcagagatgacaacaatgatcttagactgggggatgatggcctgtttgatctgtgcatctgtgaactctgagactgccggcccgttgtgctgctcaaatccgctggtccccagaaatgaaatatctaccttgatggtgttgataaagttggtggtctggaacccttctgtggacatattgttcgggttcagctggcctccggttaagatggtcacgttgttgccgttatttaaatggtaagtggtattgatggaattggtcacaatggtataaccggatttctggcttaaaagctgtgccatacactgcatcgtgctcccggcatccagataaatgaccccctgttccgggattaattccaaccccttctcacagagggcatactttacggagctgttttcgctgacccgtgtttcgatagggatcgggcggaagcttgagactagggtggcgcccccgtggctgcgctctatcgccccgatctcctgaagatgagtcaggtctcttctgatggtttcttttgtcacttcaaatttatctgccaggtcgccgattttagcgcttcctgtactgttgatatattcaacaatttccttctggcgttcttttgcgagaagttttcccataatcgttcctccttcatactgataacctcatcataacagaaaatatggataaattcaaatgtgaacacacacaaacaaaaataaaacaacaaaactacacattttttgtgggaaagcattgacatatatcattaaaaaacttataattcacgtataaacaaaaacaaacggacacaaaaccaagaaaagcaaatattaagaggtagatcatgaaaaaatggaaggaatatgtgtttgatgtcaatggttttcaggtaaacaccatctacaatgaggaaaccatagagaaaattttcttgcctttacttagaaatctgaccgagatgcagaagaaaaagaaccgcagactgattgtgtttatggcagcgcctcctgcagtgggaaagaccacactgtcaaaatttctggagtatctgtctgtacagtcggaagacctgacggagatccaggctatcggtttagatggtttccattaccattcggattacatcaatacccacaatgcagtggtcatgggaaaagaggttcctatgaagaaagtcaaaggatgtccggaaacctatgacacggaaaaactcagggagaagttcagaaggatcaaagaggaagatatcctgtggccagtgtatgacaggacgatccacgatgttgtggaggatgtggagaagatcacaaaggacattatcctgattgagggaaactggctgcttttagacgaggagccatggagatctatgaaggatacggcagattatacaatcatgatccgctctgaggaagagactttaaaagaacggctggtgggaagaaagatgaagggcggccttacgagagaagaggcagaggattggtacatcaacagtgacagcgtgaatgtcaggagggtgcttaagacatctttagacggagacttcatgttaaaagtcgaagcagataacgattatatagaattataggaggatcagggatgaaatcaacagcggcagttttggcagcaaaaaatcaggtttatgtaaaagaagtggaacttccggagatcggagaagaggaacttttggtaaaggtagtatcaaacagtatctgtctttctacatataaggcggctttaaggggaggggaccacaagagagtaccggatgatctgagtccggaacatccgacgatcacaggccatgagttcggcggatatattgtagaagtgggagagaagctaaaagaccgttttaaaccgggagaaaagtttgtgctccagccggccatgggacttccaagcggttactccgcgggatacagctacgaatattacggaggaaatgctacctactgcatcatcccgaaggtatccattgatatcggatgtgtgcttccatatgagggagattattttgcaaatgcttccctggcagagcccatgtcatgcatcatcggcgcatttcatgcgacctatcatacaacaccgtatgtgtatgagcacaggatgggcttaaaagacggaggaagtgtcgcgctgctgggatgtgcaggacctatggggatcggagccattgattatgcgttaaacgggccttataactcaaaacggattgtagtcacggatatcaacgaagagagacttgagcgcgcaaaatccctaatcactccggaggatgcggcggcaaagggagtagagcttatttatgtgaacacggctgggaacgatcatgctgtggaggatctgaaagagctgaacggaggcaaaggatatgatgaggtctttgtattcgcgccggtagaacccctgattgagatgggagacgatctccttggaaatgacggctgcctgaacttctttgcagggccgacggacaacaactttaaagcaaaatataatttctacaatgttcactatgaaggaacccatatctgcggaacttcaggaggcgcccctgccgatatgatcgagtctctggagctttctgcggctggaaagatcaatccgtcctatatggtaacacatatcggaggaatcaatgcgccaccggatacgatcttaaatcttccgaagctcccgggaggcaagaagctgatctatcctcatatccagatggaattgactgccatcgaggatttcggaaagcttgggaaagataatgaaatgtttgcacatctggcagagatctgcgaggcaaataacaatgtatggtgtcaggaggcagaggaatatctgctgaagacactggcacctgaggaataaagatttaatagtagatgattgcagattcgggatagatgtggtaagatgcctgagaaagaaaaattaaacataaagtgatggtgtgcccggataaaacccgactgctgggaaaaaataaaacggaagactgccgaagcgtacatatgcctttaggggatgtgtacacttttggcagtcttttttatttcataggattcgggtgtcaaaaggtatctttgccaaaagtcattgtagattttgcacaaatagccataccttttaagcgttcgaaaagctatttagtggataatttattatgcaatatcacaacaattatttcaaatcgaaccttttggcaccctaatcttcataggaaagtgcgtcctatgaaataaaaaagccctgcgggcgttatgcactctttgttttagaaaggaatttttgatatgtttgtgatcatcgaccattatgactcttatgtccataatctggcacgggacctggaggtcctggggggaaaaacagaattgatcagaagtgacaaagcagatgcagaatatctggaggatctgagagaacagggcaggcttgagggattgattttatcaccgggtcccaaacgcccggaggactgtgattcctctgtcaggctggtgcggcattttgccggccgtgtcccggttttgggtgtgtgtctggggcatcagatgatctgccgggcgtttgggggcaggatcgtaaaaggagccaggcctatgcacgggaaggtgacgaagatcacacatgatcagagggacctgtttaggggacttccaagggagtttcttgtgaccagatatcattccctggtggctgagagagacagcctgccagatgtgctccggttggacgcagtctcagaggaccaggagatcatggcagtcagccataaaacgaaacctgtctacggtgtccagtttcacccggaagcggtgcttacggaatatggcagagagctgttgcagaattttatgaaaatatgccaggaatggagagagcatgaagactaagataaaacaactgtccttttataaagatccggaggagattttttatccttacagggaggaacaatatgcggtgtttctcgattcttctctggaaaacgatcagggaagatattcaatcatcggtgtgaatccatatctgatcttaagccaggaaaatggccaatgcaccgtcaatggcacagcagatgcgcgtccattggaagaggtcctggatcactatctggaagcctttgaggaggagaaccagacagaactgccccttgtgtccggtgccgtgggatatctgtcctatgattttgggagaaggtttgagcatgttttgtcctgtcatcagaaagagacaggagtgccggaggcagtgtttgtattttatgacaatctgatcattgcggaccaaagggaaagaaagctttacctgacagccagggaagaaaatcgaagcgccgaagacgtattccgggagatggagcggacggccagggagagtttttcgctcagaaagccgcagagacagcagcggatcgcggactttgtccctgattttcaaaaacaggagtatgaaaaggcggtgaagaagatgatctcctatattgaagagggagatatttatatcgccaacatgacacagcagctgaggattccgggaaaaggacagtgttatgatgtatttcattacctgcgcacccacaatccgtcccccttcggagcgtacatgaattatggggatttccaggtgatctgtgcgtcgccggagcggtttttaaaggttacagacaaaactgccgtcaccaggcccatcaagggcaccaggaggcggggaaggaacagggcggaggacgttcagctgagacaggagctgctggactcggaaaaggaccgcagtgaattattgatgatcgtggatctggagcggaatgatttaaactgtatctgcgagcccggaactgtcaaggtgccggagcactgtaccgttgaggagtacgcaactgtgttccacctggtcagcacagtgaagggaaaactcagggaggggacgaatgtccaggagctgttaaaagccatgttcccagggggatcagtcactggtgctcccaagatccatgcaatggagatcatcgaccgtctggagcggagccagagaggactctataccggttccattgggtatgtctctctgaacggggactgtgattttaacatcgtgatccgcacggctgtctatcaggacgggatgtatcggctgggcgtgggcggaggtattacatgggagtcagatcccaaatttgaatatgaagaaactatgcagaaagccaaagcagtgctggaggcagttgcggcagcagaagggaggcaggatttatgaacatacaggcagatgaagggtattattttgggatcggggcatttgaaaccattgccctggaacatggcagacggattctttttgaacgacatatggaaagacttgagagaacagtgcattttcttggtctcccagttcggcctggcggtgtggaatgtaagatagaggagtatctgaaagacagggaggcggatctctccagacacgatgcattgaagatcgttgtgtcagagaagaatacagcagtcgctgtccgcaggaatccatacgcaggctgtgatgaaacgaatgggtttcggaccgtgtacagcgggatccgcagaaatgagacatctccgcttatctttcacaagaccctgaactatgcggaaaatctgttggagagaagaagagtgcaggagctgggatatgacgaggctgtgtttctcaacggcaagggggagatcacagaggggactgtatccaatgtattttttgtaaagggtcataagctgtacacacctcctgtttcctgcggaatgctcccgggggtgatgagggaatatctatgtgaaaagtacaaagcagaggaagcagtcatccgcccggaggatgtagagacttacgatgagatgtttctgaccaactccctcatgggcatcatgccggcagagagccttggggatcatcactttgccaccgctgagacgacagaacggctacgtcagacatgctgccctggacattttgataccctgccttgatggacttgccgtcaaataatgattgactttgagttagctccagatgttatgatagatgaaatatcaggaaaccgtcattggaaggaacaggtagatcatatgcgttatcgggagcttgggaacacaggaatgaaggtcagtgagatcggacttggctgtgaaggatttgtgggaaagaacgaacaggagacaaaagaacttttggatttggcacagaacagtggtgttaattatttagatctgtacacaccggatccggatgtaagagacaagatcggaaaagttctaaatggcagaagagatcatttttttcttcagggacacctctgtaccatatggaaagaaggacagtataaacgtacccggcagatcgatgaggttcgggaggggtttgaggatatgctggaaaggctacatatgtcgtccattgaggtgggaatgatccactatgtagattctttaaaggactggaaagacatttatgaaggtccggtgatggaatatgccagagagctgaaagcccaggggaaaatccactacatcggtctgagcagccataatccggaagcagccatggaagcagtgaggagccaggagataaaggtgctcatgttcagtgtcaatccctgttatgatctgcagccggcaggggaagactgcggggaactctgggatgataaaagttataaaggacaccttgtgaacatggatccgtcaagagaggcactatatgaactctgcagccagatgggtgtggggatcacggtcatgaaggccttcggaggaggagatctgctcgatgaggaattgtcccctgcaggaaaagcattgacaccaagccagtgcattcactacgcactgacccggccggcagcggcatctgtgctggctggagcccattctctggaggaattgcaagcgagtcttgcatatgaagatgcgaaagagacagaaaaagattatgcccgtgccttggcgtcttttccaaatctaagctgggaaggccattgtatgtactgcggccactgtgctccatgtccaaaagggatcgatgtggcatctgtcacgaagtttctgaatcttgcgaaggcgaaaagtcaggttccggagacagtaagggagcattatgcagtgctggaacacaaagcatcggagtgcgtagaatgcggcatctgtgagacacggtgtccgtttcaagtttcaattagagataacatgaaaaacgccgctgaaatctttcacaagtaagcatcatttaggaggaactgatttgtatctattatttttcatcttacccatactgatttacatacccacagggatttatttgtactttttcttccggcggattttccggctgctgcaaagagatacccgtttggtaaaggtactcagtgctgccgcggctggcggatgtatctattttgcatggccggcctacgggtggggaggagtggcaattctgcatctgatcgcaatttctttgtttttagagctggtgaactttatcataaaaaagacccatggcagccggagaaagtgggagacggtctataaaagcggaatcctggtctttgtcatcatggcactgatctttacatatggatattacaatatgcatcagatcagaaagacgggctaccggatcacatcctctaagtttcaggagggcgaaacacttaagatcgcgctcatgtccgacattcatctgggagtcaccatgcaggcccaagatttaaaaaactggtgcaagaagatccagagacaggatccggacatcattctgctggctggggatatctttgatgaaaatacaaaacgggaagagatggaacaggcggcaaaggtgctgggaaatatgaagagcacttatggggtgttttatgtatacggaaatcatgactccaaccaatatgtagaaaagccggaatatcgttctgaggatatgcggcaggcgcttaaggaggccgatattcatgttctggaggatgaagcggtcttggcaggggatgatatctgcgtgatcggaagaaaagacgctggggacaaagacagaaaaagtctcaaagagatcatgaaagatgtgccggacgacaagttttatctgctgatggaccaccagccgggagatctgaaggaaaataacaggcagggcattgatctgcagctatcggggcacacccatgcgggtcagatctggcctaccggccagctgatggaacttatgggggttaatgagatcaactatggataccggaagaccggaaatctccagaccattgttacatcgggcatggccggatggggttacccgatccggacgggcggacactgtgaatatgtcatgatagaagtgactgccccatgaccaggaagcaatcgttaccttttactgcccttaacgagacttctgattcagcgttttctgggtgtactcggttccccactctaccatgcagtccaaaatgggctttaaactcattccggtttctgtaagggagtattctaccttcggaggtacctgggggtacactttccggttcaccagtccgtcggcctccatcgcccgcagatggctggtcaggactttctgtgtgattcctgacacggaccgcatcagttcactgaaccgtttggtgcctgtgagaagatccctgatgatcaggaccttccatttgtcaccgatcagctgcagcgtcatttccacagggcattcaggtatttttttttccttttgcatgatgtgtttcctccttggtaattaaacaatataattctattctatatctttcattatctgaacacaataagaaaccagaaggcggcatagtatcttttggataccatgccacttttttgtgcgtaatttacggaaagagatacaagggatataatcaaaatagaggatttgcgggactggggaaatcagaagggggaggatattttggatcaatggagagaacagcttagtatgataaaacggcagctaaagcaggcggatgctgttgtgatcggcgctggagcaggaatgtcggcggcagccgggctgacatattcaggagaacggtttgaaaaaaactttagggatttcatcagcaggtatgaaatccaggacatgtattccgcagggttttacccatttcccacacagcgggagaaatgggcctattggagcaggcatatttacatcaaccgctatgatgtgtctgccggccgggcctatcaggatctatatgagctggtcaaagataaaaattattttgtgttgaccacaaatgtggatcaccagttctggatgtctgggtttgaggaccataggatttttgccacccagggggactatggcctgtttcagtgtgcaaaggcatgtcacctaaagctatacagcaatgaatcccaggtcagggatatggtgaaagtccagaaaaactgtaagattccggtatccatgattccgaaatgtcctgtgtgcggcggggaaatggaagtgaatcttagaaaaagcaggttttttgtggaagacgacaaatggcaccaggctgcagaaagataccagagcttcctgcaggaaaatctggacaaaaggattttatttgtagaacttggagtgggtatgaacacaccggggattatcaaatttccgttttgggagatttgttcacagcatcaaaataccttttatgtgtgtatcaatctgaatgaggcatgggctccgggagagatcagggaccgttcggtgtgcattagcggagggatcgcagagatactgagacaactgaaggaggaaaataatggaccagacacagaggcttgatttcctgatcggtgagttaagcagggaatccggcatgtatgagaaatggaaagtgggagaggttgacaaaagaaggcttctgcgctctcttatgaatgtcaggatgcctggggaactctcatctgaagttctgagagtgcaggatgaatatctgaaggaagagacggcacaaaaagggatcgtagctgttgaggaaataccaacggtaaaagaagcgttcggatctgggatcagacacgctgacaggatttctgtctggaggggcgatatcacaaggatctctgcggatgccattgtcaatgcggcaaactcccggctgcttgggtgctttgtgccgtgccacgggtgcgtggacaatgccattcactcagccgcagggatgcagcttcgggaagaatgcttccaaatcatgcaggagcagggatatgaagagccggaaggccgggcaaagatcacatccggatacaatcttccctgcaggtatgtgatccacacggttggcccggtagtggcaggaatcctaagaaaagaacactgcgcggcactggaaagctgttatcggtcctgtctggagacggcaaaagaaagaaaccttcaaagtattgtcttctgctgtatttccacaggcgagtttcattttccgaatcagagggcagcagatatcgctctggatacggtgctctcgtttttggacagagatagcggcatacagcgggtcatttttaatgtatttaaggaaataggctgggacatttacagaaaacttgtgacgaaataaaaaactgattccggataattaatctggaatcagttttttcactggctggaggttttgtatagtgcacttttctgtcagaccgctgcatacggtcagagcgcagtggagaatgtaccggcagtcatcctcaggggatgaggagtactggaggtatctctggtgcagcgtttccaaccacggatcaaagcggcggatcttggcgtgggatcttgtaagccggcggatctgttccgggcacaattgcttgtgaaaaacagaatgaagacgccgttcatagatgacgtgctgcggaaaagaaaacttgaattctttgttgtgtgggcgggtgaaggaatcggcgatataatgcatcatttccccggcgtggaaccatccagagactgtgtccttaaatccggaggagtacgtgcggctcatgagattcctgcgggcttgataagtgtgcccgtccagatctgctgcattagctcctttcaaataagacaggggattgagatcaggaaaaacatttcccatcataaatgcaagtttttttggaagattcagcttcatccggcgggtcataaatcttgagagagagtaatgatcttttgtttccatattgctacctcttttagaactacagcggtttctttactctcatagtatctgcaaattgtgtctaaaaagtgataaaaatattagaaatcaatggttatttttataattcatcaagaagtgcctctttacccgcgtccagaagcctgaaaaatgtccggtggagcatccggcgggtttcgggagagatagtaaggaggctttttgagaccttgcggaaattctttagccagcagacaggcaggtcctttagggtttccgcgtccgtggaggcaaaaatctggtacagattattaaaaaattcctctctctcagaactgttcatactggagatccagttttttagtgtacggtctatgatttctgaggatgcactgacggctttgacctgtataaaacctggtcccatcacttcccaggagtagggatcgtgctgtaaaagcccattctgtgtactgtggatgaccgtataatcctcctcgtggtccaagagcatccccaccacagaagactgcgggagaaatgtgtggatacggtccgatacgccgatgtatcctttgctttttaacacttcacggtcaaagcccggaccgtcattattatacactgcctgtatgcgcggctggatggcttccgaacagtttgccgccgcaaatacagccaggttcccgcctttggagtggccgccgcacaggagggggccttcagtctgtccagcgccttggatgaggtattctgcggcctcctgctgggccggaatgacaggcataaatgccatattaaaatcttccttccagcccaccagagtgctgtcagtgccgcggtaagcaaagtaagtgctgccgtcctcaaaggagacagtgatggccgagaactgtttttcctgctccggattcaaatggtctgcgtatcgcgagagcttcaaggatccaaaacggcggcttctgcccattcttccgagaagctcttcgtcttcctctgttcttgtctgccgttgatcctcctttaatgaaaaaaatgcttcggatgcctcagctacggttactgtcccgggctccgaaacgtcgggaacgatgccgggaaaacggatataggacaggcagcagaggatcaggctgtctacttcattgaagctggaatcctgaaagcttaagtcacctctccatgcgatataatcaaaaagatctgtggacatatgtatcctcctttatgaatgggcctttgtctctattatacagcaaaaaaagaaaactcagaagagaatccagtattacatatcctacggatggacgcattctgcccgataaggtataatacattagaatgtttgagaaaggatatgtttgctatgaaccaaagtacaaagggtgtgatctttaccatggccggggggattttctggggcatctccggcatcattggtaaatatttatttgatcaaaaggggctgacggctgtgtggctggtgacgctgagacttctgtcagcgggatttttgatgctgttatttgccgcagtccagaaaagaggaaagattttcagtgtgtggaaaaagaaaaggacggcggccagccagatggttttctgtcttttcggaatgacagcgtgccagatgtcttattttcttgccatccagtattccaatccgggtacagccacagtgctgcagtatattgcacctgcgatcatcatgttgttttgtctggcagtggagaaacgcaggcccaagcgtctggaggtgatcgtgctgttttgtgtgatcgccggggttttcctgttggcaacccatggggatccgggcagcctgacgatgacgggacaggctctgttctgggggctgttttcggccgtggcactggcaatttacaatatccagccggaaaagctgctggatgagttcggctctttggagactgtgggatgggggatgtttttgggaggaatcctcatggtacctgttgtcggcttctggaatgttcccgggatctgggacagcagaactgtacttatggcactttgtgttattatcttcggaacagtcattcctttcggttgttacctggaaggagtccgtctcttagggccggtaagagccagcatgtttgcatgtgtggaacccttagtggcggcagtcatgtcagttattttcctgggagaaatctttggcggcatggatattctcggatttgcgctgattctaggaggggtcacatctttggcggtgtttgacaggaattaaaattatgaagcaacagcttcagcgacatgaccagagggttcaaagaagcctgatcggagactaggagtctaatggcagtggtaggacattcgctgagagaaaatgtgtgaatcccttttgtgtcggctgtcatatgtcttgggagcaatgatatccccatccccaattcgactgcttttaagataccctccgggctgtcatattcaaggacttttgatgcctggatgtccatggatttcatgctgttaaaaagaatcctgcggtaagggcagtcaggtatattgttggtgatgaccgggcagttccatgcctgctccatgtttgtgacagtctggggagtgatgagcacaagatcctcttcgagacggaatatttctttggtatcggcaggagcaaatgaagaattggtaaaaatacagtcggacctgacctgcagtagatcagactccagctgtttttgcgtaccggtcatgacagatactgccacatccgggtattttgtctggtacagcataagatattgaggcagaaagtatccggcgatggtctgggtagtgccgatctttaatgtttttccagacaaaagggcttgttctgcctcatccagcagagcaaggatcttttctgcataggttagaagcagttcgccgtcttttgtcagggagactcctttgttgtgccgggcaaaaagactggtatttaactcagactccagatttttgatatgagcggtcacattggactggacgtacccccagatgatctgctgcctttgagatagatccggcatgggctgtctccatgaatatttttaggtctgtgctttccattctattttcctcctatcattctggctgatggcaaacctcatgtttccttattatacacgcaagagacagctctgtataatgaaatggtacataatgatttcaaggaggaagacaaaaatgatagccatgcagtataaaatatctctgccgtcagattacgatatgagtaagatacgccaaaggatcaaagaaaacggatacaggacagacggttttccggacttgttgtttaaagcatatctagttacggaaaaaggcgtacatggatcccttcataatgagtatgctcccctgtacttctggaaggatgaaaaaggtatgaacgaatttatctttcatggattttatgacaatatcctggattcttttggatggtagaaaatccatacggggatcccatttcattatgaggatggcggaaactttgtccggtcggcttatgtgatggaatatgagagagaaataccggaaagtgaaaagatgcaggagccggaatattcactgaatctgcctggtgtcacagcaaaagcggtgatttatgatcccggacagtggagatgcacggaattttattttttggaaacgataccggaacaggtatccggcgcaaggatttaccaagtcctgcatatatcccggcagaaatacctgtgacttaagtatccggaggatgttttggtgaaaaactcaaaaataccgggaaattgttggatgtatttatgcaatatgctataataaatcagacaaaaagtccaaatactcagtgggacataggagatttaaggagggcactatggagaaatacattatggcgctggatgcggggacaacgagcaaccggtgtatcctgtttgataaaagcggaaagatctgcagtgtggcacagaaggagtttacacagattttccccaatccgggctgggtggaacacgatgccagtgagatctggtcaacacagcttggagtggctgtggaagctatgcagaagatcgacgtgacagcagagcagattgcggccattggtatcaccaaccagagggagacgacgatcctctgggataaggagacgggagaaccgatttataatgccattgtgtggcaatgccgcaggacctcagaattttgtgattcattaaaagagcagggattggaggagaagatccgggaaaaaacagggctgatcatcgatgcctatttttccggcacaaaggtcaagtggattttggaccatgtggaaggtgccagagagaaagcgaaaaagggagagattctgtttggtactgtggagacttggcttatatggaagctgactaagggaaaggttcatgtgacggactattccaatgcctccaggaccatgctgtttaatatcaaagacctcacatgggataaggagatccttgaaattcttgatattccggaggccatgctgccaaaacccgtaccgtcaagccaggtgtacggggaatcccatccgtcttacttcggagagccgatcccgattgcgggggccgcgggagaccagcaggcagccctgttcggacagacctgcttcaaggcaggggaggcaaagaatacatacggcaccggtggtttccttctgatgaacaccgggcagatgccggtagattcccagcacggacttctgacgaccattgcctggggacttgacggcaaggtggactatgccctggagggatctatttttgtggcaggagctgctattcaatggctgcgggatgagctgaagctcattgattcttcccaggattcagagtatatggctcaaaaggtcaaggacagcaacggctgttatgtggtgccggcatttacaggccttggggcgcctcattgggaccagtatgccagagggacgatcctgggtatcaccagaggggtcaataaatgccatattatccgtgccacgctggaatccctggcattccaggtcaacgatgtgctgaaggccatggaggccgatggaggcatccatatgagttctcttaaggtggacggaggagccagccagaacaatctgctgatgcagatgcaggcggacatcagcggagctccggtgaagcgtcccagctgcgtggagaccactgccatgggggcagcatacctggcaggacttgccgtgggctattggagcagcaaagacgagcttgccaagaatctggatatcgactgtgtatttgaaccgcagatcagcgaagaggagagagacaagaaagtgtccggatggaagcgggcggtccgctattcctacggatgggcaaaagaagaataaagatcggttcaccaatgccacgatggtgttggtgaactttagaaacaaattggcccggccaataggaaaaaaattgttgattctggaaaaaggattgacttagagtgcgctccaagtgctatagtaaaatcagaagcacaaaagatgctgtacagttagaaccggttaaaggaggatatcaaagtgatggaacaaaaaaaattaggttttggttttatgaggcttccacagactgatcaggatgacgcaaagagcattgacatgaaacaggtctgtcagatggtggattcatttctggaacagggttttacatattttgatacagcctatatgtatcatgattttaccagtgagacggcgctcagggaagctctggtgagacggcatcccagggagtcgtttacagtggcggataagatgccgaccatgtttttaaaacaggacggggatctggaaaggatctttgatgagcagctggataaatgcggggtggattattttgactactatcttctgcacaacctgggtgtgaaacagtacgccatcgcagaaagattcaatgcatttgattttatacagaaaaagaaagaagaaggcaggatcaaaaagataggtttctccttccacgatacggcagaggtgctggatcatatcctaaccgatcatccagaagtggattttgtacagctgcaactcaactatttggattgggacaatgagagcatccagtcccggaagtgttacgagacagcggtgaaacacaagaaaccggtcattgttatggaaccggtaaaaggaggaacactggcggatattccaaaggaagctgagcagcttttcaaagaggcccggccggacctgaccgttccttcctgggcagtgcgttttgcggccagccatgacaatgtgatgatggtattaagcggaatgtcctctatggaacagctcctggacaataccggctatatgagagagtttcagccggtgacaaagatggaacttaagatcattgataaggcagtggagatcatcaacaattctattgagattccgtgtacagcctgccagtactgtgtggacggatgtccgaagaacattgccatccctaattattttgccctgtataatgcggaaatccaggcattaaataaaggattttctacccagggtgtgtattacagcaactatacaaaaacatacggaaaggcatctgactgtattggatgcaaaaaatgtgaagccagctgccctcagcatattgaaatcacaaaatggcttggcaaggttgctgacacatttgaataaaaacagtgaagtaaggagtgcgcaggaatggaagcacatgaggttttagaaaaagtgagacagagtgagatgtccgtgaaagaggcagaagcgtatttccgcagacagccctttgaggatatggggtacgcaaagctggatacccaccggaaacttagaaatggagcagctgaggtggtgttctgcagcggcaaatccgatgaccatctggtcagcatttttgagaggctttgggaacaggatggggaggtcttcggcacaagagctaccgagaaacagtttgaactggtaaggcagaaacttcccgatatccagtatgatccggtgtccggcattttaaagatcgagaagccggataaggagagagtcggaatgatcgctgtctgtacagcgggtacagcagatatttctgttgccgaggaggcagcccagacggcagagtacctaggcagctatgtggagcggatctatgacgtaggagtcagcggccttcaccggctcctgtcccggctggatgtgatccagagcgcaaactgtgtggtcgcagcggcaggcatggagggtgcccttgcaagcgttatcggcggcctggtggataagccggtgatcgcggtgcccacttcagtcggatacggcgccaacatgcatgggatttccgcactgctcaccatgatcaattcctgtgccaacgggattgcagttgtaaacattgacaatggatacggtgccggttatatggcatcgcagattaacagactgggggaaagaaaatgaaccggacactttatttagaatgttactccggaatcagcggggatatgatgacagccgctcttctggacctgggagcggatgaaaaggtattaaaagaggcactggaaagccttcccgtaaaagggtttgagacgaggatcagcagagtcacaaaggccggactggacgcctgtgactttgcggtgcttttggatgaggaacacgaaaaccatgatcacgatatggagtatctgcacggccatctccatgagcacggccacagccacacccatacccatgaacatgggcataaacacgaacacaggggcctgtcggagatcctcgagctccttgagaaagcgcagatgacagagggtgccaggaatacggcagtgaggatctttgagatcctggcagaggcggaatcccaggctcatggaaccactgcggaccaggttcattttcatgaggtgggagcggtggattccattgtggatatcacagctgctgcggtgtgcttagacaacctgcagatcaagaaggtcatcatcccggtgttgtatgagggtaccggctctgtccgctgccagcatggggtgatccccgtgccggtgcctgcagttgccgccatcgcggcaaaacatgagcttccccttcgcatcacagagagccagggggaatttgtcactccgaccggggccgccattgcagcggctgtcaggacttcctctcagctgccggagcggtttgtgattgaaaagaccgggattggagccggaaagagaaaatacgaacggccaagtcttctgagggccatgctgatcagagagaatgggcagggcagtgcaggtgattttatctataagctggagaccaacattgatgactgtacaggggaagccctgggttatgtaatggagcgccttatggaggcaggcgcaagagatgtccactatattccggtatttatgaaaaagaaccggcctgcatatgagctcaatgtgatctgcaaggaagaagatattgagaaactggaggatatcatattccgggagacaacaaccatcggcatccgcaggcagagaatggagcgcagcgtgttaaagagaaaggtccagactgtaactacctctctgggggaggccaaggttaagctgtgctatatggaaaaagcggtgagggcgtacccggaatacgggagtgtcagggatctctgccggaagcatgggctttcttttcaggaggtctaccagagaatcgcagaggaatgccatggacaaatataaggagaggtgcagccgtctaaaggatatattgaaagaagttacaaaagagaatgtgatgctggcattttccgggggagtggacagcagcctgctcctaaagctattatgtcaggcagcgaaggaaacagggagacaggttgtggcagtcaccatggccacggaactccatcctgcccaggacgcagaaatcgcccggaaggtggcagaggagtcaggagcggtccacaaagtaatctgcgtggatgaactttcccatgcggggattcaatacaatccggaaaacaggtgttatctctgcaaaaagtatttgttttccgaactgctccgggcggcggataaggcagggatcagcaccgtgctggaagggaccaatgcagatgacttgaaagtctaccggccggggatccaggccgtgaaggagctggggattcaaagcccgcttgctgaagcgggcatgacaaaggcagatatccggaaactggcatcagaatatggcatctcagtggcagaccggccggcaagcccatgccttgccaccagatttccctatggaaccaagttgtccatagaaaacatgcagatggcagatgaggcagaaaagtttatacgagatctgggattttacaatgtccgtgtccgtattcaccaagatacggccaggattgaagtggatgataaggatctgatttcttttctcaactacagaaaaactgtgatcctgcggctgaaagaattaggctttacatatatttcagcggatctggaaggcttccggtccggcagtatggacgtgaacttgaaacaaagaaaggagatttaatatgcatatggcagacgcgcttgtggccccggcggtggcaggcacaatgtatgcctgctccgcagcggcggcgggatgggcggtaaaaaaagtacaggaagaagacgatcctaaaaaggttccgctgatgggaatgatgggcgcctttgtgttcgcggggcagatgatcaattttacgatccccgggaccgggtcttcgggccatctttgcggcggccttttggtatcggcggttctgggaccttttgcgggatttctgacgatgataggagtccttctgatccagtgccttttgtttgcggacggagggcttcttgcccttggctgcaacatatggaatatggctttttatggctgctttataggggccggccttctgtggaggcagtttatgaaaaatggagtggacaaaagaaagatcacagtggcatccattgtgggctgtattcttactcttcagctgggggccctttctgtgacgggtgaaactctggcctcaggcatcacggaacttccgtttggggtatttgcagcggcgatgcagccgatccatctggccatcggcctggtggaaggactgatcacggcggcagtgctgtgcttcttatatgaggcaaggccggagctgatctggacgggtacttccatcgggaccgcggaaagcaaaaagaagccgagactctctttcagaaaagtattgctagtgctggcaggcggttttgtggttgtgggaggagccttatccttggctgcgtctgcaaatccggacgggcttgagtggtccattgagaggatcacaggctctgcggaacttgcctcctcaggggcagtccatgcggcggctgagaggatccagagtatgacatccatcctcccggattactccattccaaaccagggagcggcattgggcacttccgtgtccgggatctttggggggatcgcagtgattcttctgtgtgccagtctctgctggctgcttcggctgtttggaaggaaaggaagacatgagcaaaatcagtgaggccgtccatgagctccatcatttggatgctatggcctcaggagacggatggatcaacaggatccatcccctttgcaagctgttggtgacggtctggtacatcgctcttaccatgtcatttcaggtttatgatctgacaggaaccttgagtatggtcctttatcctctgaccatgatgacggcggggggagttccggtcaggagaagccttaaaaagttaaagccggtgttgctgctggtctgtgtcgtgggaatcgccaatccctttattgaccggagcgtgttgtttcagctgggtgccgtcccggtaacgggagggatggtatctatggctaccctgatgatgaaaggggtgtttgcggtgctggcttcttatctgctgatcttgaccacatctatggaaagcatctgttatgccttgcgcctgatccacatccccaaaatgatggtgactatggtattgctcatttaccgttacatcatcgtactgctcaaagaagcagaacggatttcacaggcatatgccctgcgggcgccggaccagaaggggatccgttatcatgcatggggcccgctgctgggacagcttttgctcaggagtattgaccgggcccagacagtctatgagagtatgacgctcaggggatacgacggcagcttttatccagcagagagaaggaaagcggatacaaagagtctggcttttctggcaggatggatctgtctgacttttatgctcaggtatattcctgtgttcaggcttatcggaacagtatttgggtaatctgtggagggattatgaacagtgtagaattaaagggcctcactttttcttatgaaaggaaggctgcagagaacagaaacaacgtgttgactgatatcagcttttcagcagccgaaggggaaacgatcggtttgatcggagccaacggagcagggaagtcgacccttttgaaactgctggtcgggctcctggcagactacaagggagacataaagattggcgggaccagggtggagaagagttctctggctcatatcaggagaaagacagggtatgtattccaggactcggaaagccagctttttatgtccaccgtatacgaggacgtggcgtttgcgccgcgcaattatggcctctcagaggaagaggtaaaaaaacggacaatccgtgcgctggaaaatgtccatatggaacagatgaaagaaaagcagatctacaggctgtccggagggcagaagaagctggcctccattgccaccatcctgtccatggagcctgatgtgatcctgttagacgaaccgtctgtagccctggacccgagaaacaggaggaatctgatccgggtcctcaatgaactgccagggacaaagatcatcgcttcccatgacctggattttatttatgatacatgcaaaagggttatactgatttcagacggcaggattactgctgacgggccggcagaagaattattaaaagacaaagtacttctggaacacaacggactggagcttccgctgtcattttccagagcacggtaaggaggaataaatcatgaccatagcagaggtgagcaaaaggtacgatatttccgcagatacgctgcggtactacgagagaatcgggctgatcccgcccgttccgagaaagcctaacggtatcagggattatgatgaggaatcctgccagtgggtggggctgatgaagtgtatgaggaaagcaggagtccagatcgaggcactgatcgagtacgtggagctgttccggcagggggatgagaccatcagtgcaaggaaagacattctcgtggaacagaggagacgccttgttcagaaaatggacgacatgcaggaaactctggagcgtttgaactataagatcgagaagtacgaacagggaaagatgacggtgaaacatcagcttcaggagaagaagaaacaaaaggaatgaccgataaagtgaccgataaagagaatataggagaaggctgccgatatcaaattcggcagcctgttttgattatggaaaatatctacaaattttattgctgtacctctgttttctcacagatacacagaaaagaaaagttgtccgcagtccgctcaaccggcctggcatccagtgtgattccgatggtgctgttttcaggcagacagatctgcagggaggtgctataagcagtgcggcagtccatggcatgtaaaagtttctcttttacatcctgtatctgtggttcatcagaacagaaaaaagcttgcccggtgagagcttgttccagcgtctggagagtatacccgtattgctcaaagaagcctgtagaaagcagcttgaacttaatgtctccattttctaccccaagcagggagacactctcagggagatactccagcagatgttccatctggctgcggaggctgactgattcggagatatccatgatcactccctgcaaaaaccgttttccctgatatttcatgtatttgctctgatcaacgatccatatgtatccatgtttgctgagcatccggtattcaagattcgtgctctcatctttttgttcaagctctactacgccgtttgaaacgagagcacggtcatcaggatgtaccatgttcataaacttgttgtcaaagcggtcctgaatttcttctcgggtgtaaccgaaaatctgtaaaaaccggttactcacatagaggaattcaaaaccaggcgtgtcggcacaccgatgatagccacccggcatgtcattatttaaaaaaaccagctccttgttcttgcgcatgagcatactgttccgttcggccagctgaagctgtacacccataggttctgaaatatccgtacatgcgctgataatggcaagccgtccgtcctcagcctcgatcactttgcctttgtccaaggtccagaaccaggtgccgtcctttttcggcatccggtaggtggtcgtatattcaagcccggcatagtattccggaccgatatccttggcaacctgctcccggtcatcgggatggatcgtgttgatgaccttgccatcaatcgccctctcaagctcttcaaaggaatcgtaatccagcagccgcaccatctcgtggttggcaaagtaaagaggaaaaccgtcttcgcagtagccgccgatcataccgccgggggacatctgggcaaaaatagaggcagcggtacgccggttatcttctgtgagtttcataaaggaagggtcgttttccgagatatggacaaccgctgagagtgcccgctgagacgcagccagcctctgttctctgagcttctgctccgttacgtcgcttacagaaccatagtacagcctttggtcgtcctgttctttcagcagataaacatgcatatgcagccagatggtatccccattgtccttgagacggcgcacgtcggtttctgccccgtttaatatgctgcagtcagcacggtcaaacagatcgaaaacggcttcatggtctgctttataaatactttcaataatggattggcgctgttcttcgagatccacagagttggtccctgtgatcttaaagtactgttcgttggcccgcaccagctccaccttttttccgtgaacattgtagaaggcaacaccgcccatgatattgttgagcagggtctcactgaacacattctcatttaacagttctttgatgtgcaggcgttccagctggcgggctttgataccccgaagatccagattgttttcatccgcgaggagaggctcaaacactttcataggcataggatgataaaagtaataaccctggccgtaggtacatcccatatccaggagataattcatctgttcttttgtttctacaccctctgctatgatcttaagtcccataaagcgggccatactgataatggcttccaggatgccgtagccttttcccgcactctgctcgtccatctcaagaaacttcatatcaattttcagcacatccacatttacatccttgagcatatttaaggaggaataaccgctgccgaaatcatccatcagcacagtaaatccagaggcacggagctttacgatggtgtcattgatcagttcgtattcttccgcgtaggcgctctctgtgatttcaatttctatgaggctttgatccaggctgtatttttggaccagatcctgaaacgtctttacaatgtccagagagtagatatcaactctggaaacattgacagagatggggatggctttgtgtcccaggtcgatccaatgcctaacggacctgcacaccagatcccacacatagagatccagattagtgataaatccattgcgttccagcaaagggataaaatcgcccggagggatcatgccgcgctgcggatgaatccaacgcaccagggattccaggccgatgatcttaccggtggccatgttgcatttcggctgagcataaaaagtgaattcttcttgttccagtgcatgctggatctcagaaagaagaatgtggttgtttttcatcttctgcatcatacggctgtcataccggcaggaccgttgattgtaatttcctttgacggaagacatggcgatcgctgcccgatcatacatggtcctgacaggggtatggcagtctgagatgctgtacaggccaaaagcaggaagaaaacctacattgccctgataattttttatatatcccatgatctgatgctgaaggcgggcaatcgaagcatggtcatcgggaagaatgatacagaaatcatcatctcccatataacctgcgatccctccgtgttcattctgcgcatttttaagatggctgccgatgtcgattaggaattggtcaccggctttctgcccgtaccattcattaaaaagtttgaaatgctctatatcgatggccatcagacaatagggcttgtcacccgaatgcttaagaaattcactggccttttgaaggaaaatattttttctgtacaagccggtcagatagtcaatggaattggatggttttattttactgtcctgagagaccaaactgcttaactctttttgcttctgttcttggatatcctggacaaaacaaaaaataatctcatcgccgttctcgctgtgtctgattgggactgcggtctgggaaacccagcagtaactgccgtcagtttttttctttcggaactgtccaagcagcaagggggaaggggtagcatcctccagccgttctgcaatggtatctagattccaaaaatccagaaaagcagcggtgtcctcagagtggatcatatggcgggctgtatccttaagcagttctgacagagacccatcttctgctaaattgacatatttattagacctatgatacagggtcttgtaggtattttttgttaggtttagttcaaaaagttcgtcataagtagacagatcggttaggttataaaacagatttttattcccctcataaatcgatctggacaggagtacatggcagactccggcatcgggccagctgatcgtaccagtatttacttccacccattgattcagctttttgttataaaacagagtgctttcattgtccggtacattcagagggcagccgcagcagggggaatcttccgcacaaaaagtctcataacagatatcaccgcagcagatctcgggaaaaatctgttgaagttctctgttaaagtgaacaattctgtaattttggtcaataatatagatactggtttcagaagtaaaattttttggattcatatacctgttcctgtcagacaacttcactataattttcactactattatagtattttttagtgaaaccagtcaatgaaatgtatgacattttccacatgatttccgttcggctcttagaatgcctcactccaatcatgtagaaaatggacgtaatgtctgatggagaagggcttctgtcaaaaaggagcaacttttcgaaagttattcaccactatttccgtcgcgcttttgaaatgcgctcctccaatagtggtaaataactttcgtggagcagccccttttgactcacatcaacctacattttatatgccttctgattagtacaattcaaaagaacaacagccatctccagcagacattacgtccattttcaccagttcggaggccttgcattcgaagggacgttagtttttcttcttgaagtaaagactcgtaggcggtgcgcactgcgcagtgaggctgtctgagcgccagcgagttccgaacgggccgccggagaggctttgctgaaagttagaaaatcttacgtccctgagacagcaagccggagaactggtgaaaatgtcatagaaataagcgaaaagggtcagaaataatttgacaaagaggatgaagctgaattataataatccaaaaagcgtgaatgaagaaaagtaacatagattatcgcttccagtgaacgggagacagtggaaaccccgcagagtgaatttatgtgaagaacacttcggagctgcaatctgaacgtccaaaggatcagtaggtgcgccgcaggctgtgcgttattcagcataccagagaggctgctttggcggcaaaacaggtggtaccgcggactttacagttgttcgtcctgaaatgaacttttaggatgggcagctttttttgttacattaataaaagaatgaattatgcaaacgatttgaagtaaaaggagaaaaaaatgtcagatatgtaccgcagcaaaacaatggatcagatttccgaaggcgatatcgggtcccagttaaagatcgccggatgggtggaaaacatccgtgaccacggcggagtgtcatttattgatttaagagacatgtacggtgtgatgcaggtcgtgttaagagacggggatcttctgaaagatgtaaggaaggaagaatgcctttcaattgaaggagtcattgaagaacgtgatgaggaaacctacaaccctaagatccctacaggaaccattgagctggaggcacacaagatcaacgtgctgggaaaagtatacacagacctgccgtttgaggtgtcaagttccaaggaaatccgtgaggatgtccgcctaaaataccgttatttagatctaagaaaccgcaaagtaaaagataatatcaagttccggtcggaagtcatcagctttctgagaaaaaagatggacgatcttggatttatggaaatccagacaccaattctctgtgcatcctctccggaaggcgcaagggattatatcgtgccttccagaaaatataagggccagttttatgcactgcctcaggcaccgcagcagtataagcagctcctgatggtgtccggcattgacaaatactatcaagtggcaccttgcttcagggatgaggatgcccgtgctgaccgttctccgggagagttctaccagctggattttgagatgagctttgcgacccaggaagatgtatttaagattggtgaggaagttttagctgagacatttaagaagtttgcgccggaaggttctagcgtaacagagacaccgtttccagtgatcagctacgagcaggcgatgctggaattcggtacagacaaaccggacctgagaaatccactgcgaattgtggacgtaacagactttttccagagatgtaccttcaaaccgttccacgacaagactgtgagagcaatcaaggtccatgcaaacctgtctaagggattccatgaaaagcttctgaagtttgcccagtctatcggtatggcaggtcttggatacctggaagtaaaagaggacatgacctataaagggccgatcgataaatttatcccggatgacatgaagaaagagctggctgacactgcagcacttgaggccggagatgtgatcttctttatcgcagccagtgaaaagctcgcatgccagtttgcaggacagatcagggatgagcttgcggcacgtctggatctctgcgaaaaagacgcataccgcttctgttatatcaacgacttcccgatgtacgagaaggatgaggagacaggccagactgccttcacccacaatccattctccatgccgcagggaggtttagaggcattgaatgaaaaggatcctctggatatcctggcttaccagtatgatatcgtgtgcaacggagtggaactgtcctccggagccgtgagaaatcatgatctggacgttatggtcaaagcatttgagatcgcaggatataatgaggagacactgaaagaaaagtttggggctctctataatgcgttccagttcggggcacctcctcatgcaggaatggcacctggaattgaccggatgctcatgcttttaagaaatgaagaaaatatccgtgaagtcatcgccttcccgatgagcggaactgcacaggatcttatgtgcggggctccgggagaagtgtcagagcttcagcttcgtgagacacatattaaagtcagagattaagtgtggtattttccacatggtttccgttcggcttttagaatgcctcacaccaaacatataaaaaatctagaaagagtaacgagtaaagccgtacattcagaaatgaatgtgcggctttctgcatataaatggtaaatgaataagcaatttacgggaggaagcctttttgggaactcttcttcagatcatattcatcaacctggtagtgtcctttgacaatatcggagtcattgcccttgccaccagggggctttcagaacaccgtgcaaaggctgccaggaatctgggagtctggctttcaattttactcaaaatgatctttacggggatcattggttttttatttcgtattccatggctgcatatccggatcattggcggagccatgctgttatatgtgacttacacaatgcttaaaaacagcccggaacctggccaggcagaatataaacaaaatgaaaaggataatttttggatggccattgtatctattgtggcagccgacgtgagcatgagttttgacaatgtcctggcaatcctgggaatcgtctcaaaagacggcactgccatggggataaacgacctgctgctgatctttgcaggccttgccctgtgtgtacctgtactcctctggttcagcggaacaatcgccggatggatggaagaattcccaattctcaatgacatctgtgcgggatacctcgtgtacactggcgtgcggatgatgatggaggatgagtttgtctctctgttcctgcaggagatcaacttttccattgcaggtccgtgtgccgcactggccggaatccttgtggcatgtttcaaaatattttccgaagagaaagagtttacctatcactgcggaaaaatattgatcgtctgcatgactgctctggccgcctatgcggtcatggatctggccgttctctcttatctgagcacagacccctcaccaaaagggattgagctgagtctggaggcactgtacggattcgtgccaaagggagtcaatgcagtccatctgacctccatgtcatcgggtatcctggaactgtgtgtcgctgtctatgccgcggatgtcatgaaaagatttgagcacaggccctttttaacaaagttcttccagacagagcggacactgctgcgtctgcttgcctttgagacattgatctatgcggcggggcttacgttaaatttcggtttgggaaaactgaacccatgggtgtttctaagcggctttatttttgagcttttgcagctcagtgtttacgcagctgtgttctgtatgttctgttcccgctgcaaaaacaaagcattgggactgggactgagtttcttgttcctgttactggaagccgttatctcctcggttttgatgctggatgagaccagtatcctggcgggtatgtttccgaattattacctggaaaacctggaggcccatatgaatgacctgatctttgtcatgcgggggatctttatgtcggcactttatatcatgcctgccctgtggatcggttccggcagggtgagaaggtgataacacacaaagttggcatggtttttgctctataaattatattatggaacagtgtatcagagggaaattgtaccacagtgtcttccttgagtttatgtattgaattcggtacaatataggaaaatacagatacaaatgaggagtgcagagggagaaggatatgaatcggaaggagaagatttttcagtatctgtcaaatttcgggcaggtgcagacagacagcggcaaaagcccggaaacggattctggttttctggcggcacagctcgggctggaccggagcaatgtgagcagagacttaaatgagctggagagagagggaagggtcataaaactgcagggcaggccggtgaaatttgctgccagcgaattttaccgggagcccgtgatccaaaaacagaaaaaagcagagtttcagtttatgatcggggaaaagggttcgttgaaaactcagatcgaacaggggaaatccgcagtgctctatccacccaatggacttcacactttgctggcagggcctacaggaacgggaaagacaacatttgcggaaaagctgttccaatatgcgaaagccatgaaagtgatgaaggataatgctggattcatcgtgtttaactgtgcggaatatgcccagaaccaggagctgatcctttcacagctgttcgggcataggaagggtgctttcacaggggcggacaaggacaaaccgggattggtggaaaaagcagacggagggatcttatttttggacgagattcatcgtctgcctccgtatggacaggaaatgctgtttctcctgatggacaaggggtgttacagaaggcttggggagaccgaagaattgagaaaggccagtgttttgatcatcggcgccaccacggaaaatttgaataccactctgctgaaaacatttttgaggagaatgccggtagtgatccacctgccagccttggagcagaggcctctcattgagcggctacgcctgattgaggagttcttttccgcagaacaaaaaaagatcggtgcccctatccaggtgtacaaagatgtggtcattgcgcttcttttatacgcctgtcccggaaatatcggacagctgtcggcggatatccagcttttgtgcgcaagggcatttctggagtataaagtggaacagaaggatgtggtggagatcaactttgagatccttccgccgtatattcagaacggacggctggaatcgcccaaacggaaaagcgacctgatcgagtttcttcagtattcggaagattaccatatgtttatccatgaccaagaggataacggtggaagcggagagaatctgtatattgagatatcggagaaatacgaaaaatttctggaccagggaaggtcaggcggggagatcagcaatctgattgaagacgatttggagcagtatatgaatcatcttctgaagaaatataatttgaagaaagaccattatgagaagaagaatctgctgaagattattgacgccaaagtctactatgcagtggaggatatccttcagtttgcggagatcaagctgggaagaaagatgccagagaggatcaaagtgggaatcgccatgcatgtgaatgccatgacggagaggatctccaaaggtatggttttgaaggagaaggaactccatgacattgtcttaaaccacccccaggaattccagaccgcaaaggtgatgctccgtctgttggaggaagagctgtcgattcaggtgccaaaacaggagatcggatattttactatgtttttgtgcgccatggatgaggagacaatttacccaaagatagcagtcattgtcatgacacatggggaaagcaccgccagcagcatggcggaggtagcaaacaagcttttaaataccgatcactgcagagcggtggatatgcctctggatgttccagcagaagaggcattggaaaaggcagttgccctggctgaggagatcgacgaaggcaagggggtgctggtgcttgctgacatggggtcgcttctgatgttttcagagatgatcgagaagaggaccggcatcccggtgaaatctgtccccatggtttctacaatcatggtcattgaggcggtgagaaaggccatgctcaggggagccgatctggagaagcttgcaaaggagcttaaacagatcgggaaagtgttcgacaggcagagagaggggaaacaaaaaatacatacgatcattgtcacctgttttaccgggcagggtactgcgctgaaactggctgagatcatccgagatatgatccctgcggaaaagcagggacagttccggatccggtgtatggattttgaaggttcagaagctgctctgaaggcatcggagacagaggaactgccctctgcggatgccgtggtggggactgtggatctgaaactgcccggagtgccatttatttctgtggacagatttgtcatgggagacggcatcagccagctgaatgagatcatacagggcggatccgaagttcttgaggcggaacctgcccaagagccggctatggatgaaaaactgctggctggtacgctggaccagcttttgtactttttgaatccgaaaaaaatggcggcacaggctatggaggcactcagggaggcagcgaaagatctgcatgtggagatagataaggagctgacggtaaggtatgtcattcatctgtgctgtatgctggagcgtctgattcaggaagaggtgctgccgaacaaggatacggagcgtttaaggagagaatatggacagatgttcagggcaatagagagaagtcttagtccgcttgcggactgtttgcatttgaaaattccagagtcagagactgcatatttggttgaaatgctcttagaagaattttagtctatatgaagtacataattttagaaaagattcggtatttctagaaaatgacacggtattcttagtgccaatcaaatggctggattattcaaaagagatgaaaaaacaataaaaaaacatattaataatgtatttctaaaggggaaaagttgagaaagagaacaacacgcaaaaagtgcgcgaagatggaacattgtttaacgaaggacagaaattgtttgatgaccatacacttattgcacttacaattatgattgcagaatcaaatccggaggaaaaagatatgatgataagtgtaattgtaaattgtataacataataaaaattaaagaagggtcgggacattctattatggaatgtcctgtttttttatgtcataggaaattcctacggaacctcctatgacataaaaaccctccgcgaggatgcacacgaaatgcgtaagaaaatcaaagacaatgtagaaaaactttccttaacacactaagttggcatggttcttgctttatatataagtgagaaacacaaaacggaggtgaaagtatgataggagtgttgcttgtgacccatggggagttcagtgaggctattattcacagcatggagctggtattcggaagacaggagaaactggaggctctgactttgaatcatggggacgatgtgaaggaattgacaagacaggttaaggaaacggcagagaaattaaatgacggagacggtgtcatcgttttggtggatctgttcgggggaagtccctgcaatgtgaccgcctcctgcctgaaacaggagggaattgagtgtgtcacagggctgaatctgcccatgctgatatcggtgctggaaggcagggacggaagtaaactgtcggagcttcccaatctggcgatggaagcgggaatgcacggtatcgtcaacgtaaagcagatgatcggctgagtgaaaggagtgggaaagctatgaattatatccgtatagatgaaaggctgatccatggacaagtattgctgaaatggctgaaaaagacaggatgccggaagctgttgatcgtagaccagtctgtggcggacgacccggtcatccagagtgtcttaaagatgtcagtgccggacaccgtaagagcagaatttttaacagttgaggaaggaaaagaggcgatagaaagggagaaagaagatgtcctgatcctgctcagaaaattgtctgcggcggaaaccctggtgaagagcggcatctctgccgggtccatcaacatcggccggcttccttacagcaagggaaaggaaaagatttgtgataatgtatatgtttcagaagaggaaaaggaggagatgaaaagactgttgacacgggggatcagaatctttgtccagatggttcccgacagcggggcggtaaacctgacggaggcagaaatagaaagaggggactgaaatgacagagttcatgcttttgacacatggagactggggaacttcactgctggaatcggccaggatgatcgttggaaatatccatggagttcatatattccctctctatccggaagatgccctggccgattacacagaaaagatcagggatgtcctggataaagaagacggacgtcagatccttatgatctctgatctgaacgggggaaccacatccaatgtggcagcagtgtttagcagaacatatgaaaatgtatcggcggtatgcgggcttggaatggaaatgatgatcgcggcgtcagagcttagagaagagctggaaggcaaggaacttgcaaaagccgttctatcgtggactgcggaaaagaacagggatttagagtgtgattgaagaataaggaggagattagcatggcgaatatttcattgatcaggatcgacagccggttgattcatggacaggtcatcaccaaatgggtgaagatcgcgaaggcaaaccgcatcatcatcatagacgatgaactggcacaggatgattttatggcaagtatttacacggcatcggcaccgaaagggatttctgtggagatcatcagcgtggacgatgcgttaaaaacatggggagaggaccagatgggaaaaggagagctgttgatcctgtttaaggatgcacagtcctgccacagaatgtataagggagggcttcccatgaaaaagcttcagatcggaggtcttcccagcgcatccggaaggaaaacgattctgagggccgtatccatggatcaggaggattttgaaaaactgaaagagatcagtgattcggggtcagaagtgtacatccatatcatacccgaagaaccgaggatggattttgagaagattgaaaagaagatgaaagaataggaggtttaccatggtattagcattagcggtaatagcgggactctggtattggatcggccagagcaagatcggatatacctttcatgcagttatctgccagcccattgtgatggcactgccgtttgggatcattgcgggagatgtgacgactgcgttaaagatcggagccagcgtggaaatggtctatatcggaatggtggcggcaggagccaatatcccggcagacgaatgtctggcaggggtcatagccgtacccattgcactgatcaacggcattgatccgtctacagcggtgactctggcagtgccgtttggtctgctgggagtattccaggaccagatcaggagaacgatacaggcggcctttgcccacagggcggataaatatgcgctggaggcagacacaaaggggattgagcggtgcaccatactttatccgatgctgctcgggtttgtgttgagatttccgccggtgttcgcggcgatttacctcggttccgatgcagtccagaagcttttagatgccatccctgagtggctgacccacggtctggccgtgaccggcggtgtgctgcccgcccttggatttgcgatcacgatcttcatcataggaaaaaatatttatataccgttttttattgtcggctttttccttgtacagtatctgaagatcaatgtaatggcagcggccatttttggtacctgtctggcactgttgatcaccttcctgcgcagggaagctgtgaaagaaatgaatggaggtgagtgatgatggaacaggaaaagaaagcggcagcagaagaaaatgaagaactgctgaccaaaaaagatatcaataaaagctttaaccggtggtatgtcagcgccgaggtatccaattcttatgagcgtatgcaggcggtttccttctgctacagcatgatcccatgtctgaaaaagctttataccaaaaaagaggatcttagtgaagctctgaccaggcatctgaacttttttaactcccagggaacatggagcacaccaatccacgggatcactatctccatggaagaagagatggccaagaccggaaatgtttccggctctgcgatcacagggatcaaaacaggcctgatgggcccgttggcggggattggagataccattgactggggaacgttaaaaacgatcatctacggaatcgcggtcacattcggaatgaccggaagtgtcctcggggcagtgattccgtttgcatttacgatccttacctattttatcgcaaaaggtttgtggaatcttgggtataagatcggaaaagaatccgtcaaatccattttaaatgcaggatggatcaaagatctaatctcaggaacgagcatccttggtttatttatgatgggagcactgagcgcacagtatgtctcgctgagcacaccggtcagctttaaggtggcgggctcaaagattgcgatccagaccatactggacagcatcgcacctgggctgttacctctgggaatcgtgttcgggatctattttgtgctgaaaaataaaacgcagaaatatggattgatctccatatgcattgtagctgtatgtatcatcggttctctgacaggactgttttaagaaaggaaagaggtggcattttgatcatttcaatgggtgaattattaaagaaagcaaaaaaagaaggctatggggtggcggctccaaatgtgtttgacagcctgagtgtaaaagcatgttttgagacggcagacaagttaaaggctccggtgatcctggactgtgcggggcttccatttctggaagaggtggcagatcttgcaagattttacgaaagaaaatattccaatgtgccggcggctttgaatctggaccatgggggaccatatgaggaaatcgtctgtgccattaagtttggtttcagttccgtcatgattgaccgctccacacttccctatgaggaaaacgcaagtgaggtaaaggaagtcgtcaagatggcccacgcagcgggggtttccgtggaggcagagctgggccatgtgggtcaggggtttgaatatgagtccaccagagacggcgggctgacagatccgaaagaagccatggactttgtgaaagagacggggatcgactgtctggcagtggcggtgggaacttcccacggggcatataaaggagaacctcatctggagtttgagcttctgaaggagcttcacgaaacaattccggttcccctggtgcttcacggaggctccggcacaggggacgacaacttaaaaaaagcagtggaaacggggatccagaaggtgaatctatttacagacctctgtaccgctggggtgcagagtatgtgcgggtacctgggaatcgactggagctgcatggcagaagggaaaggtagtacggagcttgccaatatgaaagcaaatatgtgtgacgccggattagcagctaaagaagggtatgcccgggcactggaacactatatgaagctgtttggcggagaaggacaggcttagaggaggaatagatgcagaacttcaggtttatgagtcccacagattttatttttggaaaagacacggaacttcaggtggggacggagattcagaaatatgggaaaaaagtcctgttccattatgggggaggacacattaagaaaaatggattatatgacaggatcataacttccatggacgatagcggaattgaatacatagaattgggaggtgtcaaggcaaacccggatgtgggactggtcagagagggaatagaaatctgcagggaagaacaggttgattttattttggcagcagggggaggaagtgtgatcgactcagcaaaggcaatcgccatgggagtttcttatgagagagatgtgtgggatttctttgaaggagaagcggaaatcccggaggcccttccagtgggagtgatcctgaccattcctgccacaggaagtgaggccagtaatacaacagtcgtcacaaactcagcggagggacatttaaaaagagctgtatccagcgatctgctgaaaccggttttttcaattatgaatcctgaactgacctattctcttccggcctatcagacagcggcaggaggagtggatatcatgtcccatgtgctggagcggtattttacattagagccggactgtggatttacggaccgtctttgtgaggcaacactccggaccgtgatccagtgtctgccgaacgtactgaaaaaccctaatgattatgcggcgagagcggagcttatgtggacagggacaattgcccacaatggaattctcggagtgggcagaatcgaggactggggcagccatatgctcggccatgagatcagcgccctttatgatctgacacacggtgctactctgtccattatcataccgcagtggatggaatatgtgtatcaaacggatctcactcggtttgtaaagtacgccgtcaacgtgtggcaggtggaagaagatttttatcacccggaacggacagcgcttgaaggtatgaaaagaacaaaagaatatttccgctctgtaggaatgccggtgtcgctttcggaggcgggcatcggggcagaagggattgaagagatggcagaaaaatgtacaaagtacggagctgtcggtgggtttatgaaactagaaaaggaagattgtatgacgatctacaaaaatgcaagataggaggcagcaaatgcagagagaaaagatgaggttttctgtactgacagagaaaggacatgcagaggtcagggagagaaaactgccggaaatagggagtaaccaggtgctggtaagacagctggcatgcaatatctgtacgacagattacggacaatggctggggctcagggagcatcagggttatcctatggccggaggacatgaggggtgcggtgtgatcgagatcctgggaccggacgtcaaggattttgcagtgggggattatgtttcaatcgcttatgacggctgcggggaatgtgagccgtgccgccgcggagatgtgcttcactgtaccggtatgtcaggcggtcagaggtcagaggatggctatctcggcaattttggctttgcggactattgtgtcaggaataccagaagcctgatcaaaatgaatccggagcttaagccggcggaagctgcatttctggagcctttggctacggtcgtaaagggtcttaaaaagcttcaagtcagacctatggaaacagtggcagtcattggggcaggcaccatgggacttttaaatgcactggcggccagagcaaacgggtgcagggtccttgtcacagaactgatggaaaagaagctgaaaacggcggaagctatggggtttgagaccattgatgcaggggcttgtgatccggtggaagcggtgaaagagctgactggtggaactggagccgatgcagtcattgttgccgtagggatcacggccgccaatgaccaggcgcttgctatggtaaaagaaactgatggcagaattctgtttttcgcggcagggtatccggcgccggagctgaagattgattctaacattcttcattaccgcagactggaattgttcggtacctttgccgcagattccattgacttttttacagcaggggaaatgttaagctctgggacagtggatgtgtcaaagctggtggagccagaaacatttgcgctggatgatatacaggaggcattccggcatgcgtctgagcctgggaggtatagagtcagtgttcgtttaaatgaatgagttatcgtgggaagcacgcccacctgaagggtataaaatgcggtgtgccctgtgggtatgagttatctagcactgtctctgccgatgataggagacctttccaaagccggatggagataacggagaaaaactatttttatgcggcaggaaatctctttcaaaactaactatttgtcatgccctcttcacctgatatgaaaaagaatctgtttattatataattatgtgacagggggagaaggaaagtgggaaaaaagggattattactgggattgttactggctcttgcgctggcagtgacccacggtaccatgctggcggcaaaaacagaggagtctgaggcggaaacaacagagcagcttttaacggacaacataggtacaacggaagagaatacggcggaaacaacagaaactacaaatgtgatcacaacagaacagaataagaagccagaaaaaattgagatgcagacaggaaaaacaaccaagaagaaaatggcgcaggctccgctaaagaagacagcagatgggcagacacttttggatgtaagcgcgggaagtatcgtgatcaagagtaccggggcttccgggggcggaatagcagatgagacaagcctgaatccaaaaggataccggatcaccggcagtacaacgacaaataatgtggtggtagaaaagggagtcactacggatctcaccctggataatgtgagcatcacgaataatgcagcaaagaaaaactgcatagatgtctcccacgccaatgttacgattacgttggtgggcgacaacatgctttcttgtggtatgataggatatggagctttagtgaaggacggaatggacgatacagaactcacgatacaatgtgagaatataaaagagggacatcaatgcaaaaaaaatgattgtggttctctggacgtgaagggtacagtgttacatgccacagcaattggaaacagcaatgtgaacaaggaaaaaccacaagagaccggagttgcaaacttaatctttaaaggtggtatcatcaatgcaaatgcaggagaacatatatgcgcaatcggtgcagcgtgcggctccggtgactttggaggctacgcaaaaaatatccgcatagagggaggaatcataactgctttaggcggggaatattgtgctggaattggaggaagttttgcctgtaaagttgatggaatctatattacaggaggtactgtctatgcctcaggagggcaaaattccccgggaattggttcaggtggtggcatagactatgcttatccttccggaactttcgacatatcaaatatcgtgatcagtggcggggatacagtggtgaaagctgttggggacaaagccacaaacatgccaggaattggctgcggaaaaccagacgataatcccaacaatcctggagtggcaacaaatgttgttgcctatcccaataccggatatcagggttatatacaagacggaatttcagagacggaatatagttttagcaaggaatcaccatttcaggaaaaacagaatatcaaagtagacaagtattttaccatggtttatttcggaccatttcgtgatgaaaataagattgatcctgttacaagcgaacagatgggagccaatcatatcattagcaaaaccggagggaatgcttttacggaagcacaattaaaggaattagctaaaactaatggaaaagacaaggatggaaatgctttttctgtgaatgattttctgctgacggacaattctcagatagaagccatcaatgaagccaaggtaaaaggaaaaaccggggattttctcttgacgatctccacggcaaataaaaccaacgttacgatcaccgtgtctctcaggggaaacgggattgatgcggccggagatagtgacgggagtgcttttgagatgattggagccaatgatattaaaaaagaaaccggaggaagtgcttttacagaaaatgaactaaaacaattatgtgatgtcaaaggaaaagacaaagatgggaataactttgagctgaaagactttaagatcgatgagaacgaattaaaggctttaaatgaggcaaaggttaagaaaaatacagggaagtacccgctgacctatcaaacaccggacggagagagtgtgacagtggaagttttacttacagggacagtggaggtggcttttgatacggacgggggaaaagaagttcctggaaaccagaagatcgacagcggaaaacaaataacgaggccagaaaatccgaagaaacaaggttacatctttgaaggctggtactacataaacaaagacggtaaggaagccgagtggaattttgaggaccctgtttatgaaaatatgacgctgaaagccaaatggaaagaggagccaaagactgaggcggcttcaacaacagggacaacagcagaggaaaaaactacgaaagcagcatccacggtggaaaaagagagcacggacataccagactgggaatacagtaaacgggaaagatcggtaaagacaggggaaacggttgctaaaactggtgaccaggctaaaattccactttttattactgtgttaggcatttcactcgcaggaattgtatttgtcagcaggaagcaaaagaaataaacattctaacagtaaatcaggaagccggcaccgccatatataatcagcggtgccggctttgtaattatgtaatgtaggagcttaaagttattccataactcccacttcatccggcacgatcacgtccgcctctgtgcaggcaagaatgtcgtccaccgtatagccgggagcaacttctctgaggacgaggccctcgtctgtcacctcaaaatagcaccgttcggttacgatatcagtgacacatttagctccggtaagaggaagtgtacattttttaagaatctttgaagcaccgttcttctcgcagtgatccgtggcaacaatgatttttttcactccggcacagagatccattgctcctcccatgcctggagcaagcttgcccgggatcgtccagttggcgatatttccttcctgatcaacctgcagagttcccagtacggtggcatccacatggccgcctcggatgaaagcaaaagaagtcgtgtggtcacagatgcttccgcctttgataatagaagcgggctgtcccccggcgtcgatgatatccgggtcagcatcctcccattttggggtggagccacagccgacaataccgatctcagcttccagccatagctctacaccttcaggcaaataattgacacacatcataggaataccgattcctaaatttacaaaatccccgtctttgaaaaactttgcacaacgggatgcgatcagtgcacgtcctgtaagttccgccattactttccacctccttctgcttttgccctcgcacgctgccacatagggcagaaaggtttcttttcaccagttcttacataaaccatatcggtgataggagcaggcacgtcaatctcatcaggtcccagttctccaacttcgaccagctcttcaacctcaacaatgacaatgtctgcggcaaaagccatataactgttggtggctcttccagtgtaacggaaagcaagatttccgatggtatcagctttccacgccttaatcaaggcgacatccgcatggagcggaagttccagcagatattccttgccgtctatggtcaatttctgctttcctttttcaatatccgtacccacgccggtgggggtaaggcagccgccaaggccggctccgccgcagcggattcgttctgcaaaagtaccctgggggacaaactccacctttaaatcacctgcgaacatttggtcccgggcttccgggtttaaaccaatgtgagttgtgatgagctcctttaccaatttttcatggatcagccttccaagtccctggtcaggcatgccgccggagacagctatagccgaaatgtctttgacacccttttccaacattccagtaatcagctcttcggcagagtgttctccatgccagtctccaaacatgatcgtctgtccgtcatggatttttgcgattgcttcttccttggtcactacttttgagatcaatctcgttacctcctttcagtgcaatgcctatttcccctggaatttaggtctccgtttttccataaatgcggagcagccttccttgaaatcttccgtattggaacactcatgctgtgtcggaatttctacatcctctaaatagcgctcgtaatcagagaatgcggcagcatagatctgctttttaacattcttataagatacctgagggccggcggccagcctcttagcaaacttggcaacttccgcatccagatcttcctttgttgtgaccttgtacacgaaaccaagatcttttgcttcctgtgcgtctacgggacgtccggttgcacaaagttccattgtcttcttttcaccgatctcttttgccaggagataggcaccgccggtatccgggacaagtccgatgtttgaaaaagccatgataaactttgcgttgtctgccgcaatgataagatcaccggaaagggcaaggctgaaacctgcacctgccgccgcgccgctgactgccacgatcaccagcttgctcatggatttcaggccgttggtgactttgccgaccttgccgatgagtccatccatatttatctcaccgccgcttttgatcagatcataaaaataaccgatatcacctccggctgaaaatgctttcggcgctcctttcagtacaacgaccctggcatccggatctgcctcagccttttcaacaacatagataagttcatctgccatctgttcatcaatggcgttcaggttcttaggatagtccatcgttatagtcgcaattccgtctgccacatcataatgcagtttctgaagttccatcgcaaaccctccttttatggggcatttcattgtctggatacgattgaaaaaatcctcctttctcatctgtattgatacctatattttactcttaatgacagataaaaacaagaataatcagactatttatattgctattatagtgttatttgttttgataaaaagcttctatttttagtatactaataacaaaaagctaaaaagggagaaggacagtgaacgacaaagtgtatgaatatgaatcattaatttataaggcaggtgagactggcggtgcctatgtaatatttccctatgatatcagggaagaattcggccgcggaagggtaaaggtacatgccacgtttgacggtgaaccgtatgatggaagcattgtaaatatgggaattaagaataaggacggtacggtctgttatattatcggcctgagaaaggacatccgccaaaggatcggaaagcagccgggagaccatgttttggtgaatgtaaaggaaagggagtagaacaaaatggaacaacagaaagtttttcaaatcagtttttccaaaatatatcctcttctcgtgaacaaagctataaaaaagggacggtatagagaagaagtggatgaaattatgagttattcaccactatttccgtcgcgcttttgaaatgcgctcctccaatagtggtgaataactttcgaaaagtggctcctttttgacagaagcccttctccagcagacattacgtccattttctacatgattggagtgaggcattctaagagccgaacggaaatcatgtggaaaatgtcatacgatggcatacagtttacagccagaaagaattggaagagattcttgaaaagccaatcagttataaggaattttttgaaaaagcaccgcaactgaataaacatagaattcttataaaaggtactatatgcggtgtaagggtagaggaggttaaggaccctctgatgcgggaaattcgatatcttgacaagctcattgacaagctggccagaggaaaaccaatggataaaatactgcggaattaaatctcattctgttattagtcgtccagcagggaggttcttatgagaaaatgtattcactgtgaagaacaaatttatcttgaggatacaggagagattatgaaataaggaaaaaataacagacacgggtacaccccgtgcctgttgctattcaaccgtaatctctccacagataagctgaaagctctcggtgaccatgcccagatagtcttcgtctaccaggacgaccagtgtgtctccggagtgtacaacggtgcttcccttggcgatgatctcatctttgccccggctgatggtgacgatgaggcagtgctctggccatgccacgtctttgatcttctttcccacggcaaggcaggttgttccgacgacaaaactggagagtacctttccttctgccgcgtccgttgtctttaatcccttttttgcgaggatgcggccgagaaggctctcatagattggctcgcttttcaggaggtgggcgatgacataggctgtcaaagacaccacagccagagaaaggaaatgttcaaaggtacctgtcatctccgcgatcagaataacgccggtgatgggagctctgacaatggcagtaaaaaatccggccatggcaaggataataaaattaatgatatagtcctggctgatgcctgtaagttctgtgacagaggttccgtagatagagccgatgtaggcgcccaggatcaggagtgggaagaagatacctcccggtgctccggagccaaagctgacagctgaaaacaaaaacttgccgatgagcagaagtaccatagtcccgatcagaagatgcccggtctccaggcgttcgatcatggcatgccctcctgcaagaacagaaggaaggcagtagcacagcacacccgatacaagaaacgggatcacagtcctgtactctggttttaggaaggatagttttttgtagacatcctgtcctttcagcatgacccagttatatagagcaccagctgcccccagaatgatccccagcaggatcagcaggccgtaatactttaacggaagggcatacttcagcctgaattcaaacacgggagataagccgaatacattttttgatataaaatctgaagtcagcgctccggcagtgacacagaccagcatggagctgttaaaattcttctggatctcttccagggcaaacatgatgcctgcaagaggcgcgttaaaggcggccgcaagaccagccccggaaccgcagacctccatgatgcgctcctttgtcttgctctttttggtaattttggcaagtcccttggcagccatggcaccaagctgcaccgaagggccttcccgtccgagagacagccctcctatgatggacagggttccgccgatgatcttggtgatcaaaacactgatccagttctggctgatatagcccttcatttccccctgtacctggggaataccgcttccggagcacatatcgtcccacttgaccagccgccccacgatcagcccaagggccacaaggacgataaaccagccggctatgtacaaggcatttccttttgtaaagtctatgatacggaataaaagagattccgcatggtttaataaaatacggtagatgacggcaatgcagccggcaaataaccccactaacagtccttcgaacacaatagacacggacagtgcgtggggattttccatctttgaagttttcatatatgacaatcctcctttgtcaattccattttatcacaagatgtgcgaaagaaaaagcagtcaggccatttacaaggtttgcaaaacggggcctgatagtttataatacacacgtatattataaagaaatttaagcaacagattggagaacaaagtatgccaccgattacaaatgactgggcggagcatctgaaagaggaatacaagaagccgtattacaaaaaactgtatcagactgtgactgccgagtatgccgcaaaaagtgtatttccgccggcagatgatattttcaatgctttccacctgaccccgttaagcaaggtgaaagtggtgatcttaggccaggacccataccacaatgtggggcaggcccacgggttgtcattttccgtaaagccgggagtacagacgccgccgtccctggtcaacatttaccaggaactgcacgatgatctgggatgctacataccaaacaacggatatctcacaaaatgggctgagcagggagttctgctcttaaacaccgtactgactgtccaggcccacaaggccaattctcacaaagatatcggatgggaagaatttaccgacgccgctatccgcatcttaaatgagcaggacaggcccatcgtctatctgctgtggggaaggaatgcccagaataaaaaatggatgctcacgaatccaaagcacctggtgctggaagctccgcatccgagtccgttttctgcgtccagaggattttttggatgccggcatttcagcaggactaatgaatttttgacagagcacggcattgagccggtggactggcagatcgagaatatttaggagtaaggcatgaacaaaattgtttttttagacatcgacggcaccctgtactgtgacgggatcggaatcccggattcagctttaagggcagtggaccagctgataaaaaacggatgtaaggcagtgctctgtactggaagagcctacggcatggtaccagagtcctatatggaacttgggtttcacggcatgatcgcggcggccggggcccatgtgatctgtggtggaaaagaactgtgcaatgaccagatatccgatgagaatctgcacaaggtcatagactatggcagagaaaacggcatcggcattatcctggaaggggtcaagggcagttattacgatcccaataaccaggatgagcactatctgaaggtggtagagcggctgagacagacaacaactccgcatatctatccgttggaacaggctgagaaagtgaataaatggacctatcaccatatggatccgggcgctaagaaatttgtagaagagatgacagaaaacaccatgaccggaattatacataaagaagtggattctgtggaatttatccccgcagggctcaataaagccaccgggatcagaatggtgctggatcattttaagatcgaccgcaaagacagttatgcgtttggggacagcgccaatgatatcgagatgcttaactatgtacagtatggagttgccatgggaaatgcagtgcctgaactgcttagacaggccgagtataagacggagccggcggacaaggacggactggctctggggcttaaacgtctggggctgatcgggtaggagctgcctatgaaaaaagtactgaaagcatttgctacagtccttctgctggttctggtctttatgatgccgaacatggtatcaaccatccagagcagcatccatcagaaggaacaaaagaaaatcgtcacggaggtaaagaagacccacagagacctctttgagacaaaatacggataccagaatctttcccaggagggaaaaaggatctacagcctgatgtattacggcatttataactggaagaaagaaatcgagattgagcaggtgacgacaaagcgcatggaagacatcctaaagcagatggaagccgactgtccggaactgttctggtttgatttcaccggaaatattaaatggaaaacatcgggcaccaagaaaaatgtggtctttgtgccgcattatattttcactgagaagcaggcaaaacagtacgatatgaagttgcagaagaatctgaagcggtatctttcctatgccgatcaaaaagatacagaatatgaaaaagcctacacagtctacgagcatttgatcaaagggatcacttaccgggagggcagcaagtacaaccagaacctgatcagcggtctggtccatgaagaaacggtgtgtacaggatatgccaaaagcctgcagtacatttaccagaagatggggatccggtgccaaatggtctatggaaaagcaaatggacagaaccatgcatggaacctggtcaggatcgacggagtctactgctatgtggaccctacatggggaagcaacaaccagcatatgtccaggggcttttttggaatgacgcagacagaacttttgagaggacacacactggacaagggactgaaagttcctgagtgcagttccacaaaaaacaactattatgtcaggcagaaccatcactataaaaagtttgagctcggaaagatctataaccagctgtgtgagcaggagaaacaggggcagatcagctttcagctgggaagccggaaggaatatgagactgcatacgaccagctgattgtggagaagaagatcttcacattattaaaaagagttccgtccatagggacaaaacacatggaagtgacttattatacggaccgtcagttatacattatgacatttaattttaaagaggaatcatgaggataaacatatgaaaaaatttgcgaaacgattactggtgatgcttacggcagtcgtgctggccacagcgggaactgtgcctgccaaggcagcacaacggggccttgccaccaaggaagatacgaaagcggataagccttccatcaacggggtatgcgggatactgatggacgccaagaccgggaagattctctatgctaaaaatattgacaagaaaagctatccggccagcatcaccaagatcctgaccactttggtagccttagaaaataatgacgatctatattccacagtgaaattctccagctatgctgtcaacagcattgagccgggaagcactcatatcggcattaaggcaggggaggagatccccctgatcgatgttttatacggcattatgctggaatcggcaaacgaggcctgcaatggggttgcggaacacactagcgggagcatcaaaaagtttgctgccctgatgaacaaaaaagccaaggagatcggatgcaagggatctcattttatgaatccgaacgggctccacaatgacaaacactacgtgacagccagggatatggcattgatcacaaaagcggcccttcagaatcctatgttcagaaagatcgcatgttcctcccattacttcatgtctggaacaaataaagaaaagaagggcagagaactctggaaccaccacaagatggtgaaacaaaccatgtttttgtataaaggcgtggagggcggaaagactggttataccaccagggccggcggaacactggtaacatttgcgaagcgcggaaacacagagctgatctctgtcatccttcggggaaatggatacgaactgtaccgggatacgatcaaactttttgattatgggtttaagaactataagtctgtagctccgttttcaggtttgaactgcgatcttgcacagacacaggaaaacccggtgacccagatggcatgcaggatagctccatatcagcttcctctgggcggcaatttaagtgacttctcagtacttttgacaaaggatcagagtccttccaatctgcaggtttacactgaaaataataaaatctatgcttcctatgacggggaagatctgggatcaaccccgatcagctattagcattctagaacgaaaaaacagacggacacaatgttgagccgtctgttttttacttcatgagaagaacttgttattgtagatcctgccgctgtacaaggatatttaatgcttctggaactatagagatcctgacaggcagcccttcgcttaagatctcgccatcatagtcaatggcgatctcgctgtccgcggaagcctgttctatgaaaatctcctttgtctgaaagtattctatggatggatgattctgatggctgccctggagccatttgacgatcaggtctggagtggtcagaaactcaatcttctttaggatcagaacatccagataaccgtcggagactgaagctaatggagccgctgtagggaatccccccacgctctttgaattcgccaccaaaaagaccatagtctcggttgtgtcggagaattcattgctggtatatttaagcaccatatttttggagaactgtttcgggagttctttgatgccctccagatagtaggccatctttccaaggacagctttcttatccttcggcactttgtaggcgatatctgtgagcaggcctcctgccagaacgttaatgaaatattcatcgttgaccttaccaatgtctactttttttgactggaaattctgaatcatcttgcagaattcctgtgcggtctggggcagattcatgtaggtggcaaagtcattgacggtccctgcggaaatgatggcaagagggatattgcttccactggtcacaagcccgttggccacttcgttgagtgtaccgtctcctccaacggagaccacatagtcgtactcgcccggttttaattctgctgcacggtattttgcatcatcttttttctttgtataaaaaacatcaatggatgatgtgatctgctttaagattagtgttgacatgatttcctgcaatgtagcttcaacattctgtttccctgatgagggattgatgataaataaggctttcatgagatcctccttgttataatttacttaaagtttaccatagaaagggctgggtcgcaatgtgcaaaaaatgtgcttacaatgatttccgcttgtatttggaaaagatttattctaaagtgaaaggtgaacgaaagagaaaggttaaggagagatgagggacgagaattactataaagacctatgcccatatgtggagagggcaaagcagggggatgagaaagcatttgaatatctgtaccgccatacatacgaccaggccaggctgtttgtgctcaatttctgcggaaatgtcacggaggccgaggacattctccaggatgttttcatggacatttaccggaatctttcgtcactgaaagataacatggctttctgtgcatggcagagacagattgcctaccggtgctgtctgcgccatgtgaagaaaaacagtcagagcgatgttcttggaaatgaagtggtcgatttgatccagagtgtatcatccaaagaagcggaaccccaggatgtgatcctggaggacgaaaagacgaagattctctaccagtgtattcagagtctgccggataaacaaagggcggctattatattaagcgcgctagaacaactgaaaatgaaggagattgccgagatcatggactgcaatgtaaacgcagtcaagaatcttttgtttcacgcacgtaaaaaccttaaaaagcagatcgaaaatcttcccaaagcagatcgggaggcgctgaagctccgaggattcggattctttacgctgtatccgctgctgaggggttctttgccactgactggcagtaatgctggaaaaggggcagtgatcatcaagaaagcagtgcttggcgcagcggtcgcagtgggagtgggaaccgccagctttgtaatgcttcaagaggaccctcttccgtcagcagactttggggggattgagactccagaggtggagttggagaccaaagggctggaagggatcaagattcccaagaagcccaaaccggttgtaaaaaaagtggttcccgcatcgatccgcagcgtgcaggtggagaaaaagacaaagcgtcttgccatctacgtggctggggacgtagactatgaaaagacctatgcggcatcaaaagccggaaagcggcttgggggcctgacctgtgatacgggtcagggaattctttatctgccttctaaaacggatacctttcgcctgcatctgatggataaagcgggcaacgagcggatatttgaatttgataaggattaagagatatatagttttaaaattcaaggcagctggaacaggaatgttccgctgctttttgtctaactttttttctttcgtgtttgtcttataaggtcaattaatatgataccaggattgtccgataaagagtgcacttgagggcagaagaaaggaaggaacgagaaatgaaaaaacaatgggtgaaacgtctggccgcggtttcccttaccgttgttgtcggaaccgggttgggaacgacgctgtgggcacaaggagaggaaaaagatgtaaatttgggggggggggtnnnnnnnnnnnnnnnnnnnnnnnnnnnnnnnnnnnnnnnnnnnnnnnnnnnnnnnnnnnnnnnnnnnnnnnnnnnnnnnnnnnnnnnnnnnnnnnnnnacgagaaatgaaaaaacaatgggtgaaacgtctggccgcggtttcccttaccgttgttgtcggaaccgggttgggaacgacgctgtgggcacaaggagaggaaaaagatgtaaatttggggggggggggtacgaagttcaaaaaacaacctctaacgaagataaagaagaccgctcagagataacagaagaaacatttcctgcagaaacagaaatgaaacagcaattgaaaaaaggaatcggcatctcagagaaaagtactgcaaaaaagagggcagcaaaaaaagagaatgtagtcaatgcttttgctgaaaatggacaaaccaagctggatgtaagcaaaggagatatccggattactgccaatggagcagttgggggaggactagcagaaaatgagacagaattgaatgaaaaagggtattggataacaggaacgacaactctctataatattgtcgtggaaagaggtgttacggctaaaataacgctcgatcatgttgatattacctgtgcaacttcagactgtatcaatgtatcacacgctgacgttattatcacactcataggagataatcatcttctctgtactcaggtagaagcaagcaatgcactgacgaaagatggaatggacggcagcctgactcttcgatgtgaatcatcgggacaaaaaaatcataggtgtgatgattcctgcgggtcactgatagcaaaaggagagggagtgcatgttggggcaataggaagcagtattaaaaaccgaaagacatccggagagtccggattttcagattttacgattcagggagggaatattgaggccctgggaggactgcattgtcccgctatcggttctgcatgttggacagaggcatacactggtgcttatacaaaagatatctatataacaggaggaaacgtaaaagcgatcggtacagaatttggttcgggtattggatcaggatatggaaataaggtggagggcatttatatatcgggtggaactgtggaggctcagggcggagcgaatgctccagggatcggcgcatccaccggagatggctcagtcagcaaaaccacggaaaatgtctgtatcaccggcggggatacagttgtaactgcgatcggtgactcagcgacaggtatgcctggaataggctctggttctgggaaacagtacgtttccaatgtcacggcagaaccagatgacaaatatcagggatatatacaggatggagtatctttgacagattatacgtttatggatggaaccccgtttcaggaaaagacagatatcagggtagaaaaattttatacacaagtatattttggcccattccgggatgccaacggaattaataagggtacgaaagaacagatcggtgccaatcacgtgataagtaaaaccggaggaaaaggtttcacagaagaacaaatatttatacttgcaaaagtgaccgggaaacagtcagacggacaaaatttttctgttgactcattatctttgtccgatcaggaacagctaaaaaagatcaatgaagcaaaagcagcaggtaagacaggagatttcccattaacttttactacgcccaatggcactgaagtgagtgtggtgatctcgctacgggatgacggcactgatgcggaaaagtttgatccaaataatccaactgtaactgtaggagccaatgattttcaaaaagaaaccggcggaagtgcatttacggaagaacaggtaaaagaatatggacagctcaaagcgaaagatgaaaatggaaacaacattgaattagatgattttacggtggacaaagaacaattggataagatcaatgaggcgaagacttcaggaaaggccggagaatttgaattgacatacgaagctccggatggaactaaagtgacaattactgttgggttgacaggggaatacgatgatcttacagaaaatactgaaaacggtgagatgattaaagggaagaatgtcataagcaggaccggaggagatgcttttacaatagatcaaataaaagaactgacacaggtgaaagcggcagataaagatggaaatgaaatcccaaaagagcagctggaacttgatgatgaaaatcagctgaaactaatcaatgaagcaaaaaaagctggaaaaacgggagactttcctttgacttttcagacaccgggaaaaacaaaagtaacagtgacggtctttttgcgggatagtggagcagatgcaggagattatggacctgattctggtttttcattcataggagccaatcatgcggtttcaaagaccggcggaaatgcattctccacagatgatatcaggaagttgtgtaaagcagctgggaaagacaagaatggcgataatacaccggtgatacccgaccagaaacaattagacgttatcaatgcggcaaagacatccgggaaaacaggaagtttcatcctgtctttttcattaaaagacggaaacaaaactgaggttacagttacattgactggaactcatcaggtatcatttgatacaaaaggaggccataatacacctgaaattcagcatattgatggcggcagctgtgccacgaaacctaaagatcctgaaaaggcaggatacatatttgagggttggtactatatagaggatagtggaacagaaagaaagtgggattttaatacgcccatacatcaggatatcgtactgacagcaaaatggaagacagcgcccaaacaaaatacagaaactaccgagacggaacaaaagaatgggaaaaaggcaaatactgtatcaaaaaaagttccagataagaataacaacaaatggaagtacaaggaagtatctcatagtaaaaataacagcggacgagtagcaaacaccggcgacaaccgagaaggtgtctggatcttgggaagtatagcaggcataaccggtgcaggtatctggttttggaaaagaaaaaaatgtaatagatagtaagcaggcagccgaacaatttggctgcctttttgatgtgtttcgattttatctgaaagctgtcatcattatctaaccatcaggaacgatactaactcttataatgaatttgtttacatgatatattttgtcttaggaagtgcacttgtggacagaagaaaggacggagggaaaaatgaaaaaaccatggatgaaccggctggcagcggtttcattgatcctggcaatgggaactggaacgattgtaaatgctaaggaagaggaaatgactggaaatccgggggggggggtacgaaatacagcagataaccccgaatgaaacatctgaaaaaccagccgatacggatgaatcagaaccagctacagccactgaaaaagagggagaggttccaatctcatccgaagctgaaagaacagaaaaagtaaattctactgaagtagcgtcaaagaagccagtcaagaaacaagaaaagaaagctggaacaaagagggctctggctgagaatgggcagactttactggatgtgagtaaaggaagtataacgatcacagagaatggagctgtcgggggcgggttgtctgataatgagacggagttaaatcccaaaggttactggatcacagggacaacatcctcttatagggttgtagttcaaaagggagtaagaacgcatcttacactggataatgtaagtataacctgtaacacttatgactgtattactgtatctcatgcatacgtggtgattactttgatcggacacaatcttttggattgtaaagacccgagaagtgagtctcaaggaggatgtgctatagggaaagacggaatggatggagaacttacgattcaatgtcagaaatctggagagaagggacatcaatgtaacgatacctgtggatcattagatgcaaaaggacataacttggatattaccgccataggcagtacatgcagaggattatacagcggagtagaagaaatgggatttgctaattttacaataagaggcggcaatatcgaagcacagggaggtgagcattcctgtgggattggtgccgcctgtgtatcccagattcaaagcgacggtaaaggatatgcaaaaaacatcaggatttccggaggtaatataaaagccacaggaaccaatcacggttctggaatcggaggtggatatggaacaaaagtagaggggctttatattacaggaggtaaggttgaagcggtcggaggtccaagtgcaccaggtatcggagcatcatataatgacggcgcctctaaacaaacgatggaactaattgattttaagatcagcggcggggataccattgtcattgctgtaggagatgcggcaacgaacatgcccggaataggatctgcaggaggtccgtcttatgtgacagacgcagttgtagtccccgattttggttatcagggatacattcaggatgggacttccctgacaaactatagctttgtggagggaacgccctttaaagaaaaaaaagagctgaatgtcagcagattttatacgaaagtatattttggaccatttcgtgacgcaaatggtatcgaagattccaccaaagagcagatcggagccaatcatgtaatcagccagaccggaggggaggctttcacagaggagcagctaaaggggcttgccatggtgacaggcaaacaggagaacggttcagactttccgtatgatgacttaacctatgtggacaaagaacagctggaagctgtcaataaagccaagacagccggaaaaaccggagagtttccagtaacctttacaacacccagcggaacaacagctacaatcaccgtctttctgaaagataaaggaacggatgcggcggagattcacccggaacagatggaaccgactatagccgctgatgaccatgtcactgattcaggaggggatgcctggacagatgaagatgtccagaagctttgtgatgtgaaaggaaaaaatgagcagggagtcacctatgatcaaaagaatctgacaccagatgcggatcagctggcagtgatcaatgagaaaaaaacagcctccataggaggaaagtttgatttgacctttacatccccatcagggaaaaaagctacagtccaggtgacgctaaaagcttacgatgaaactacagaggaaaatggagagatcatcaagggacgaaacatcatcagccagaccggaggagctgcatttacagacgagcagctgaaggagttttccggagttgtggcatgggatgacactgcggctccgatcgtaagggcggatcttgtcttaacggaccgggcccagatcgaagagatcaatcaggcaaaaaccgcgggaaagatcggtgattatccgctgaccatcgcaactccaaagggaacccagatcaccatccatgtatatttgagagaccagggcagcagccacgaggaaggggaagaagcctccagcatcggagccaacgggttcacaaagccaacggggggaaaactcttcacagaggatgagatcaaagagctgtgcaaagcgatgggaaaagatccatatggaaacaatgaggtgccatccgcagatgcagagcagatgaaaaagatcaacgatgccaaagataactaccgaacaggcgaatttccgctgacatttacattaaaggatgggacaaagactgtagtcaccataaccctgaccggggtacataaagtgtcttttgactctgacggaggagattaccagccggaagaccagatggtcaacggaggagaaaaggcttcagagccgagagagcctaaacggaacggatatacttttgagggctggtattacatcgatgaaaatggaaaagaaataaaatgggattttcaaacgcctgtgaatgacagcatgagactgagagcaaagtggagcagagagccggagccgacttcgacaaaagaaaaaccaacaacggataagaagcctaagccaaagaaaaaatcctcacctcagaagtggaactacagagagattacagaaaagaaaaggcggcgggttgcaaaaacaggggatgacagcagaatgttatggatacttttatgcctgacaggaggagttggaacagctgccggacttttcattagaaagagaaaattgaaatcataattttagaaatccagggtcaaaataaaaattttggccctgtttggttcatcagggaactaaccttatctggaaatatattctcttgaaaagtagaggacagtatatagtacttacagagaaatgtggggaggaaaatagatgagagaagcagatacgtggagtcaaatgatactggatgaattggatcatatgatttatctcacagatatgggcagttatcagcttttgtacatcaaccaatttggcaagcagctgctggggattggtgatgagacagaatatctcggaaaaatgtgctatcaggtcctgcagggatacagttctccgtgcagcttctgcaccaaccataaactaaaagagcaaagggtttatacgtggctgaaccataatcagatgctggacgaatattttgtgatcaaagataagattgtacatgagaacggaagggctctaaggctggagaccgcatataatgtcaccagtacagaacaggaaaaagaagaattaaagtttaaactgaccaatgaagagacattggtacactgtatccagacattaggagaatacgaagacatggataccgccattcatgaactgttaaagatcatcgcagatttctatcatggggactgtgcctatatttttgaagtcgatgacaacaggcaaaatataaaaaagacatatgaatggtgtaccgggcaggatcaatgcagggacaggcagataatatccagaaaaaaagcagaaaagtggctgaatcaactccaggaaaaaggagagttttacattccaaatcagaacggggaatctgccgggagcgagattttaaaacttagaggtgctgacagtctggcggcagctccattggcagaaaagggagagatcactggatttatcggtgtggataatcctaagatcaatacgcaggggcttcttctgctgagatccgtggcctcctttgtgttgaatgatatccaaaagcgcaggatgaagaaaaagtttgagcagatgaggtgtatcgacagcctgacaggtttggaaaaccggaataaatatatgcaggttcttcagcagatggaagatcagccagtgaaaaacctgggagttgtattcttaaacttgaatgggctgaaggtgaccaatgatacttacgggcaggcctacggagactggctgatttacagcacagcaacagcgctgactggaattttcaaagagcacgtctaccggaccggaggagatgagtacgtggttctctgtacagagatatccagggaagattttgagcgcaaggtctcaaaactcaggggaaatatagaacaaaacaaagagctcagcgtctccataggagcagtatgggattccggaaaacggggaatccaggaacagatcgcctatgcaggtgaattgatgtatatagaaaaacagatttactacaaaagaaatctgaatgtggaatataaccgtagatcagggatctcaaaatgcctcataagagatatagaaaagggtttgtttgtggtctatctccagccgaaggtgaagatcgagaccggtcagatcataggggcagaggcattggtcagaaagcttaggccggacggtaccctgatcatgccggataaatttatacctatgtatgagatggaaaatgcgatccgccatatcgatctgtttgttctggaggaggtatgtaagatcatcaggcagtggaaacagacagctggatcttccccgatgatatcggtgaatctttccagagtcactttgatggaaccggatatcgtcaacagtattctgaaagtttgccaaagccaccaggtggacccgtccaacatctgtatcgagatcacggaaagctcttccaagatccagctggaagagttaagccggctggcggaggagatcattactgcgggatttaaaatatccttggatgattacggaaccgaatattccaatctggcgattctgtccgctatagattttaatgagatcaagctggacaaaagtctgatcgaaagtctggagaccaatgaaaagtcccaggttctcgtcaaatatgtgattcagatgtgcaggacattaaaccatatgatccctattgccgaaggaattgagaccgaaggccagatcaatattttaaaggatttgggctgttgctgcggacagggctatttcttttcaaagccgatccccattcatgaattttctaaagcttatatccagccggaggctaaaactagctgacactctggctgttatcatttctcctttcttaagacagcaggttctgtagagcctgctgttttgttgtacacagatacaaaataaattgacattcaggcacggttgatataaagtgaaagtacataatcacatataagtgaaaaagtgtgcacatagtttgaaaggggaaaataatgagtgaaagaataaaagcactgaaacagtatatccaggagttaaatgatcagggggtgagatctacctatctttaccagtatgtagctgactcattgcgaaagacagaaaatgagccggttcagattagaagggcaaaagcattttctgatgtgttggctaaggtaaggttggaggttctgccctatgaactgatcgcagggagtatgctcggcatgtgcccggtatacggtgtccagatgacaaaagaagagcaggaacaaaagtccatacagacgatcgaaacgtatttaaagaaaaagaagagtgatgagaattttgacggatcccttaagtttgaggagggccatgcaaaaagctttgaagaagatttcacaagtaaaaaaagccggtggtctctgatgtcccgggtccaccatgacgccagtattgagtttcgggatcttcaagatcagatctctttgatggaaaaaagatatgaaggctgcggggagattgaaccgtatgagattggacgggagctggagcgggcatttaagattccttataatgaagaagataagaaactatacagtgaacttccgtggttcgtaggaaaccatttgaatctaaactatgaaaaggcattaaaaaaaggactgtcaaaactcagggaagagatccttggccgttatgagagtgcctcagacgcagacagcttagaattctatcatgcagccctcatctccattgaggcagtgagtacatttataaaaaggtatgcggatcaattagaccaatgcagcagaaagaaatctgtggaccataaacgaaggaaggaattagaagcaatggcgtctgtgtgccttaagatttcagagcagccggcagactctttctgtgaagcaatacagctgacatggatgctgcacatcattgcgaatatccagggcggctcagcgttatccttcggcaggctggatcagtatttatatccgttttatgaaaatgacagaaaacggaataagatcacccctgatgaggcaaaggagctgctggggtgtctttgggtgaaggtcaacgagcctaaaatgcgtacagtccagagcgttacgctgggagggatcacaccggatggaaccgatgcggtgaatgaattgacccgcctttgcctggagacagcaagagagctgagtatgccgtatccgaatgtgggactcagggtaaacaggctgaatcctggctggatctacgaggaagctcttgagactgtaaaagcgggatgcgggcagcccatgctgttaaatgatgatatttggatcccaaacatgatggagctgggatatacccagcagcaggccaatgactactacaatatgggctgcgtggagatcatggtcccggggaaacagcccaactggggagtcaccgaggcgattgcatttccggtgctcatcgaggaggtcatgagaaagtgggaagcaggaacagtaaaaatacatacttttgaggactttatgaaggcttaccttcaggagctggatgccgctatcgaggcagaccggcaggaggcggcggagaagagcgccaatatggctgggaggtgttatgatccgttttcttccattttcattgacggctgtctggagagcggaaaagatatgctgcagaacggcagtgagtgtccggtgcactggtctgtgtatgcctacggcatcggtacggcggcggattctctgtgcgctgtgaagaaatttgtttttgaaaaaggaactgtgacactggagcaattaaacaaagcattaaaggctgattttgcagggtatgaaatgctccggattatgctggaccgccagactccggcttacggcaacggaatcgaagaggtggacagtattgcagatatggtgctcacccatttttcaaaggcggttctaaaactgaataaactttcggatcgggataaattcgtctctacgctctttggctatttttttcatatttatcacggagagatcgcgggggcgaccccaaatgggagacataaaggagaaccgttcagtgatagtatggggccgggacagggaaaagatgccaagggccctaccaggctgttgaactcagttgtacgtttggacagccagtatgtcacaggaggatatgcactgaattttaaactgaatccgtccattttaaatgatcctaaggggaaacaggcggtggtcagtctgctgaagacctatattgcctccggtggtccccagatccaggtttacacaaccaatctggaggacataaaggatgcccagatacatccggaaaaacacagggatctgatcgtgcgggtaggcggatactgtgagttctttgtcaatctggacagagttctgcagaatgagatcatcaaccggacaatgtacggggaaggataaaatatgaaaaaagaaatcaagggactggtttttgggatacagcatttttccatccatgacggtgagggaatccgcagcaatgtctttttaaaaggatgccctctgcggtgcctttggtgccataatcccgaaggaatttccaccaggatggaactgcagtactttgagaaccgctgccgccggtgcggcaggtgcagggaagtattcaaagatttaaaggcagtatcaggagaaccagacagcataaaagaaaggtttgccgaaaactgtccgtacggcgctctggagttggtgggaagttatatgacagcagatgaggtgctttatgaggtgcgggaggatcaggcgttcttttgcacaagcggaggggggatcaccctgtctgggggagagccgatgatgcagacagactttgccctggaattgctcaagaaatcaaaagaggcagggttatcgacggcaatggagaccagcggttattcggaccagaagaattatgaacggatatatccttatgtagacgagtttttatgggacttcaaagagacagacagaagaaggcataaagaattgacaggcgcagataaccggaggatcttggacaatttaaaatttctctgtgaaaaaggcgcgtctgtcacgctgagatgcccggtgatcccaggggctaatgataccaaggagcactttcagggaattgcagatcttctgaaccggatggacggcctaaatggctgggagctcatgccctatcactgtctgggtacagcaaaagagaaacggctgggagagagcaatggaagagaattcagtgttccctcccaagaaacggtaagtcagtggaaagaaaaaatcatcaagtatcagcggaaagcttaaggctgttttacagcagcaggcgaacaccagaattagtgtgaaagaaattatagccacatcaatgaaaaagtgtgcattttgtcttgacagaaggattcgggaccgatataataagatcataaagaacataatcacacatagttgaaataatgaacaaaagtgtatgtgaaaacaaaataggagggaattattttgaaggtttacagacaggaaaaactaaaccaggatctgccggggatcattttgttaagccacggtccgtttgcggtctcactggtggaaacagcacagatgatttttggagacagtgaaaacattgctgcattttctctggaagcgggggacgacattgacaagtacagggaagcttttgtggacatgatagaaaagtttccaaaaggcagcctgatcatggtggatctgttcgggggaaccccgtgcaaccaggtgatgagatacatacaggagacaggaaaggtgctggaagttgccgcgggtatgaatttaccgatgctgatcaatgcggtcatgtccagagaagagcttgcaggaaaagacttcagcacagacacagtggaaaacgggaagaagggaatcttcagaatcgatgtggaaggattccttcatgatgacgatgaagatgagtaatcattcataagaatagaaaaggagagagcttatggcaaagaaattagcagtgagggtggatgacagattaatccacggacaggtggtaactcagtgggtcaatgtctttaaggcacagcatattgtcgtcatagacaacaatgtggcaaaagacaagatgcagaaaagtgtcttaaagtttgcggcacccccggatatcaaagtcagtattttctctgtggacaaagccgtggaagcctgggagaaaaaccagttcggttcaaaaaatgtgtttgtacttttccgggatgtaaaacagattgccgaactgcaggagaagggcgtgtcttttgaagagatcaccatcggacagatggccattatcaatgacagaaagcagatctacaaacaggtgggactgtcagagagtgaggcacagactttatttgacatcgagaggtccggagtgaaactgtacttccagatgcagcctacggataaaaaggaatccttggagatcatgagaaaaacatttccggatcttaactaatttatttacataggaggagagaaactatgacgattacaattttacaggctgtgctgcttggactattctgcggtatcgcaaagtgctgtgttccctatacagctggtgcttttatgttcaacacggtcattttcaacgcagtggttgtgggagcggtacttggagacatgcctcaggccatgatcatcggggcatccctgcagctgatctacctaggggtgatctcagcaggcggaaaccagccgtcagatccgtgtctggcagcctatatcgcgatcccggtggctatggcttccggactgaatacaacagcggcagttgccctggctgtgccagtgggactgctgggagcgcagatcaccaacttgatctatttgatggcaggattctttgcgcagaagggagataagtttgtatcggaaggaaatgcggcgggcatgaccagatggtccgttatctattgtgcaatcgcgaggatcatctgtttcggagttccggtggcagtggcactgtacttcggaagcggagcccttcagggagtattggacaatataccggcagcagtgaccaatggtttatctgccatgggggcatgccttccggcggttggatttgctatcatcgcaaacctgatctccaaaccaaagtatatcccttttttctttgcaggatttttcttaatacagtatacgaaaatcgggacaattcctcttttgatggtaggaggtttcctgacattcctctatatcacgttcaaagcaaatgattttcagggagagcgggatgaggacgatgaagacgatgacgatgaggaagaggaggcagtggagaaactgctgagcaagaaggacatcttaaaatcatggcttatttggtggtttagcgcggaaacctgccacagctttgagagaatgcaggctccaagcttttgtacatccttagttccggcactgaaaaagttttatccgggagaagaaaataaaccccgttacattgaagcactgaaaagaaacatgacattctttaacacagaggcacactggggcggcggaccgatcctgggactcacactggcactggaagaaaagaaatcccgaaactatgaggcaatcccaggtgaggttatcatgaacctgaaaaccggactgatgggacctctggccggtatcggagatacgatctcatggtcaaccctgatgtacctgctcatcggtttattccttccgctggcgaaaaaagggaatcctcttggcggtatcgggccgatcgtactgttgacggttatctgctttggaatcggatatttcctgacacagaaatgttacaccttcggttattcttttgctgagaacatgctgaaatccggtttggtcaacaagatcatcgcaggggccagtattttaggattgtttatgatgggcggactcgcatccacttatgtgacagtatccacaccggtgaagttcgtcacaagtgcatataccacaacccttcagtcaatttttgattctattattccgggtctgcttccgctgatcgtagtgctctgcgtatggggatacctgtctaaggtgaaaagaaattatttcgcggcgacattgggggttacaatagtctctttagtattgggatgcttaggagtcattatttaatccgacaggggatgagttattcaccactatttccgtcgcacttttgaaatgcgctcctccaatagtggtaaataactttcaaaaagtgtcacctttgttttaacagaagcccttctccagcagacattacgtccattttctacatgattggagtgaggcattctaagagccgaacggaaatcatgtggaaaatgtcataccacagggcacaccgtattttatgccctttcagggcttggcgcgctctgcgcgataaggtatactagatttatagattttaagcagaaaggcgtgggcaaattgagagaagaaagattcatcattaaagtggtagagatgcactataaacagggaatgtcacagctggagataggaaaaaagctgaatgtttcgaggacaactatatcaaggaccctggcacaggccagaaaagaaggatatgtacagatcaagatcaactatccagaaggggccatgacaagtacagagacgatcctggaacagaagtttaatttaaaagaggcagtgatcgcctgtgtaaaagatggtgatgacctcagtgatgaaattgctttttacgcttccgactatatattgagaacattgaaaaatcatatgacactggccctgacacggggggttacccttcagaagacggtagagtgcctggcaaaggacgtgagattaagattcctcaaggtggacgatgtaaatgttgtgccgctgatggcgaccaccaacattccgcccactgcggagaaatcctaccggctggcttattccaattacctgatcgatgaggtggcaaggatcatcaacggcaatggctaccagcttctggcgcctcagtatgtgacttcatcggaggtgaaagagcattttctcaatgaagccagtgtaaaagaggtgctggacctggcaaaatctgcagatgtcgcagtgatgggaatcggaaccgtcaaccagaattccgccatcatcaatgcgaagctcataccagtggaagaatttgagcggatgcaggaaaagggcggtaccggagagatcctctcccatatgatcaacaaagacggcaatctgatcgaagacgattttgagggcaggctgatcagtttaagcctggaggaccttaaaaagataccgatccgcgttggtgtggcatatggcatggagaagaaggatgcgatcttaagtgtcttaaaaggccagctgatcaacgttcttatcacagatgataatgtggcggagtatctggcaaaagtaaaactttaaactataaaatcccaaaggaaaatgttctttgggattttttcttttttataaggaaaggcagaaaaatggagaagtatatcaaacataagatggaagagaacagaccccacgcgtttgagaaaaaagtcatggagagggaaatggcaaagggagagccgagggtggcaatgttttaccagaaaaaccagatcccggcggaggatctggatctggcggttttaaggacagagatgaaaagagaaggagaggatatcacaaccagtgagatccaggagatctctaagatcattaaagtaaaagaccatatgatcaacatccacatataccggggaaaggacactgggaagaaaaagaatgcagtgttgtttatccacggaggggccttttttggtggggatgtaaagaccaaaagcaaccagtgcaggtacctggcagagcaggcggaggcagtggtgatctctccggaataccgtttggcgccggagacaccgtttccaggcccggtggaggatgtgatggggactctggactggatgacagaacatacggaagagttaaagatcaacggggataagatcgctgtcatgggagagagcgccggggggacactggctgccaactgctgtctgcgggatgaaaagaagagaatcgggcttgctgtctatatctatggggcactggacctgactccagcggagaagacaccgtatcaatgggattattcaaagtatgagatggatgaaaaacagaaggattacatcatgaaccggctgttccgttttaaagaactgacagattatatggaagaattatatgtgcagaatggttattccacaaaggatggagacgtgtcaccgctctatgccgaagatttatcgagaatgcccaagaccctgatggttgaggctgaattcgattactttaagatatgcaatgaagagtttgtcaaacggctcacgaaagcgggcaaggatacagaagtgatcttgtatgaaggactggaccacggtttttttgaccgccttggatcattgccacaggcgcaggactgtatcgacgagatcgcccaaagagtcaaagcaatgtaaaaaaaggcctctcatatttgaggggcctgcctgctttcttagagctctttccggtcataagttcctttgatacccagctgttcccggtactttgcaacggtccgtctggagatggaaatgcccttttctttcagaagggtacagagcttttggtcgctgtatggtttccgtggatcttctgatgccactaattgtttcaggaccgttttgatatctgtactgctgacggaagcgccggagcagggagacgcgccggtaaacagtgacctcatggagacaacgccgcatggaaactgaaggtattttcctttgatgccgcggcttaccgtggacacatgcatttcaatatcctccgccacgtcgttcatggtcatgggctttaagcagccgtggttcagaaagaaatcaggctgtcttttcagaagggcttctgtgatctttaagattgtatgcctgcgctgctcaatgctggccatgagaaaacggcatcgctcatatttcttttggaaatattccttcagctcagggtctttagtatccttgagcatctttatgtagtaatcattcagtgaataatttcccacccagtcatcgttcagctggatctcccactggtcttcctggacagagacaatgatatccggggtgatgtactcggtttttgcagtggaaaacccctgcagcggcttggagttcagattccggatgatggcaatgtttttccgcacatcggctgtgcagatcttcaggctccttgaaatggtgctgatatgtccaagggctatgtcatccagatgattcttaatgatctgctccaggatttctgtctttttcccttggatgtccagctgctttaacaggcactgggacagatccctggaaaaaatgccggcgggctccaggtcggagagtacctcatagcaccgtttgatctccttttcagggattgtgagcagagtagaaagctcgtgaaaagagatacggaaaaaaccgccggagtccagacagtcaatcataaacttcatagtctgccattcagctgacgaaaaatcattttggttcagctggtccaaaagaaaggtttttacctcctccgtattttcggccggaatatcaaatgcctggctgtcggaaacgggagcacaagaagaaggaggggaatagtccaggattggattttctatgtattcattctgaaggaactcagatagctccccgttgtccagcgacaagatattcagggactggatctgagactgggaaagttgctgcttttggttcagttccaggtttgtgcggtatgacgtatccaaaagaaatccctccttttctaatatgggatctaaaaaagttaaaaagagtcacggggtaatggagcttgttccaggagcaggttgcagtatttcatctggtccttggcattttcgagggcagttttcacggccgttgttgtgtcaggggcatccaggacagaaaccagctcgaacaggagcgggagattgacaccagagaccaggtggatcttcttacttgccagatacttcatgaattcgttgttgacacttcctccaaagatatccgtggctacgatcagttcctcatctggggagagttcctccatgatctttctgacgggcgtctccacctctgtcatgtcttccgtgtaagcacatagggtgcagacagcgtcctgagtgccggtcacaagttccattgcgtttttaataccttcagcaaatgtgctgtgggttgcgatcaataatttttttttcatctttgtcacctcttagaattgattgtatacagtctgggcatcatgctgacttacatcatgatatatagcaaatttcgtgccaaactatagtgtcaaagcagaggcatcttttcattattatatcacgattgacaaatgaaaagaagctggcataatgaagacaaaagtgaagattttaaaatgccatttgagggagagggatcatgttaaaagataaactgttatcttatattaaagaaaagaccagagagattgactttcaggctgtggataactcctgtactgccgatgcgatgtcggggattttcggtgtcaaacgaaacaccgtaagccattatttaaaccaggaactggggaaaagcctgtttaaagtcaacacaaggccggtgctttttttcagtgtcaaagagttcgaacaacggttttttccggttgagaaatctgtttacgtcagcttggatgagctgtttgaacaaaaaaagacccagaatcaggatcaggtaagaggtgaaaaagatcctctggatcgtatgatcggagccaggggaagtctgaaaaaagcggtggagcaaatcaagacatcggtattttatccgaacaccagcctgccgatttttcttcacggggacaccggcgcgggaaagagctatatggcccggcagatctatgaattttctgtctgccataaggtacttcctgagggtgcgccgtttatcactttaaactgtgcccagtatgcaaacaacgtggaactgctgtccagcagtctgttcggctatgtaaaaggggccttcacaggagcctatggaaccacaaagggtcttttggaggcagcggacgggggaatgctgtttctggatgaagtgcaccgactgaacaatgaaagccaggaaaagctgtttatctttctggatcagggaatctttcgccggatgggagaaaatgaggggtggcataaagctgacgtgcgcattgttatggccaccacagaagatttggattccaatttccttgacacgtttcttaggcgtgtgcctattgtagtagaaatccccgacctgacagaacggggtatccgggagaggctgcagttcatttatcagttttttatccgggagagccaggtgctggaccggagccttgctgtctctggaaatgtcctggacgcactggccggacacatgtttaaggggaacgtaggggagcttcagaatacgatcaagtacctgtgtgccaccatttacgcaaaggatcaggagcgggatgtgatccccgtccgtctggcagatctgccggatgagatactctcggagatcgcccaaagtgacgagagcaaaataaaaaagagccaagaggtcttgatcacgccggtttctgcggcggagacaatctcgcccgcagagacggaggagtccaggtattaccaggagctgtttgagaagctttcttccatttatgaagagttccaaagccagggctatgaggcggaacagtttgagaaacgctgtttccatgcggtcaatgatatgctggaccgtttgatctaccagcagagttcggagtcggacactatgatgatgcgctatgtgattagcagcgtacacgaggcgtttcgctatgtggagtacagcaccaatgtgcggttcggagggaatgttctgcatgcagcagccgcttattttttctatttaaacagccatccttcggaatatgagtctgagaaaaagatatcggaagaattccttacctatgccgcaggccattacaaacaggagacacacctggtaaaacggatgatggaactgttgtccgccaaaatggatctgaacgtgacagaggcagaattgttgccgctggttctttattttaagagtttgaacgtaagatcggcggaaaacaggacccgggccgtcatcctggcccacggctacgccacagccagcagtatcgccaacgtggcaaaccggcttttggaagaagtgatctttgaggcggtggatatgcctattgataagaagatggaagacattgtccggtggatgaaggaatatattgagtttcacgatatcagcagcggaattttacttctggtggatacaggttccttgatggatatttatgaggaactcagtgacgtgctccgagtgccggcagccattgtcaacaatatttccactcagatggcggtcaatgcagggcagatggtgaagcagaggtaccacctggaggacatcatatccaggctggaaaaatacaatcagacagagtaccagctgatctacccaaaggtggataaacagaaggttttactgacgtgctgtcttaccgggaccgggacagcggagcagatcagaggcctgatcgatgatagtatcccggacgacattgacattagtgttatctcctatgactatgaccagctaaacaatcagtccacggctgatgcgcttttggacagttatgatattctgggggtgatcggcacggtaaacccgcagctttccggcgttgagttcataccattggaggaagtggtttcaggtgcggcggacaggaagatggagaagatcctggctccggctgtcccggaaggcaggatcggtgagatcaacgaccatctggtcaggaacttttctgtgcgccagctgatcggatccctgacaatcctggatacagacaagatcatgaaccatatcgaagaatgtctgaaaaaatatgaagtcatgacgggacagcctctggccaacagtacaaagatcaatctttttatccatgtggggtgcttggcggagcgtctcatacggagaagcccgattgaagattatccctgtctgtcagaccttgaggaacagcatacagaggagatcgcaaagatacggagtgcttttagtgggatagaagatacctatagtgtcaaaatcccactgtccgagatcggatatatttatgatattataaacggaatttaagaaaaacagctggttcccggtgataaagacaaaagcgtgacactaagttggcacgctttttgttgtataaatgggcagatagaaaacaaacagctttatcatctggaaaggagaattacatacaatgattatttcaatgggagagatgctgaatagagcaaaaaaagagggttacggggtggcagcgcccaatgtgtttaaccgtgagaccatcgaggcatcttttttagcagcccggaagttgaaggctccggtgatcctggatgtggcttctgtccacgggatttatgagtgcgcggatctggcaaggttttatgcggcaaggtatccggaagtcccggcggcggtcaatctggatcacggcggaccttatgaggatatcatgaaagcgatccatgccggattcagctctgttatgattgaccgctctacacttacgtatgaggaaaatgtgagggaagtgaaagagatcgtaaaagcagcccacgcagtgggtgtatctgtggaggccgagcttggccatgtgggtcagggggatgaatacgaacagacccgggatcagggccttacaaagctttccgaagcccagtcctatgtgaaagaaaccgggatcgactgcctggccgtggcggtcggcacttcacacggagtctataaaggaacaccgcatctggaatttgaactgctctccaccttatcaaaagagatcgccatccctctcgtgctgcatgggggctcaggcactggggatgagaacctggcaaaagcggtaaagacggggattcagaaggtgaacctgaacacagatctgagtgaggcgggaaaaaatgccctgagaaaagctctggcggacagcgcaccgaagaaggataccaaagccacaggcgaatttgcgccgaaaaagatgaacatgcagcagaccatcgtggcaggggcggaaggtttccagaaagtgttggagcattatatgcagctgtttgattcacagaaccgatggtaggctatgacgctgatcgatagaaaacagccggcacctatgaaccatattttccggttttaccaactggaggattatttgaaagcggcagcggaaaccggatatgaaagcatcgatctctggacttgtgcggcacattatctggtggactccgaaggatatgaggatacgggaaggctcaggaacatgctgagagattacggccttaaggtggtgagcatgacaccggaacaatcctgtcctaaaccattccacatggcggccaggcggacagagatccgggaaaagactcaaaggtattttcagcatgtgatacaagctgcctcggagcttgactgtacaagagtcctgattacatctggatggcagttcttttctgaggaaaggcgggaggccttaaaaagaagcgaggaaatgatcggacatctatgccggtttgcggaacattacggcgtgtaccttactatggagaccttatcaaggaaaagcaccaggctgtgtaatacgatggaagacgtaaaacggatgatggaagcagtaaattccaggcagtttgccgtgactgctgacatccagacgatccataatgctggggaatccctgcaggaatggtttgataactttaaagaacggctgaatctggtacattttatggactataggaaggatgtttttacccatcttaaatggggtgacgggacctgcgggcttgaagagacattgaagatattgaaccgaaacggataccggggaccgctggtgcttgagtacacagacagtgtgtattttgaacatccggcggcggtctacgaggatacaatgaagaagttaaaaccatatttgagagcatagtgaaagaggtaagaaaatgggaaagatagagacaacaagatttgcggtgatagagcaggagcacacagtaaaggtgcatgagagaaagcttccagagcttaggccggatgaggtactgatcaagaacggtgcctgtaacatctgtaccacggattatggacagtggtccggtgccagaaagaatttgaaatttccaatggcctttggtcacgagttcagcggaaccatcgttgatatggggtctaaagtctccggatttgagatcggagaaccggtgggtatcggctacgacaactgcggacagtgtgaattttgtaaaaaaggacttacaagtgagtgtgtgactcttggagaaggacggaataagctgtcaccggacggctaccacggaggatttggctgttctgaatatgtgataaaaccataccgttccctatttaagatggatgcctccattaatccttctgaggcggcctttgtggagccggtggggaccgtctgccagggactcagaaaactgagagtttcttcgggggaaaagatcgtagtcatcggagcgggaaccatgggtgtgctgaacgccctggcctgcaaggcggaaggctgtgatgtgttgattacagagatgatggaaaaaaagatcaatgtggcacagaatctgggattacatgtagtggatgtgtcaaaggaggatccggtgaaagctgtggaagaatggaccggcgggcgcggagccgatgctgtcattctggcggtaggagccaccgctgccaatgaccaggctcttgagatggtgaaacagctgcatggaagaatacttttgtttgccgcagggtatccggccccagaactgcatgtggattccaacctgatccattaccggaaaatggagctgattggcacattttcggcggacgtttgtgattttgagaaggcggccaggctgatcagtgaaaagaaaatagacttgtcaaaactggtggaggcaaaatatcctcttgacagtgtccaggaagcatttgaagccgcagttgtgccgggggcataccgggtcagtgtggtatttgatgaaatatagaaggagggattttaatgatcaagaaactgagagttgactatcggctggtacatgggcaggtggcaatttcatggtccagggcgctgggggtagactgtatcctggtagccaacgatgaggtggcgaaagatgagatgcgccagtccatgctgagaatctcaaaaccccaaggtatcaagcttgtgatcaaatccatggaggattctattaaggcgattcagtcaggagtgaccgacaaatataagttgtttatcgtagtcaacaatgtgcaggacgtggagcgtctgactgacgctgttcctgagatcaatgatgtgaaccttggcgtgctcccggcagtggaaggcagcaggccactgagcaaggccatcaacgtgaccagtgaagatgtggagacattaaaacgcctgttgtccaaggggattcggatggaaatccagcaggtgcccacggaaaacgcggtgaaggtcacgaaaaaactgttggaaggttagaaaggagagaagggtatgttaacaaaagcgttgctggtggggctgatccttggcctctgtaaaatggaatatttcttaggatattgtatgatctgccgtccgattgtcatttccacactgaccgggctggtactgggagaccctgtccagggagtcatactcggaagcgtgctggagcttatgttcatcggctccttccctatcggagctgccgtcagccctgactatggttccgcaggagccatctgtacggcatttgctatcatcaccaccggagggaaagcagtggctacaaccctggcggtcccgatcgctctgctgggaggctttatctttatcggctgcaaactcatgaatgcggcattcggccagatgatgatgcgaaagatagaaaaggataacacaaaggcagccgggggaatctacctgtttggtgcgtttttcacaagctttattgtatattttctctatgggttcctgtcgatctatgcgggaagtactgcagtgcaggcggcggtcaatgctattccgaaggtagtcatcaatggacttgcttcagctgctaatctgcttccggcgattggttttgccctgctgttaaagatgatcatcagcaaaaagatggcaccttatttctttgtaggatttatgctggcagcctatttaaatttgccgaccattgcggttacattatttgcggtcatgctggtgctgatcattttatccaaccagaaacaaacgccggagacggttgaggcttatggaggtgacgaaaatgagttctaaattaaataaaaaagatttaaaacagatctttataaggtatcttgccttgaatgctatgaatgattatccggggcagatgcacaatggatacacatttagcctgatgccagcgatagataagatctacgacaaggaagaggacaggatcgaggctaagaaacggcatatggaatattttaatatcacgccgaacatcgcaggattcgctctcggaatatccgcagccatggaggaggaaaatgccaagaatccagattttgacgccacaagcatcaatgcagtcaagaccggtctgatgggtcccctttccgcaatcggtgacacattgtttccatctacactgaggatccttgccacgtccctggttatcggcatggcggccgggggaaatgtgctggctccggttctgtttcttcttatgtataacataccaaacctgctggcacgctggtatagtctcaaatacggctacagcatgggaacggagtttttggtaaaatccgaaaagtctggaatcatggataaagtatcctatgcctgttccgtggtggggcttatggccatcggggcaatgatcgtggccacggtcaacgtttccacaccgatcaccatcggcgatgtaaagaacggcggaatggtgctccagaccaccttggacagcatcatgccgaaaatgctttctttagggttggtgggaaccatctactggcttctgggcaaaggagttaaagtagtgccattgctgatcggaactatggtcgtgggcgtgattttgtttgccttgggcatcatcgcatagggggtactgaattgaaaaaacagaaaaaagaactgctggtcattggtgccgggaacattggcaggggtgtcattggaggactgttttatgaatccggataccgcctgtatctgtatgacattatggcagaccgtatggaacagttgagaaaacagggcacgtatctgatcgagagggtaggagccgagggaaaaaagagaattatagtaaaagactttgaggttctggactgttcggatgagagcgacttgatccggcatatggaacaagtggaccttgtagcctgttgtgtctatgaaggtgcatttgagagcattgccaaaaaactggcagaagctataaagaccagatccaggaaaatagatgcggggtattttaacatcctgctctgtgtcaatgccttgggagcgccggacttttttgaaaagaggctcagtgagcttttggcagaggatgagaaggcactagcctatgttaaggaaaagacagggatctgccaggtaatggtcgggatggcggctatgccgtcctccagggagctcatggagatggatccgtttgcagttacaacaaagcttgacggacatatcggtattgattcggaagcatttaagggggagttcccccaggtggaacaggtaggaaaggcagtcaaagcgaaagcccagatcttccgtaaggtgtatacgggaaatatgaaacactgtatgaccgcatttcttggaagcgccaggggatgtacgtatatttcagatacttacgatgacccgtggattgaggactgtacggccggtgccttttatgaggcggaggatgcagtatccagagaatatggttttacacaggaagagcggaaagagtggatagacttcatcatgaacgccccaaagaaccgcaatctgaaagatgagatccaaagggtaacacatggcccaaaagaaaagcttggcaggaaaaaccgatttacaggtccggccctgctgtgtatgaagcatcagattcttccctattatctggccagaggcattgcttttggatttttgtaccgggatgagagagaaccggagagtatcgagattaccgattatgtaaaggaacacggtatcagggaagctattatgaagtactgtggactatttccggaggaatgggagcttctacagttgattgaagcacagtacaaagaggcagtaaaacaacgttaagttcaggaggatatgatgagatataaacattttaaaaatgcaggtgtggacgtgtcagcgctgacagtgggcacatggggaatcgcaggagccaactctgcaggagtgacatggggagatgtggatacaagggattctgttgcggcagtgcgacggatgattgaaaacggagtcaatatggtagatacggctcccatttatggggatgggcattccgaggaagtagttggacaggcgctgaaagacggatatcgggaaaaaatttttctggcaacaaagtttggttcttatattagccattatgatgggaaatcggtaagagataataagtataattctgtggaaagagaaattgatgaatctctttccaggctgcaaacagattatattgacttctatatcatgcactggcccgatgtaaacacaccggtcgaggagactatggcggctttaaacatgttgaaggaaaaggggaagatccgttttatcggaatgtccaactctccgaaagagctgattatggaagcacagaaatatgcgaagattgatgtgatccagcctccgttttccatggtaaaccagtccgagcgggaactgatggaatgggcagagacacaggggatcggcacaatgacctatggttctttgggggccggtatcctgactggagccatcagggagtgcccggaatatgacccgaaggatatgcgacttgtgttctatccattttttaaggagccggagttctcaaaaatcatggaactactaaagacactggatgctatagctgaggaacacaacaaaccggtggcccaggtttccatcaactggagcacccaaaagagttttgtgggaacggcgctcactggagtaacaaatgctgaacaggcggatgaaaactgcagcgcgtttgaatgggagctgacagaggaagagatcaaaaggattgacgatgagattaaaagacttgatattgggtgaggattgccatgcagaaaagaaagattatcatccccaacaggagcggcatccatatccgcactgccgcagagcttgcaaacctatgtgagaattttgcgtgcaaggtgaagatctgctggagtggacaggagtttgatggaaggagtatcatggaacttcttcatgccaggatccggcagggagatgagatcatcgtggagactgatggggaggaagaggagaaagcggcagaccagatagaggaatgtattggctgctggagataagaaaaagaagatataatgaaaaatatacaatttcatacttttgataaatgcactccaaacgtcttggggtgcatttattgtatgttgtccgcataaacttatctatcaccggaaaagaaaaaaagtcccgccataacggaacttctcatataaaataggcctggcgggaatcgaacccacaacggccccttaggagggggctgttatatccatttaactacagacccataaaacacatcttctattgtaacgattcatttatgaaaagtcaatgaaaaaagatgcatggcgttgacttttttcttctttttctttaaagtagttaaatagggtctttctatgtttagccggaaagattgacagggaggtagtttatgaaagcaatcaatgatttcgtgtgggggcctgttatgctcacactcttgatggggacaggtatttttttgaccatacgtttaaggttcctgccgtggagaaatctcccctatgctctgaagatggtttttgtcaaagacaaaagcggttcgcaggacggggacatatcgggatttcaatcgttgatgacagctttggcggctaccatcggaacaggaaatatcgtcggagtcagcaccgcaatggtcatgggaggccctggggcgtttctgtggatgtggatcagtgccttattcgggctgtccaccaagtatgcggagagtgtcctggcagttaagttccgggaagtcaatgagaatggagagatgtgcggcggtcctatgtatgccatgaaaaatggctttaagatcaaatggatcgggctcatcctggcatttttctttgccctgtttactgtatttgcatcctttggcatcggaaatatgacccaggcaaattccatcgccgagtcattgaaagggctgtgggggactccccactggctgacaggcgcggtgatcgcactgctggcgctgtcgatcctgattggcgggattaagagcataggaaaagtatgcggattctttgtaccgaagatggcagtcttttattttatcatgggcgttgctgtcatctatatcaaccgggctaatctgggacagggaatcgcaatgatctttaagatgggactatctcccagagctatggcaggaggtgtcggcggaaccatcgtggcaggattattttcttccatgcggtggggaatcgccagaggtattttctccaacgaggccggacttggatctgcaccaatcgtggcggctgctgcaaagactgatcatccgtccaggcaaggttatatcaacatgaccggcaccttttttgacacgcttgtggtatgcagcgtcacaggactgatcgtggcatcttccggagtgcttggaagcgtggactcccacggcaggctgattaccggggctgcgcttacgatgaaggcgtttgagaaggcgctcggaccggcgggagaactgtgtgtcggacttgggatcgtcatgtttgcgttttcaacgatcataggatgggaatattatggcgagaaagcgctggaatacttagtgaaaaaaaccttctatattaaaatataccggattgtttattcctgtgtgatttttgtgggagctacggtaccgctccagctggtatggaatttctcggacacaatgaacgggctcatggcaataccaaacctgatatgcctgcttgttttacataaagtagtagtaaaagagtgttttcgttttgagcagataaagaaaggacgatgaacttatgaataaggtgtttgtgtttttagcagatggatttgaagagattgaaggcctgacggtcgttgacatgcttagaagggcagggattgaagtggtcatggtctctgtagggccttcaaaagccattacaggctcccatcatatcgaggtggaggcagactgtatgttccacgaagtgctggagccggaaggagctatgtatgtactccccggaggtatgccgggcacacttgctctgagggagcatgagggacttgcgaagctgctgaaaaaggcgtatgataatggaaaatatttggcagcgatctgtgcaggtccgacagtgctcggaaagtacggatttttagacggaaaaaaagcgacctgttaccctggacaggaagacggacttggtaaagcggaatatgtgattgaaccggttgtcgtggacggaaaagtgatcaccagcagaggcatgggaactgccattttgtttgccggaaaactggtggagatccttcagggaacagaagcaaaagaggaattgttaaagagcatcatttatgaggaaaattaagaatgcaaagtacagaaaaaataagcgtttgggagcagcttcgtatcgcctgcaccaaaccaaggcagtataagaagctgctaaacctgaaaaaatggaaggtcgccatatttacattgcttttgggacttgtcatcactctgctgggaccggtgatggatctggctgggtttgcggtgagcgttggaggtccgaaaaacttcgtcatgaaccggctgccggcttttgaactgaaggacggccagctcacactggatcatgcagtggactttaatctgggggctatccatatctcggcggattcgtccaaaaagaacgtgggcaaagatgatttcgatgagaaatattcagatgagattcatttttccaagaacaatatggccatcaaaacttcggttatggggcagaccgttacgaagaacttcaacacaatgaagaacgtgacctttaccaaccaggatatggcgaatctgcttcctctggtctattttatggtgtttgttgcccttttgtttgtttatgggggagtgatcctgcagtatttgttttactgtctgttgatctcttggctggtatctttaaatatgaggaccaggaatcagcccatggcattcggaaagatttttcagatgtctatttatgccagagtaccgtgtgagttgatcggtactatcgggcttaccgcagggatatcgttctttacggggatcatctggatcatgatcggatatatggtgagctaccagctgatgatgatggggctgatggagaagaaggcgaaagaatagagattgatagtgatagaaggtaaaaaagtgttccgtgaaggggcactttttttattccattggaaagttctccaaacctccctatgaaatatattcgctgttatagaatggttatttttttatgctacgattctttctgtgattgagtcattggtttctttacagaaaggaagtatcgatatgaaagatttaattcttgaaacaagaaatttaacgaaatgttttggacagcaacaggttgtcagtgggatctcactgcaaataaaaagaaacagtatttatggacttctgggaccaaatggcgccggaaagtcaacaactttgaaaatgattgtagggcttttaaatccaacagatgggcagattatgtttgatggagaaccatggaaaagatcatcacttgctcagataggctctttgattgaagcacctgccctatatggaaacttaacagcagaagaaaatcttttagtccatacaaaacttctaaaaatccttaaagaacggattcaaacggtattggagaccgtggatttaaacgacacgggaaaaaagagagtgtcccaattttccatggggatgaaacaaagactgggaattgcggcagcccttttaaacagccccagactgctgatccttgacgaacctacaaacggactcgatccttttggtatacaggaacttagagaacttatttcctcttttccagagaaaggaattacagtgatcttatccagccatatattatcagaggctgcgcaggtcgttgatgaaatcggaatcataagcggggggaaactgttatttcagggggtaccagatactaaggaagatttggagaaactatttactgatgtgatcatgaaaggagaaagcagaaaatgaatggactgcagtctgagttattaaaatataaaagaacgtttatgggaaaactgattgtgttgattccgatattttttgctatctttgcttttatcatacaatatatcatgagcaacaattcattggcacagtcaagtggaaatacaagcatgagatggacaacgcttctggctttggtttttaactggtggtcatttcttttcctgccgttaggaatggcgctgtttgcaagcttggtcacattacatgagaaaaaagcagggaactaccgtacacttcgtgcttataatatatcacctataaagatatggatagataagattgctggaatggcattttattcactgctttcttccttagtcttggctgcggtagtcatggtcactggtttatgtattgtagaaggagcacctccggcagcaaagatcctgacaggcagtctgttgtgctggcttacttcacttgctttgatcccgcttcaaatctgggttgccacgtggggtggaatgcttgtgagcatggcagttggatttgcaggtatgacagcaggagttctggcagccccgtcatccttatggatagctgttccatggagttgggcaactagaatgatgtgccccgtgatcggggtacagccaaatgggagtgtgctaaactttggtagtccacttcttgactcgtctgtcatcccggaagggatcgctatatcgctcacagctttagctgttgtctcagtcttaacaggtatatggtttaaaaggagggaaatgagatgagtctattatggtcagaatggttgaaaacaaagcatacggtcatacgttggtttacattttttctgcctttttgtattgcaggactcggcattgcatatatgaaatatagatctgacttatcttcagcttttgtgtttgaaagtttttatatgctatggtcggcagtgatcctccctataggcacaggcctgctgacaggctttctcattcatgaagaagaaatggcagggaatttcaacaacctattgaacacagaggtttccagagcaaaactgtatacatcgaaattcatttttggcttactcagtttaactatctgcacgttacttacatcgctgatcctttcgattggaatggctgctatactgccgggacgagcaaatatttcttggttttttatggccgctttgctgacagtcataggtacgctccccatactggccattcacttgtggatcagcttcttatggggaatgggaacttcaataggagtcggtatctgcgggatcttaatagcagttctgataggaacaacaagtctcggaaacaatatatgggtgctgcttccctggtcgtacccggttaaaatggctatgtttccaatggcctcttctttcgtatcaggaactatgatgattgaggccgcagtacagctgttcacagaattctctgtcagtatggttttcttagttatatttttatctggcggtttgttttggttccgtaaatgggaggggagaaaaaacagcggatgatatcatcactttgtttatgaaataaaagattggagggaaaacaagtgagtaggattttgatcattgatgatgaaaaagacttagtcgcattgctggagaaaaaattaaaagcatcggggtatgaggttctaacagcatttgacggggaaatggggatccagcttgcaaaaaaaatgccggatttgatccttctcgatattatgatgccggttgcagacggctttgatgtatgccgaaggatacggagtgatgtcctttgtccgatcatctttttgagcgcgaggcagtctgagacggataagattaagggtttcactcttggcggagacgattttattacaaagccctttggtttaagagaagtcatggcaaggattgaggctaatatacggcgcgagaagcgttcccagtacatcaacacagaaaataagagagcaaaactttattttggacagttgactttggatatacgggagcgattggtaaagatccagaatgtagatgtccctttgacaaaaattgaatatgagattgtagagtttcttgccctccatgccgggcaggtatttacaaaagagcagatttatgaaaaagtgtgggggtttgacggtgacggagataatacaacggtggtagaacggattaagagaatacgggcaaaattttcatcctcaggctcatctgtttcgtatattgctaccgtatggggcatcggatataagtggaataaactttgaaaggtggtacaggatgtatgaaacaacagtctcttgtcacgcagttccgcatgacacttgtgtatattatactttcgacgctttttgtgtcgatgatcacttatgcagcggccgcatttctgtttgtaaatgctttaaataaaaaatctataaatccagaaaatcattacgaacaacagattcccaaggtggagaactatgtgcacgaggaaggagcagcagtattgtcttccaggggacaggacaagttaaaagaattagtccacggtgagggctttttttatcaggcagcagaccattccggcaatataatgcatggcacttatgaagagcagatttttgattcacaacagaaactctatcagcgtctcaacactacattccacataaaagggttttatgttcacgtgattccggtcattgaccatatgggtaagataaacggcgcggtctctttagtctacaagcttaatctgcctgcggtaaataatagcagcctatgggtaagcatcgcttccctattccttatatctgctccatttttttatatgattctgtttaccattttattttcacgaaattatgcaaaaaaaatatctcatccactacaggttcttgcggatggttccaggcagattaaaatgaagaatcttgattttgatattgattaccatgcggagaatgaactgggagaactttgtacagcttttaatgaaatgaaagaagaattgaaacaatccttgtctgcacagtggaaacttgaacaagatcgtgtggagatcacagaagccttggcacatgatctgaaatcacctttgtcaatcatcaaggcttattccgaggcattgtctgatgacactgatgtggatgaggagcagaagcagtacctcacagtgatcgaagaaaatatagaaaaaagtgtcttattagtgaatcaaatgcaatatacttctgaactcgaaagttcaggagcaggagtggtgaaaggtcctgttaatttgctggaatttcttcagcgtaaaatatatgattatgatttacaggcaaggagaaagaatataaagatgattcttgagatacgaaatgatgagatacctgatactgttatcacagatgtgaataaattggagaggatactggacaatattttatcaaatagtctgcagtatacccctgcaggagggaaaatccgtatttttgttaaaaagcataatcaatttattgtttacaggatcagtgacacaggaatgggattcacttctatggatatggaaaaagcattcgaaagattttatcggggggacgaagcacgccaaagtcagggcggacattctggattgggtttatatattgtaaagcagttgtctgaattgttgggaggatctgtgaagatagaaaatttgagttctgggggcgcctgtgtttcattctctcacagctggcagtagatagacaaaagcccctgagtttgaattcaggggcttttgtcgtccagtatatcatcgtagtctgtcaaagaagagtcaacagacaagtaaaaactagtcaaattcttgtcatttatatatccggaggataggaccccggatatacctgaagtattagtggtcactcttcagaggaaagtcagcatatccggaaatcccatgttctgatatatccatacctgcgatttcctcttcctcggaggcacgaagcccgatggtatgtttcagcccttggaagatcacgagaccgccgattacacagtatgccgcgacggcgagaactccgataaactgtgctttgatgaaagcgccgcgggtgatgtccataagctttaacgcactgccggtggcgaagaatgccgtaagcagagtcccgatgacaccgcaggctaaatgtacgccgcaggctccgactggatcatcgatctttgcttttttatcgagaaattcaatcattgccacaactacaaccccgcagatggcaccgatggcgatggcaccgtagtttgataccacgtcacatccggcagtgatacctacaagaccggcaagagagccgtttaatgtcatggacacatccggtttgccgtagcgtacccatgtgatgaccagggcgacaagggtggatgcagcagcagccaggttggtggtcatggcgatggaaccgagggtgtcagtggcggcagttgtggaaccgcagttgaatccgaaccagcagaaccataaaataaagacaccaagtgcgcctaatgcaatgttatgggccgggatagctcttggagttccgtcggctttgtattttccgatacggggacctaccgtggctgcccctaccagtgccagccatccgccgactgaatggactgcagtggagcctgcgaaatcatggaagcctagattggacagccatccgccgccccagatccagtggccggtgatcggataaatgaccagactgatcagggcactgtaaaccaaataagatgaaaactttgtacgctctgccatggcgccggaaacgatggtggctgctgtggcacagaatacagtctggaagatcatgaagaccccgggggtcagatctttaaactgctgaagatcaatggatgttgggttaaagaaacctgtggtcccgatgatcggattgtctcctccgaacatgagggcaaacccgatcacaaagaagcaaagggttccaaggacaaagtccattaagtttttcataataatattgcttgagtttttcgctctggtgaaccctgtctctaccatcgcaaatcctgcctgcatgaagaagacaaggaaagccgcgatacaagtccatacgatattcaataactgctgaacgctcatatacatatcctcctttaaataaaaaggggacaatgcctgcctgccgttacaaggttacttgtaatggcctgactgcattatcccctttgataatgttgtttacactttattgtttccataattcatgcattcggcttataaagcgtctttaccggtctcgccggtacggatccggatcgcctcttccactggagagataaagattttaccgtctccgaattctccagtgcggacagtgtttacaatatccttggtcacctcatccacaacctcctccggcatcacagattcgactttgatcttaggaagaagatttgaatttaattcatttcctctgtatttttgggtaaatcctttctgatttccataccccatgatattggagatcataagtccggaaaccttgtgcgcttccaggatgtgttttacatccgtgagcttttcaggtttgatgaccacaacaacttttttcatcataatataatcctccttttttccattgacatcaaaaaaggcattccaatcgtgtgatcggaacgcctttgttcttgattggttcccattatacgccttgaaccctgattgtcaataaaaagttaaaatgtataaaaataaatacaaatcaaaatggttcttatttgccagtgaaaacatgatagaatgggagaaaacaaaaagagcggaggaaacgatgaaaaaagataataaggcggttatggcaggccttgcggtgcttgccacgtttttatggggaagtgctttccccagcgtaaaattagggtatgacatctttggtatcaaaggcagtgatattggcagcaaactgctgtttgcgggtatcaggttcgcagctgcgggaatcatggtgctggctgttttgggggcccagagcaggagaaaacctctgccaaaaaaaggtacatttaaaaagctgctggccctggggattctccagacaaccatccagtattactttttttatgttggcctggcccacaccacaggggccaaggggtccatcatcaattcgtttacagcctttttccctgtccttttagcgccgctgtttttcaaaaacgacaagctgtcagtgaagaagatcctgggctgtgcggtgggactgtcgggaatcgtgctgatcaatctgcagggcgggagccttggaggctttgcctggaacggagagggatttatcgtcatggcggccctttcacagagtcttgcgtctatctacagtaaaaagctggcccagtccatgaatgtcatgctgatcgcgggctatcagcttttactcggaggcggcctgcttctcgtcctgggttacacagggaacggaacgctgaccttctccagtgcgggtctgcttttgctgctttacatggcggttctctcagcagtggcattcagcgtctggacatggcttttgtcccactatcaggtcagctccatttccatctataatctcctgattccagtgttcggaacactgttatccggcctgctcttaagggaaaatgtttttactgttgtcaacatggcgtccatcctccttgtgtgtggaggtatcgttgtggtaaacaggcagtgagagctggagaaaatatattatcaggataaaaaaaggtaaaagaatacaggattcttaaagccttttcattgtatttctgtaggaaataaactatactgatgaggtaaagatagatttgaatattgggcaaagcaggcgaaagcctgtgacgcaaagctaaagggtctaagattttagggattatgacagccagctgcagtttgtatgcattgcgttcaggggagaaggcagtgcattttttattctataggaatgatgtgtgggcttgcccactttgttttggagggaattggaatgaaaaagatatggaagcgtttcgctgtatatatactgactttgtcaatggtgttttcctgggtgatcacacctaatacggtcatgggaagtgtgaaaaaacagggaggtctggatacagtgtatctgaccagctctatgaattttcccacatcgggagacggcagtacgaaagaaagaccattgaaggatataaacaaagcatttgatttggtgaatgatggaggaaccattgtcattgtcgacaactatgtgcatcaggggaagctgactacaccggaggacaaaatgctcacggtcaagggagaaacttcatcggtgtttatgtcactgcggtatggtctcgcacagggaaatgatttaaagtttgacagcatccggctggaaacaccatctacagaagcagatgggcgttgcttttatgccaacggatactctctgacgatgacagattctgtccagtgttttactaaccaaaatgtcaatcaaaaagcttacatctatgccggaagcccagacggatcagagatctccgggagacgggcagtcattgacgtggcgggcggtaactttgccgggatctatgggtatggaaaaggcagagccaaggtggcagatggatccgagatcacgattcgctccaatgcggacacggatcagctggatactgctttggtactgaatctgtattcaagacaaaagctgctgggatctatccaaaatgtggatcagctgaatattacctatccggtcagtgtctatactttgatcaatgtgaagaatgtttcgctgagttcaacactcacactgactacagaaaatgggaccactttaactggtgatatggatttgaacggatctgctgttttgaatatagatgcagatttgcatgtaaaaggcaggatcagtggatatgcccaggtactggcttccttaggcagacagattatatcggatgtgcctgggtctgccggaattctggaattgaacaacagtcagctgccttgggaaatccgcacaacggtgactggcacgaataaaatatggcgggtagaaaagaaatcatcgaaaagcatctattacattaatgggaaggatggtgatgacagcaatacaggacagtctgaagatcaggcatttgcatctttatcaaaagcattgcaggcggcttccacaggaagagaaaatatagtttttaaaattgtaggcgatacacaggtagataaagctttggttctttctttaccgggacattcgattgaagtttcaggaaacaagagtgcacctgccaaattaacatttacgcagccgctgaccattaaagattttactcagatccacgaccttaaactggattttagtgcctgtagcggacgcgacggcgtcatcataaaaggagtcggtgtttcatttgagaacaatcttactatggagggaactccgccggatatcagatatgagagtgtaccagattcccaggatactcagcagatggatattttaagcggaagctatggaactattaaggacgaaaataaagagggaatcctgattcttcataacggggatatccagggaaaggtgctgggatggcagatgctggatttagctccggattcccagcaaaatgaggagatcgttattcatggaggtatcgaggggacagaagatctttacatctacagtttggatgatgcagcaaaagtaaatggagatatccaggtgtcgaatatggacaccgatgggggtgacgcaaacctggtcatgaccagcggaaaaaagatcactgcggaaattttcagtacgcagatttcactcacgattcttccagaaaacggaacgatcgaggaaggagtttatctaacggcggatactctgtcagacgacactatcacaagaattgtacttatagatacagacggtcacttaatgaaagttgagaaagacggcagtaaatatacagggattttaaagaaggtccctcagcttgaagcacccgtaaatgtcagatgggatgaacagggaaacggtaaacttcaatgggataaggtgcccaatgcggattcctatataattgaactttttgaagaaggacaatatcttactacggtcaagaacatcaagacagaaacctatgactgttcacagtatttcaacggaaaaggaacctatcaggctaagatcagtgcagttgacagctccaaccaatactctgacagccaaaagacagacagcggactgctttcctaccgcccaaaagcaaaatcggtgatccttggcggaggcgacaggcagatgattgtaggtgacacgatacatatcagatcaagagttcttccagacgacgcagatgacagactgatctggaagtcttctaacgaatcttcagctatagtggatgacaagggatctgtaactgcagtctcagaaggaaccgcagagatcacagccacagctgcagacggcagcggagtatctgcctcagttaagataaccgtaagtaataaagtacagaaggtccagagcatccggcttaatcagaccacaaaagatctgtatccaggagacagctttgtcctgcaggcagatgtacagccccagagtgcagatgataagtccgtgtcatggtccagcaatagtaaggctgtctcagtcaacagctcgggaagggtcacggcattggcggagggcacagctaaagtgactgcaaaggcccgggacggaagcaaagccgaggcgagctgtgacatcacggtaaagcggaagatctataaagttcaatatgccatgaacggtggaagaaatcatccgggaaatccgtcagcatttactgccgtgccgatacgcttaaatgcaccggagagaagcggttatctgtttgccgggtggtatacggatgcgggattccatagcagaattgagacattgacacagaaaaaagattatcatctgtatgccaaatggcagaagatctcattaaaagcgccgaaggtgacaagtttgaaaaagacagtgggaaccactctttctgtgagttatacgaaagtgcagggagcggccggatacgaggtgtctgtctcatctgattcaggattccgtctgcctgatacaaagaagtggattacctccgctgtacaaaagaatgccggggggttgaaaaagaacatgcagtattataccaggattcgggcatatcgtctggactctgccggaaagagagtatacgggccgtacagcgccaagacgaaaggctatacgatcaagtataagctcaacagaggaaaaaacagcagtgccaatcttgtgagctactacaatgtctctgtccggctgaacaatcctgtcaggaaaggataccggttcaaaggctggtatacatcgaagaaatataagaagagaattaaaaccatttcaaaaggaaaacgcagcaattataccttatatgccaaatggaaaaagaaatagatcaatgatccggcagtgtttctatgatcacatgctgcagtgtaaactgtgagagctgacagcggtatgcctgttctgcctggttaaagacagagacgatctgctgttctttttcatgggcgagagctttttccttggggaataccttatccaccagattcgtggtggacagaaatggacttgtgccttctatggcctcgaaaacatccagcagactgatgttttccggggtcctttttaatacgaaaccgcccttttttccagcctcagaatccaccagctttgccacgaccagctgcctcatgatcttctttaaataggaatctgacaatcccaggcggtcgcttaaggtatagcttttaaccggtgcatggcctggggtatgggcgatgacgagcagaatacagacagcctgctccaaacttcctttgatcttcattataataaaaatcctccttataaagaatgattgtacttgatattgagatgttttttcaagatgtgttgacaaataaaatataggtgaatataatactctgtatccatagataagaattatccatggatatattatatctacaaaatattcttttgtaaacaaaaggtgtctaaagaacataaaatgaaactcagaaagaaggaagaaagatgctgaaaaaagaatggcagaacatacgcaatagcaaatggatgatgctggtgctcacggcgatcatcctgatccccacactttacacaacgattttcctgggatccatgtgggatccgtacggagagaccaaacatctccctgtggcggtagtcaataacgataaatccatcacctacaatggtaccaagatggaagtgggaaaagagctggctaagaacctgaagaagtctgattctttggatttccactttgtaaatgaagtggaagcggcatcaaagctcaaaaacggtacttattatatggtgatcactataccagagaatttttctaaaaatgcctctacgctgttagatgatcatccaaaaaagatgcagcttgagtaccggacaaatccgggaaccaactatatcgcatccaagatggatgagacagcagtgagtacgatccgcacccaggtagcggatcaggtcacaaaaacctatacggaaaccatgttccagcaggtaaagacagcagccaaaggcttcagccaggcggcagacggggcaaaacagatcaacagcggaacaaagaagctttccaaaggaaataaaacaattacagataacctgaacactctcgcgtccagttcccttacctttaagaatggagctgactctcttcaggtaggattaaagagctacacagacggagtggcccaggtagatcaaggagccggaaagctcaacaaaggggcggggcagctgtccaaaggggcaaaaaccctcaagtccggagccaatgaattaaagaccggcaccgctacattaaataaaggtgtcacagactacacggacggagtggggactgtctacgcaggcagcagcgagcttggtaaaaacagcaatactctcaacagtgggctgcaggctctttccgatggaattaagagtgtggaatcaggaagcggcagtgttctcaccggattaaagactatgtcctcagaactggggaaatcaatgacaccggaaaaacagcagcagacgaggcagttgatctcagggatgaagcaggcagccgatcagatggatccgtcagcggtatccaagaccggggcagcacagaccgggaagaatgccgaggaattgtcacaggagacctccaatctttcagcccatgccagtgaactaaagcagcagatcgcagatttaaagagttctgccacttttcaaaaactgagcagtgaagaacagcggagtctcatatcaggacttgaaaaaagtgcggactccatatcctcggatgcagagaccatcaaaaacaaagcagccaaagtaaaaaactccgcggtctcagaaagcagcaccaaggccgcagggacagatcagataaagaccatagcttctcttttaagaaacggagccgataccatcggtacgttatcctcctgccttggagaagtgaaaacaaatctggataagacaggaacaaaacctcaggatatggggctgattcagggaatgcaggcggtttatcagggcaccggtcagatgaagtccaagatagatgaaaaaggcgggctgaaagaaggagtgaaagcttacactggaggcgtggaccaggtaaacagcggattgaaacagctggacagcaaatcaggagtactaaagacaggagcgtcagcgctgaacaaaggtgccggtcagatgacaggaaaactgccggagctgtttcagggtatggcggacctgaaaaatggtactttgagtctttgcaaaggaaccagccagctggcaggtaacagccaggctctgttaaatggaagtgaaaagctgtcatcaggggcaaaacagatcagcggtggagcagaaaaactggcagacggttcaaaaactgtcggcggaggccttgccactctgaatgacggaagtaaaacgctgcagacgaaactttcagacggcgccaaagaggccggacagatcaatgactcaaaggacaccgtggatatgtttgcatccccggtgaaaacagagcactcccagatgtcacaggtacagaataacggtcatgccatggctccgtatatgatgtctgtggccttgtatgtggcatgtatcgcattctgccttatgttcccgctgaaagaacacgatgggaaagtgagaagcggattgaagtggtggatgtcgaaagcttccgtcatggcggcagtggcggctgtgcaggcagtggtcatggtcatcatgctgatggtcatcaacgggctggagcccaaagaactgatgacaacgtttttgatgtcgatcctggtttccttgacatttatggccatgattacattctttaacctctggctggataaagtgggcagcttcatcgtgctggtgtttatggtacttcaactgggaggtgcggcaggaacgtatcccatcgagttgtcaccgaaattctaccagatcattcatccttttatgccgtttacctacagtgtcaacgcattcaggaatacacttacgatcggcggagggatcacggcggatgtccttgtatttataggaatccttatcgcattttctcttttatccattggatattatcagaaaaaggcaaaagaggtgggagtcaacagcacaatcatcgcagaaggattaaaagagtaagagagaatgaagagaatattgcttatggtattcagaaacatttttctggtaccttatatgtggatcaagttatgttattacgcttctcatgtggataaatattcggaagaaaagagatttgccatgctgcgttttatcacgacacgggcgaataagggcggaaatgttacgattgaagtctacgggcaggaaaatataccggaaaaggacggttttatctttttccccaatcaccagggactgtatgatgtactggcggtggtagaggcgtgtcccaggccgttttccgtggtagccaaaatggagatctccaatatccagtttttaaaacaagtatttgcatgcatgaaggcatatatgatcgaccgtgatgatgtccgtcaggccatgcaggtgatcatcaatgttgcaaatgaagtaaaacaggggaggaactatctgatctttgcggaagggacccgttctaaaaacggaaatgaggtgcagacattcaaaggcgggagctttaaggcggcggtcaaagcaaaatgtccgatcgtcccggtagcccttgtgaacgcatttatgccgttcgacaccaatacggtgaaaccggttaccgtgcaagtacattttttagaaccgcttctctatgaagaatacaaggatatgaagacaactgagatagcaaaacaggtaaaagacagaatccagcaggcaatagaatcacgataaaaagcaaagctgaggctcaaagagaaggtgtattttcttgagcctcagtttatttttagacaggtaaaaaggccagatagggaaatctggcctttttgaggggagtataaataaattaataaggggttatatagtagaaatataatgaataccttctacaatttgaattataaggtatccttctgaaaaaagcaataaatatttttaaattcaaaataaaattatagacgcagaaaagaatttaagatttggatttgtaaatcttgcaagaatatttttttcacttttgcagacaatatttgtgtaaccaacagaaaggagaatctatcatggcaaaaaattattcaaacgacaacaactgcaaagactcttcaaatgagagcaacagccagaacaaatctcagaacaagagccagaacaagtctcagaacaaaagtcagaacaaatctcagaacagcagccagaactcttctaaccgttagttattagaagaaggaagcaggaaggacgtccaaagaaaatttctttggacgtcttttcatattactgcatattctaaattataaaagggaaagtatgtggaaatggaatttataaatataactttgcaggaaggaatcgacctggccggacaggatggttatgtaatgttcgacgtaagggaaccttatagatataaacaagggcatctgaaaggcgcagtgagcatgccctatggagtgatcaaggatgattcctatcgggacaagaaaatcatcgtctactgcgacttcggaggacagagcatgctggccgccaggcacctggcaggagaaggttatgaggtttataatattgtaggcgggatttattattaccgcggagagttgacatccttaggcctaaaattgtagaatgggtattatggtgcaaaggagaaacatgaataaaatagaattgattgccccatgccatttcggtctggaggcagtattaaaaagagaaatacaggatttaggatacgagattacaaaggtcgaggacggaagagtcacattttctgcggacttaaacggaattgccagagccaatatgtttttaagaacagcggaacgggtgttactcaaggttggtgccttcaaggcagcaacctttgagcagctgtttgacaggacagcacagcttgcctgggaggactttatcccggaggacggaaagttctgggtcaaaaaggcatccacagcaaaaagcaaactgttcagtgccccggatatccagtccatcgtaaagaaggccatggtggagcgcttaaaaaagaaatatcatgtgtcatggtttcctgagacgggaaacgaatatccggtgcgtgtgttcatattgaaggacgaggtgacggtgagcctggacaccagcgggactccgctgcacaaacggggttaccggacgcttacgagtgaagcgccgatcagggagaccctggcggctgccctgatcatgctgacaccgtggaataaggaccgcatactggtggatccattctgcggaagcggaacctttctaatagaagcggcgatgatgggcgcggggatcgctccgggcatgaaccgttccttccaagcagaggcatggacgaatttccttccgaaaaaaacatggtacgaagcggccgatgaggcagcggatctgatggatatggatgtctccatggacctgcagggctatgacaaggatgcaaaggtgttgaagcttgccagagagaacgcagccagcgccgaagtggatcacctgatccatttccagcagagagaagtaaaggatttcagccatccaaaaccatatgggtttatcataaccaatcctccctacggagaacgtttggaggaaaaagcggatctaccgcagctttaccagcagattggagagatcttccacaagatggacacttggtccaagtatgtgatcacgtcttatgaggatgcccaaaagtatatcggtaaagccacgaaagttagaaaagtttataacggaatgatacgcgctgagttttgccagtatctcggaccaaaaccgcccaggagataagaatatgaagaaaagaataatatttgcaactggaaatcagggcaaaatgaaagaaatcagggaaatccttgcggataccggatacgagatcgtgtctatgaaggaagcaggggtggatacagaaatcatagaagacggtgtcacatttgaagaaaatgcggtcatcaaggcgaaagctatcatggaactgaccggagagcttactctcgcggacgattccggcttggagattgatgcgctgaacaaggaacctggggtgtattctgccagatatatgggagaagacacaccgtatcctatcaaaaaccagaagatcctggaccggatggacggagtgccggaagaagcaaggaccgccaggtttgtctgcgtgatcgcagctgcatttccagatggacaaatcaggacaagtcgtggtaccatggaaggtatcatagggtatgagattaaaggagagaatggattcggttatgatccgattttctatctgccggaattgggcagatacagtgcagagttgagcagtgaagagaaaaaccggttaagccatcgcggagaagcattgagaaaaatcaaagacattctttagggaggttatcttgtgagaattttagtaatcagtgactctcatggtcgaaacgacgatgtaaaaggggtattggagcaggttggcaagatcgacatgctgatccactgcggcgatgtggagcgcggtgaccagtatatccgtgatatagcaggatgcccggttgtcatggtggcgggaaataatgattattacctggatcttcccagcgagcagaccgtagaggtagagggataccgcatctgggtaacccacggacatccgtattatgtgaattccggggtggactatctgcgggaatatggcgagatgcatgacgttgatgtcattatgtacgggcatacacacgtgccgtttattgagatcggggacgatatgacgatcttaaatcccggcagcatctcttatccgagacaggccggcagaaagccgacatttcttctgatggagattgatgatatgggagaagcccattatgcccatggatattataaagagcatttcagagaactgaacatttaacatgaaaaaactgtttgtggcatgaatactgtaagtaacagcgaggctgtccaagtgtcaatggcacaggcagttttttcgtcgtatagaaaaagtgatcaatagattggggataaataagatgaagaaaaaagattttgtggaaggtgtcattgagcgtacagagttcccgaacaaagggttttttcaggcggaagaccgggaggtttcagtcaaaggagtcatccggggccaaaggatcaccgggcaggtgacaaagcttaggaaaggaaaggctgttgcaaggctcgtggaggtgctggagccgtccgagatggaggacgctatccctaagtgccctcattttggggtgtgcggtggctgtttctaccagacggtttcctatgaaaaccagctgagaataaaggaaggacaagtccgggaactcttaaaagattatgtgtccgatgaaatttgggaagggatcaaaggaagtccaaaacagtggcaataccgcaataagatggagttttcttttggggacgaagtcaaaggaggcctgctggcccttggcatgcacaaaaagaatacatttcacgacattgtcaacataacagactgcaaacttgtggataacgattataatctgctcgtttcctgtgcattaaattatttttccaagctgggttgtgacttttaccacaagatgagccatgaaggatatctaaggcatctggtgatccgccggtcggacgcaactggagatctgctcatcaatatcgtgacctcctcccagcaggatgttgatatgaagcctcttgcagaggagatgctccgtctgccgctaaatggcagcatccgggggatcctgcacacggtcaatgacagcctggctgatgtggtaaaggcggaccagatggagacagtgtatggagaagactttttttatgaggaaatcctggggctgaaatttaagatttcaccgttttctttctttcaaacaaattctcttggagcggaagttctgtatgagaccgccagggagtatgtgggagatacggatgacaaggtgatctttgacttgtacagtggtaccggaaccattgcgcagatgctggctccggtggcaaaaaaagtggtcggtgttgagatcgttgaggaagcggtggaagcggccagagaaaatgctggttttaatgggcttgagaattgtgagttcatcgcgggggatgtgctgaaagtggtcgatgaactggaagataagccggactttatcgtgctggacccgcccagggatggaattcatccaaaggcaattcagaagattatagactttggggtggagaagatggtttatattagctgtaagccaaccagtctggcgagggatttggagatctttcgggaggctgggtatgaggttgagaggggcgggtgtgttgatatgtttccggggacggctcatgtggagacggtctgtctgatgtctaaggtcaagtgattgtgagtgaaagaggcttgatttcaggccttttttgctatcgaggatatgaaaacgttcaatccgaggtctaaacttaacgctctgcggaaacagggcgataagcgtatagcgaaaatagcgtggataatttagacgccaaattagatgtcgggcattgaaactgaacgttgaaaggagtaatagcctatgaaaatgtcgaaagaaaatattgatcctatcatgttcgccccttgtggaatgaattgtaaggcctgctataaacattgctatcataaaaaatcatgtgctgggtgcctgaacggtgatatgggaaagccggaacattgccgtaaatgtaagataaaagactgtatgaaagataaagaattgtcctattgcttcgagtgttccgactatccatgcaagtcaataaaaaatcttgaaaaaagctataacaagagataccaagcaagccttatggaaaatagtgactttgtacggcaacatgggttagaagcatttatggaacagcagaaagaaaaatatacatgcccaaaatgcggcggtattatttccattcacgacagagaatgcagtgaatgtcaagaaaagatgaaggactaaaattcggcttatagaattagagaaatttgaagttgcgaaaattaataagaaagcaaactgatagataaaacagcaagcaaactgaagagataatcagaaggaggtcgtgttcatcgttaaaatgtgtaacgttacattatatctttttttgaatggaaacagagatggcacaaggtacgtgtgatttcttgagtgatagactggaatgaatagcaagttcgttatgatatattggaggaaagaacatggcaaataagaataaagatgaaaataaccgttcatagctcagaaattattatttgaagaagaattatgaagatggagaactgccgctgacagaaaaaactacaacacaaaacaccataacctttaagcgattattgctgttggttttaaagtgaataatgaccgtgctgttcgattccgcaaatgctcaggtcaaattgtaaaggattatacgatccagggctggacaatggataaggaacgtcttaagaagggccatatgttcacagatgaataccttgagcgtcagctgcagaatatccgtgagattcgccttttagaacgaaagttctatcaataaatcacagacctttatgccacagcctttgactacgataaggatgccaagacgacgaggcgattgttccagacagtgcagaacaaaatgtactgggcagttcacaggcataccgctgcagaactaattgtagaacgcgctgatgcggaaaaagagcatataggcttgactacatgggaatcagctcctgacagaaggatagtgaactgattacttctggaatggttttcattgtataatagcgatatggaacagagactgccacactgttcgatgtatcttacagccaagtttattcctgggtaaagaaatatgatatgatggaaatgaggctctaacggataaaaaggaccggaaaaaattgggaggcttgttgaagcaggcaatgagaaaagattaatggaatatcaaaatacagatgcatttccccggaaagggacaccacaggagaaaaaataaaatggccaacttattaaaaaatatgtacaatcaaacctcacttcgcgatctggcacaaacaatccactcagtctatcctacttttcagaccgaggagttcttaaattcaacaatggacgagtcctgggatgagctagcgctgaaagcaagggtgagaaaaatcaccatgaccttgggaaaatatttacctgcggattatagggaagctcttgccatcctcgatcaggccgtttccagctgtacttctggttttttcggaattttatttcccgactttgtagaggtttatggacaggatgaagaaaattgggatctttccatcgcagctttagaaaggtataccccatactcctcttcggaatttgctgtaaggccttttatcatcaaccacgaagagcggatgatggagcagatgtatctctggtccaggcatgaaaatgagcatgtccgcagacttgccagtgagggatgccgtccttcactgccctggggacaggcattggtaagatttaaaaaagaccctgcgcccattttgccgatattgcagcaactaaaagcggatccatcaccgtatgtaagaaagagcgttgccaataatctaaatgatatttccaaaacacatccagatttagtcgttaagatggcaaaagaatggtacggtgagaatgaattcaccgactggatcgtaaagcatggatgcagaaccctgctcaaaaatggaaactgcgaggtattggctattttcggttaccataatgctgactgtatccatgtaagcagctttcaattgggaaaaacatcgatttcccttggagaggaccttaccttttcattctacatatcatcggatgaggccacaaaagtaaggctggaatatgggattgattatgtgaaggccaacgggaaaagaaatcgaaagatctttcaaatctcggaaacctctttgaatgaaaatgagaagaaattttatgagaaaaagcactcttttgcagatttaagtacaagaaagcactatgctggaatccattccattgcgctgattgtcaatggtgcagaacagcaaaagatggagtttgaattaacgatttaattttggagagaactgctatgcagattataatgatccttttagcaatggcgaaatggaaagggaaccagcaatgaaaaatgaattttataattacgagctctcggaagagattctggaggcattagaaggcctgggctataagcagcccacggctatacagagggaggttatcccgccgatgctggcaggcagaaatgtagtggcgaaagcccctactggaagcgggaagacggcagcatttgccatacctatctgcgagaatatccagtgggaagaaaatgcgccgcaggctttggtactggaacccacaagagagctggcagttcaggtcagtgaggaaatgttccagatagggcgcaagaagcgcttgaaggttccggcagtattcggcggatttcctattgataagcagatccagacacttcggcagaagtctcatattgtggcgggtacaccggggcgtgtcatggatcatctgcgcagggagagccttaagctttctaaggttcaatggctggtcatagatgaagcggatttgatgctggatatgggatttattgatgaggtgaaacaaattctttctctggttccggcagactgcaggatgtctctgttttcggcaacactgaggccagagattcaggaattggtggacgaatttattccaaatacaacacttgtgctccaggaggccacagaggagcaggcggcagccatcacagaaaagatctatgttacagatcaggagaagaaatacgatacatttctcagtgttcttaaagatgaaaatccaaagagctgtatgattttctgtggaacaaggcagatgaccaatgtactgtttcagaagttgcgcagacaacgtattttctgcggaatgctgcacggtgacttggaacagagagaacggctgaagactgtggatgcattcagaaggggcggattccgcttcctgatcgcaaccgatgtggccgccagagggattgatttcgaggagatcagccatgtggtgaattatgacttcccggcagggaaagagacctatgtacaccggatcggaagaacgggaagaaacggtaaaaggggtacggctgtcagtctggtgacagagcaggaacggaggatgttagctcaagtagaaaagtacgtggggcgggaactgatctgtatggaacctccggcggcaggagaagaaaaggaaaaggcattctggaaatctcagcgcataaaagcagaagtaaaacctaagaagggggagtcgttgaataaaggcatcacccggctgtccatcggcgggggcaggaagtcaaaaatgcgggcaggcgacattgtagggacgatctgcagtatcgacggaatgcaggcatcggatatcggaattgtggatatcagggacagcataagctacgtggaagtgttgaaccagaaaggggaccacgtgatcaaatgtcttcagacgaaacccatcaaagggaaggtccgcaaagtaaggaaaacaaggttgaatctatgataatttttgagacgtaccattatgaagtattcaatcatcttatacatcacttcttggaattggaggtctttaatgacgagacggatattggtgatattattgaggaactgcttcccaaatatctgtacagagaacagtatcttaaatgtgtaaaaaaatttgaggatatctttcactggacagaggatcaattttttcatgagatggatgcatttcatgaactgttattatataaatttctgggttatatggcctgtattcagaaagacataagtgattttaaagatatatattttaatgtcaaaggccataaattgattgaggcagctgcctggatggatttggaagaggacggggaatccacgttgcaggagtgcaaagacctgtattatgaagtcttttgttatccggatcttttgtttgaggatacagattttttgcttcttggctctttatataataaccgttatctgggagatacttccatagagtatttcgcaggaatcaatattgactattactttgagctgctcccgctggatatccaggaacattacaaaaccaaacatattacattaaccagtgtgatatccgacatgttacagtaccttgatgagcggatgaaatatggaagtctgtataagctgttctgggaaggtgatgaccctgtcaaagaggaccgggtgcagttgatattagaaaatatcatggatgcttatttttataatcaagagatagagatcaccagggaagctcaattaggtaatggaagagtagattttaaattatataaaaataaacaggaagatgaaaagattttaattgagttaaaaagagcaagcagttcttatttaaaaaagggatatgaacaacaactgacaaactatatgaaatcctcgaattataaaaatgctttttatttgatcgcatgttttacagaccaggaatatgaaaaaaccgtgcagtttattagaaaccatatctatacagatactgtacaatta

SEQ ID NO: 6 - DNA, 149413 bp, Anaerostipes rhamnosivorans
acatgaaacacagcatgtccctgaggcaatcgtttttcatatatatttttaatcctctcttttcattaaatataagaaccccgcagtgtattctgcggggttcttattatgataccgggatctgattatttaaaataatttactcctgaaaggaagatcttttggttcttatttccggcgatgttattggaaacaaaacgtcccatacgttctgaatgacccatctttcctaatactcttccatccggacttgtgatgccctcgatggcataataagatccgtttggattaaagtcttcgttcatggtcggatctccatttaagtcaacatactgggtagccacctgtccgttttcaaatagtttcttgatcacatcatcattagctacaaaacgtccctctccatgagagacaggaatgctgaagacatctcctgcgttgacttcatggaaccatggagacaggttggaggtcacttttgtatatgcaatctttgaaatatggcgtccgatacggttcattgtaagagtcggtgactgctctgactgctctacgatctttccttcaggcaccagtccaagcttgatcaatgcctggaatccgttgcagatacccagtgcaagaccgtcccggtttgtcagtaagtccatcacagcctctttgagcctttcatttctgaatgcggtggcaaagaacttggcagatccttccggctcatcacctgcactgaatcctcccgggaacatgatcatctgtgattctttgatggccttttcaaattcatcaacggaatcacggattccctgggcatccagattcttaaatacctttgtgataacttctgcccctgcctcttcaaaagctctggcagaatcgtattcacagtttgtacctgggaataccggaataaatacttttggttttgccaccttattcttagcaaagtatgccttgccctttgtataatttcttgtatccaccgcatcctggctgccctcagagcgggtcgggaatacttcttccaggggtttggtccatgcatccacagcctctctgagaggaaccacttcgtttccaagcaccagttccggagttgttgtgatctctcccaagagaaggctcggaatggcaagttttctgatatcccttgtatccatctccactacgaaagatccataatgattttctaccaggtccttcaactcaacttcctggtcaaagatgacgccaagaccgtttccaaacgccatcttagctacagcctcgatagttccgccgtatccaatagcatagcaggatttgatggcaccttcctcaatgagtttgtggatacgtttgtatacctttttcgcctctctgtaaatcggcagatgataaacatcccttggaatacagatacgtacaaggcggtttcctgcgcgtttcagttccggagtgatcacatggtttccgtccgccacgtccacagcaaaagacacaagtgtcggaggtacatcaatgtcattgaaggtaccggacatgctgtcctttcctccgatggatgccagaccgaatccgatctgcgcatggtatgctcccagcagagctgcaaacggctgtccccaacgctccggatcttctcccaggcgcttgaagtattcctggaatgtcagacggatcttcttgtaatcaccgccggcagccacgatcttagcaatggagtgtgtgatcgcatagactgctccgtggaatgggctccatttggataagtatgggtcaaaaccataactcatcatggtcaccgtatccgtcttgccctcaagaaccggaagcttagctaccatagtctggaccggagtcatctgatactttcctccataaggcagagtgacacttcccgcaccgatggtgctgtcaaacatctctaccaagcctttcttagagcagacattcaaatccttgagtgtattcatgcatgcctcagtaaaggtctttggaatctcctggtcaaagtaactgctgacacggtgagggatttccacatagacatcattttcctgatgtgctccgttggtatccaggaatgcgcgggacaggttcacaatctctttatctctccatgaaagcaccagtctaggttcttctgtcacaacggccacggccacagcttccaaattttcttcctctgcataagaaaggaatgcatctacatccttcggatcaagaaccacggccatacgttcctgggattcagaaatcgcaagctctgtcccatcaagtccggcatactttttcggcaccttatcaagatcaatcttaaggccgtccgcaagctctccaatggcgacagagacaccgcccgcgccgaagtcgttgcattttttgatcagagtactgacttcttccctgcggaacagtctctggatctttctctctgtagggggattacccttctgcacctcagcaccacaggtttcaatggattcttctgtatggaccttggaagatccagtggctcctccgcatccgtcacggccagttcttccacccagaagtacaatgatgtctcccggatctgaactttccctgactacattctttctcggcgccgcacccatgacagcaccgatctccatccgttttgccacataatccggatgatagatttcatccacaaatccggtcgccagtccaatctggtttccgtaagagctgtatccgtgagctgctccggtcacaatctttctctgaggaagttttccctttaaggtgtccttcaaaggaactgtaggatcgcttgctccggtcacacgcatagcctgatatacataggaacgccctgaaagaggatcccggatcgctccgccaagacaggtagccgcaccaccgaaaggctcaatctctgtcggatggttgtgtgtctcattcttaaagcttacgagccattcctcctctttgccgtcaatagacacaggaaccacaatgctgcacgcattgatctcttcactctcctccatgtcatttaaagcaccttctcttttcaggcggcgcatggccatcagggccagatccatcagacatacaaacttgtcctttctaccctggaaaatactcttgtggtccagcatgtactgctcgtaggtagcctccaaaggagcacggtagaatccttcctgaaacttaatgttcttaagctctgtggaaaaggtcgtatggcgacagtgatcggaccagtaggtatccagcacacggatctctgtcatagacggatctctctgctcttcctctttaaagtacttttggatatggagaaaatctttaaaggtcatagccaggttcaacgaatcatacagttctttgaacggcgtctcttccatttccctgaacccctctacggtcttaacatcctccggctcttcaaattccatcacaagggtatccggtttttcattcgaagactctctggaatccacagggttaatgcagtattccttgatctgctttaattcatcctcagtgatctctccttttaccacatatgtagtcgcactccggatgatcggttcttcgctttcgttgagcagcttcagacactgctgggcagaatccgctctctggtcaaactgccctgggaggaattccacgccaaatgccatttccccttcttccataggaaacgcatcctcgtaaatctcgtccacaggaggctcactgaacactgtgcccagcgccttttgatagctttcctcagaaacattttccacatcgtagcggatcagaacacggatcttttccacatccagacccagatactgccttacttcctccagcagttcctttgctttgatcgcatagtcgtgtttcttttccacataaactctctttacttgtcccatatggtcctcctctattcgtgcagcttctttatgatttgaaacgcggaagcgttctccaagatcattggatccttcttcgcgtaaaaaacgattccgtccacgttggaatgcacctcagagatgatatccccctcataagggtccaatatctctcccaggagctgttctttgtgcacttcttcaccaacattgacaaggcgtctgaaaaagccggatgctttcgtctttacctccgccatgtcctcttcttctataatactagcaatatatccattatggcaattatattttaaaattcccattcttgtcaggaacctcagaacagcggatactgcctgctttgcagtcagttcattgatgtgccctgtatccccggaataaactgaaaatgcatctgtcccattgatctgccagttgtagtttaatgtcttgacatcaaaactcctggatttgctcgtgatcacatagggcagtccgaataaattcgccaggcttgcactctcctttccggtaggctgcatcctgacatggggtataaaatcccctttccggtaaaaagaagggaactgaatcccgtagcggtatccctttaccttctcaaatatattggcagccagacggctggtaggttctccctggggattccccgggaattccctgttgatatcactgttgtcggaaacccaatacctcatccctacattcatggaggaattattcagggacgggattacaaggatctcgtggtccccgacgatggctccggatgtctccagttccttcagtcttttgaccaacagagagcagataaacaactgctggaattcgttccccctcatggatccgataatacaggctgccgggtctgcatcttctccggtgttcccaaagcggaatccttctaccttaaattcttccctcagataagaatctgtggaatacaacgtctctttgatcatacccaggcacctcccacaactcttgcgatcagggatccttccgtcaccccggggtgttctctgaccgtcatcaggatgccgtccaccggcgcaatgatctcttcctccacagcacctagaatgggactggtgatgctgccgatgacctccccctgtctcacacggtctttcacttttttgtgggtcacaaacagtccgtttgtctcacagttcagataatggatcccgtcatcgtgaacaatctgtgcctgttttggctctgccgtctctccctgccagatacccaagactttcatagtggcaaaaacaccctctatgatctgtctgcaaaagtcgtatttaatcctaaacgcagcccctgattcggtgaccatacacggtactccccgcttgttcagtgcatacgcaagacttccttcgttcaccgttgtcgaaggatggatccagatcaggtctgtgttcatatatccagccaggctgagcagccgctgatccgcgtcaccgtttaatctcacctggggaatctcctgcagaaaaatattgctggaatgtatgtcgatgacacagtcagagtcctccatgtctttaagcagcttagccgccgtatactctccaagttcccccgtcaggtctcctggaaatacagtgctgtaatcctcctgggtgatagggatgcttcggctcctggcatccagccccagcggattgaccgaaggataaacatccacgattcctgagagggaatcgtagtcttccttgattcttttgatgatctctccgcagatatactgtccgcccagctcgtcaccatataggccggagacaaggcagatcctcttttcctttcccgtcatctcatccggatgcagggaattcttcttaattttcagtgtctcccgcactggaagctttactgataccactgtctcaatcatgctgttatctctttcctgtcctgtagcttaatctgttaaaccaatctgagaaaaatagcttcaaaaggatcggggccaaaagtgttgtgaccagcaccataataacgatcggagcaaataggtcctcactgagcagtcccacgtggattcctttctgtgcaacgatcagggccacctctccccggcagaccatgccggctccgatcttcagtgactccttgtaggaatatctacaaagttttgctccgacaccgcaaccgatgatcttcgtcaatacagcggcaatactgatcagcactgtaaaaataatcaaagtctgggtcatgccggcgacttccaccttcagtccgatgcttgcaaaaaagatcggtgtgatcagcatataggatatacattccaccttccggtggatatagtaggtttctggtatcctgcacagaatgatcccagccaggtacgcacctgtgatatcagcaatcccgaacaattctgccaaaaacgctaaaaaaagacaaaatgccaacgccagcaccggcacccttctcctgtgcacctgctcgttgttgaccttcatcatagacattctgcggaaaaacttgtacacaaaaaaaccgcctgcccctgaaagtacaaaaaacagcgccatttttcctatgatcatcaaaactcctgtgacctccacagttccggcccgcccgatgcttgtcatcaccgagagcaggataatccctaggatgtcatcaatgatcgccgcaccaaggatagcggttcctacccggcccttgagctttcccatatcttgaagtgtttccactgtgatgctcacagatgtagctgtaaggatcacacccacaaagatgttttccatcaggttcttctcaaacatgtaagagatgacggctcccactgccaaaggcacgaccactccgcacagagcgatcaccatggcggctttcccgctgcgctttaactccctgatgtccgtttccagccccgcctgaaacatcaggacaatgaccccaatctctgccaggctcaggatcgtatcagagggttcgatcacattcaacaccaccggcccgaggataatgcctgcgatcagtgctccgaccaccggaggcatgttcactttccgcgagaacaggctgaaagacttcgtcaatgccagtatcaccgctatatccaataagtatctgtattcttccattataaatagcctccgcgccaatattcgatggtatcgtatcacacaggaaaacacttgtcaaacctataacaatctttatgtccccttgctttttcccttattatttagtatattaagaacagctcaaaaatgcaaataaaattagtagaatttctgtcaattaccagtaaaattctaagaaaagaggtagtctaatgagtgatgaaatcaacgtagaagctgacgtatttgaggaagaaaatccaatcatccatctggaaatggaggatggggtccagctcgactgcgctgtgatttgtatcttcggtattgaagaacaagattatatcgccctggttcctgtaaaagaccttgaaaacgatgaagaagagagcgagcttctcctttaccgttatgaagaactgccggatgatgaagtccagctggataacatcgaggacgatgaggaatatgagatggtttccgcagcatttgatgccatcctggaagaagaggatgacgaagaggagtaaggcctgagcctatttcctgtgctacgaaaaaaccttcggcaacggctgatcaaaagccggagccgaaggttttttatatcaaagggaatcatttgacgatcaagattgtcaaccaccttatgagtgagggaatgggaagataatgtgggcctgcccattttgtttttcattgtgcagttccagaagttttctctttttctgttcatcaatcccctgcaccagcaggctcggtttagcaaagtagtatccctggatatagtctgctcccagcttgaccaccgtctgcatctcctcgtaagtttccacgccttctgcgatgatcttgatctgtctttcatgggcataataaataatattctttacgatctgctgcttattatggtccttatgaatatcccggataatcttcatgtcgatcttcagaaactgtgccgatacgctcagcagtaaatgctcactgttatatccgctgccataatcatcaatggcgatacttcctccccatctgcgcatccgttcttccttcttggcctgcatctcacggtttccgcgctcctcttccgtaatctcctgtacgattaaattcaaatattctccataatggaattcaaaccactccacatccttgtcgtccagatcttgattcggaatagaattgataaagatcctagtcccttttttgactgctctgctctgtatcagatccacaaaggactccatagatttaaaccatgtgagccgttcgatctcatatagcttggattcctgctttgccagagaaaggatctcataaacagttggaatagaatccagcctggaccgcatcaatgcttcatatgcaaatgtctctcctgttgccacgtcaatgatcggctggaaatagtactcgattagttcttcttctatgagatgattcagctcttctttattctgaagcagatatgcatcttcataatagctttcactgtcaaactcaccgtatcttccttttcctctcttctttaccttatacatagcaaaatccgcatacttaataagcattgtataatccatcgtattatccggataccatgcgataccgccggacatcctcagacgaaacttctgcttgttgggaagcaccagatattctgcgtccattttagaccagcagcgctttatctctccacgtatttcatcctttgtatcatatccgtagaaaaatacaaaaaactcatctcctgacattctggcgaccacagcattctccggcgtataattcttaaggcccacagctgtcttttggatatacttgtctccaaaatcatggccataagtgtcgttgagaaatttcagattgtccagatcgatcatcatcaaagcagcctttttgaggacactctctccctgttgaaacagctggtcaagccttgagttaaatgcccttcggttcagaatgttggtcagaagatcataatctctttcatactccatttttttcagttccagagtttccttcgtgatatcctctgccagtccgacgatcttatctcccccatactgaacgcttaagcgcacccatacaggatctttttctgtcggtatctcaaatatataaatgtggtactggtcattccgcttgctgatatacggtgcaaactgatgcattttttttgagaattcttccaccgacatatgatcccacgttttattgcagtggaaaaccctgaaaaaatcatctgtcataaagaatcggttttccttctggtcgatttcaaaaccgccaatcttgatgctggccatccgaagaatctgcgcaaactttctggcggattcaaatacatccgagctcagcttttcaaaagaggctcccagctcatccagttctttgatccctgttttactgagaacaatcggccggttggggtcgctgttttttacatcggaagccagactgatcaccggccgtgtgatcaggatgctgatgaccagcacaccaatcgcgctggcagtaaacaatgccgctaccacaatcacaagagttttgctgaacttattggaaaaagcaaacagctcatctgtgggaaccacaccgatcaacgcccatttgtgttccacaaatggggtatttgtattatagagcttcaagtaatgaatattgctgcaaaggatgtcagagtcttcgccgctgatcgtataagcattgttataatcttcggatgccgtaagctgcatttctttactctgcttcatatacatattgtacgcagggccgctgaccattgcattctgaaacggttttccttccccgccgtcctgcactccaaggatatatgcgctggtcttattttcactgagttcgttaaaagaaatcagcttcttaagatagtccgtggacaattctacgcccaataccccgtaaacagtaccgtcatccagtctaagaggcacagaataggagattacctccgaggtgttgtccttcagtgtataggtaggactccaataacccaaatcagttgtcttaagatccggattctctacagctgccatataaggctcatacaaaaaggaatagtagggagtattagaatccccgaatccaaatcctgaattccatccggtatccataccgatcttccattttttcaccagctctgagggcatccgctcagccagaagatccgtgttgtttgcagaaggagatgcaacagggtcgtaatccctgatgcagatccccggtttgttacggtacttgccttccttttgatcttttgacaggtcatccgtattcagcacaacaaaagcaccggtcaccatattctgacgcatcagtgaaatcagttcttctgtgcttccatccaacagtttggtatatacagaactgttgctttgaatctttcggaacccttccgggtcctgttttttcatcttctccgctgactcattgatggcattcagggcagaatccaagttagaccaacgcttgagcatctcatcctcaatgtagtttttccggttgataacgcgttcattaatgatatctacagaattttgattcagccgcttcatcactccgcccccaaacaaaagccctgtaaggaccgctacctgaagaatgaccaatagcagcaggggtaccaatattcttttcaaaattgaattttgtcttaaccgtctcataccctgaatctaaaccccgttagccttccaatgcttttagttcctttaatgttttttcataccactgatcaaaatttttgtccgtattgtattttcctaccgctgcatcataagacatgccgccctcaatggccttttctaccgctttcctgtcctgacctgctttatctgacagacaatattctaaaatatttctgatctggctgccgttctttgctgcctttggcgtatacatcttgttgttattgaccgtgttaaccgccgtcttgactgtgtctttgatgtcttcatttttttcatccttcattgcattttccacagtcttttctttatttgcttcttttttcaccggcagataactggaggatttggcaaactcaaagttacgtttggattcagtaaaccattttaaaaactggacagatgcatatacttctttgtctgaggatttggttacaaccattcctgcaccctgctgcactgcataatcctcgccgtccgcaaactttggaacttcgtaggatttcacctggatcttataatttttttcatcattgaccgtaacggctttcggataatacgcagctcctgagctggatccggtaaaagcgatcagattgcccatcttcatgtcatcgcttctgtatctgccgctggcagtaaaataacctttgatataagggacataataattatcccaaagttttctcacgacctttttatcaaaatttacggtacacttgccgtcttcgatcttcaaaagatccacaccctgctgcttggcacccacaaagaagtagtttgccatagcatctcttccataaaatgcttttccgtcatttggcttcttggttgccttatctgtccacttgtaatacttctcagctgttttcacgagaccttctattgtactcagatcagaagtcttggcaccagtcgccttggcaaacttatcccagtctgtctggtttaccgcaagaacctctgtggctttggctacaggaaagatctttaattcaccctttttggagagttctccttcttcaatatagttatctacatattcactgatctcggactttgtcaggtattcattcagatctgccacaaggccaagtttgtttacctgatatgcggtatccgcgtaagccgcaaaaatattcggcatttcacttgcgccggcttttttattggctgaattaagtaccgttttctccaggtcgtagacatttccctgggcataggtctctacatagatcccttgttccttaccttccttattgttgaattgtcccaccagtttctcaaacgcttcctgctgggctccgttgtaataatgccagacagagatgaccgtcggattgtccttatccagttctactgtctttgcctcctctttttttgtcccgcatcctgtcagcagtgacactgccatcaggcaggcaaggaaataaaccgctatttttttcatactactccccctatttgatttatcatcagttcctgtaaaaatataatataagaataccatatttaacctaaaacatcaaaaaaattggcagccaaacttttttgtttggctgccatgctatctgttccatttttttaacaaatgaagaaatcttgcaatcggaaatcccatcacattataataatctccttcgatgccccggataaagcctgctgcccttccctggatcccatagccaccggctttgtccatcggttcccctgtgtctatatactctttgatctcctcctctgagagatcataaaattctacagaggtctcttcgcagaatacctttttctgcccgtctaagatacaggcaacccctgtacatatctgatgccttccgccgctcagcagccggagcatacgggccgcatcctcctcgttctccggtttgcccaggatctttccgtccttgactactaccgtatctgcgcctacaaccagactgcctctttctgtctgccctgcaatgtcttccgctttcataagtgccagttccatcacggcttctctcggatcctgccttgtaatcacttcctccttgctgctggggaccacagaaaactccaggccgacctgctgccatatttctctccgcctcggagatccggatgccaatatcaaagttttcatttccttctccttttttgaatgctcgataagagtattataattcagcggagatggtttgtcgacttttaggatctctctgccatatcaaggaaataccgatacaccctgttgtcatcatccagttcagggtgaaaggctgtcacaagctgattcttctgtctggcggcgacaatacgtccgtctacagaggacagaatgtctacctctttgccagtctcctgaatatatggcgcacggatgaatgtcatagggatttctgtctcatctccaaagcatccacttgcgcagaaacttccaagctggcggccataggcatttctcctggcggtgatgtccattgttccaagatgagttctctcttcccccacgatgttttgcgccatgaggatcaatccggcacaggtaccgaatacaggtattccttctgagatcatatggatcagcgtttttgtcatattaagctctaaaagaagctttcccatgactgtgctctcccctcccggcagtatgatcccatccagctgtctgtctaagtctttcccggagcggatctcaaaactctctgcgcctagagcctctatctttttccggtgttctataaacgcaccctgtaaggccagtactccgattctcattatctgcctctttccgccattagaagctggatctcatcctcgttgacgccgaccatggctggcccaaggccggaagacagttcagccagtatggtgggatcttgaaagtttgtcacagcctttacaatggactgtgcccgcttcttaggatctcctgatttaaagataccggaacccacaaaaactccttctgctcccagctgcatcatcagggcggcgtccgccggggttgccacaccgcccgctgcaaagttaaccacaggaagccttccgtctttgtgtaccttcaggactagttcatgcggcacactaagcttctttgcctcatcaaacaattcgtcctcagacatagatacgattcttctaatatcccggttcatccttctcatatggcgcacagcctgaacgatatctccggttccaggctcccctttggtccgtatcatagatgccccttcattgatccttctaagggcctctgatagatcctttgctccgcatacaaatggaacatgaaactttgtcttatcaatatgatatacgtcatcggcaggtgagagcacctcactctcatcaatatagtcgatctctatggcttccagaatctgagcttctgcaaaatgtccaatcctgacctttgccatcactggaatcgacactgtctgctggatcccccggatcatctccggatcactcattctggatacaccgcctgcggcacggatatctgccggtatccgttccaatgccatgacagcgcatgcaccggcctcttccgcaatctttgcctgttccggagtggtcacatccatgatgactccaccctttaacatctgcgccaactgtctatttaactggtaacgttcatttttcattgctgctttcctccaaagttgtttccctaaaagttcacgtatcagactgatattgtaattcattatacagtttattggcattgtcaaaatatccagtttttatatttttaatagtaccagtttctcaataaccgcgttgcaggccatataacacaaaacacccccggagaccggaggcgttttacatttgttctattcagctgtctgttcacagtttgtgtccacaccgctgttttcttgttcaaattttaacttggcaaagtatgcttttgtctctgctataaccactgggcttaaggccgccaatgcgatcaggtttggaagagccatcagcgcgttaaaaatatccgcgatcttccataccgcttccacggtcataaaaggaccgatgaagacagctaagatatacaggtaacggtaccccattacgatcttcatcttaccgttagtgaggtattccaggcaccgctcaccataatagttccatccaaggatggtcgtaaatgcaaagaatacaagacagagcattaaaatgaaggacggcacgaccggcggaaacggcattcccatctggaatgcttttgttgtcacctcaactccctcaaggccaacattccatgtccctgaaatgacgatactgagtcctgtcatcgtacagatcacgatagtgtcaataaacgtacctgtcatggaaacaaggccctgacgcaccggttcttttgtctgggctgccgctgccgcgatgggggcacttccaaggcctgcctcattggaaaaaataccacgggcaataccggactgcatggctgccagcatggttcccaatgctcccccggccactgctttgactccaaatgcgctttttacaacaagcacgatagctgccggcactgcctgtatattaaagataatgatgctaagggcagccaagacataggccactgccataaatggcactacgacctgggaaaccgccgcgattcttttaataccgccaaggacaaccgccgccacacagatcgtgatgatcacgctggcaaccagcaccatataagaataatccttaccaaacaggcggatcatatgggcattgttcggatcaaagaagttttttaccgccccggagataccgttcacctgtgtaaatgtaccgattccaaacaaaccaacccctgcaccaaaaaatgcaaagatctttgccaaaggccgccattttcggcccattccattttctatgtaataaaaaggtcctcccagcacatggcctttttcatcgatggtccggtatttaatggccagaagtccctcggcatatttggtggccataccgaaaaacgcagccaggatcatccagaataaggcacctggtcctccggcacagagcgctgttgctactccgacaatgtttccggttccgatggtggctgagagcgctgtgcagagcgccccgaaactggtcacttctccggatcctccgtcttcatttttcaccatatattttaatgcctttggcaaatgcctgatctgcaggagccccagccggactgtcagatagattcctacggctaagatcagtacgatcagcgggattccccacaccacatcgtcaagccaaatgataaaattgtttagttgtgataacatgattttttctcctctttcgtttcctgtattcttctataaaatatgtgatttctccgaggtttttatattatagtacatttcaaaagcagtgcctataacgatcctcgcggagcgttttttatttcatagggcacactttcctatggaataaaaaaagccaaaccgaaagtttgacctaagaaagagtaagcacgtattctctgtccttttgcctgagagataaacagcgatgctgtcgtacaccttcggcgctcttcctttgagactctccagagtgcatgtagcatatacatacgttaagatattaacacagctattttagaatggcaagaatttcttttcttgcatctgagaaagaaatcccttaacataaatctaagaaaaatatgcaaaggagttttcatatggaacatatgattcatgaaatcaaacctgtctttaaccacgaatccaaaatcctgatcctgggcagtttcccttctgtaaagtccagggagggacacttcttttaccatcatccccagaaccggttctggaaggtgctggccgcctgccttggacagcctgtccctggaacagtggaagaaaagacaatctttctgctgtccaaccatatcgccgtgtgggatgtgatcgcatcctgcgatatccagggctccagcgacagttccatccgcaatgtgactcccaacgatctgagcaatctgctggccctggcaccggtgcgcaccatctataccaatggcgggacctcacacaaactgtttcataaatatctggagccgtccctgaacagagaggcagtaaaacttccttccacaagcccggccaacgcagcctggtctcttaatcgcctggtcagtgtctggggtcctgcactccgccaggggttatttcccggtgaagcggaccgtgatctcacagatctctgacttggttcccacccgcataggcggtccccagacccccgcaccggatgtgaccacagaactcatagcccctattttcttatatccacaggaattctcccacatgagggatgtaagcacatttcccggaaagatctggccgtcatgggtatggccggataagtccagatccgctccctcttctgacagctccttaagctcttttggttcatggtccataacgatcaccagtttgctcaaatcacaatctgccagaagaactcctggattcttcctttcaactcccatttttttcgccttagatgggtcttttcttcctgcaagataaaaactctgccctaccagaactgttttgtcatccaagactttgatcttggaacgtgttaagaacgctctcatctgtctgtcatctgagctgtgcttctttgtgccgaatgtaaatccgcccaggatcttttcattgagatcatggttgccccagcatgcatatgtaccgtaggtactttttattttggcaagttccttctctatctgatccggattctttacagcccggtattcattgtcaaaaatatctccggcaatgcagactaaatccggttttccctcatttgtcttttccacaaccctgcgcacctgcgaaagtccactgttatagcccagatgcaggtccgcgatcaaaacgatcttcaactgatccctgcctggacaggctttgtccactgtcacctggtaactggtggtatcaacatgtctggcatggacactgccatagacagtaaagcacaggacggctgccaaaataaatacacctgcccaaaaggatatccctcgtttccttttctgcctccttctgttcaggatccatccgatcatatctgcagcggctgtcagtgagacagcgcagaaaaacatcccaatccaatagttgctgacaactttaaaaatcctctgcagttgggactgaggcagcaaaaatgccgtcagaagggatgttgccgtgccccagtataagaccgtatataggatgcggggtttcctggaatgaaacatactaacatataccgtgagccaatgaagacctcttttatataaataatagttcagcaataaataaaacggtgccaagatcacagccagcatacatcatcaccttcatctttcttctgcaatttcttttacggccttcaccacctgctctgtctgctcttccgtattaaagctggaaaaactgaaacgcaccattccctgtacttcggtcccaaaagctttatgcatcaaaggggcacagtgcccgcctgaccgggtacagatatcatactcctccatcagaatgctgctcacttcccctgagggaagttcctttatattcaggctgacgatgggcgctctctgcttcgttgtaaaacttccgtatacctttacttctggaatttgaatgaccctctcatagaacatctctgccaagcagagttctttctccttaagtttgtccattcccttactgctgatataatcgattcccgcgccaaggcctgcgattccgtggccgtttaaagtcccggcttctaaaacctccggcatctgctccggctgttctttctcaaaggttttgataccgctccctccaacctttaaaggctcgatcaaaagtccctgccgcactgccatgcctccggtgccctggggacccagcaggcttttatggcctgtaaagcaaaagacatcaacatggtccttcctaagatccacaggaaagatcccagctgtctgcgcgccatctacgatcatcagaatgccccgctcgtgggccgcttttccgatcctgcggatatccataagattgcctgtaagattcgatgcatgtgtgcagacgaccgctctggtatttggtcgaaacagagcctgtatatcttccgggcagacagtcccaagcgtatcacaacctgctatggaaagttccactccctgctgttccagccggtacaaaggcctcagaacgctgttgtgttcaaggactgttgtcaccacgtggtcccctggacgaagcaggccgcagagggctgtattgaggctctccgtcacattggaggcaaaggcaatctgagaggggccacagccgaacatttcccccagcttctcccttacctgatatatggttctggaagcgtccagagcggcgtcatggatccctctggaactgtttcccatgtgccgcacggcatctgccactgcaagagccacagaatcagggcgataataactggtggccgcactgtctaaataaatcataagcacctcccgggatgatctaaggtttgatgatctttcctgcctgcatcatagtctctgcgatcatatacatgttggtcacttccccgacggcaagctgttcttccagtccataatgattcaggcaggtcccgcaggtaagaatctctgatcccccggcttccaaggtctttaagtcatttaatgtgtctgcaccctcacaggaaagcttcgctccattattaaaaaggaggacggtatctggtttttgctccagctgggtcagcgcaaacacaaaccccttcatcagcatctttccaagaacctcatctccttctcccatcttgtcagaagaaaggacaacgacaatgtctgagaattccgccggtacttccatgtcctgtacctgaggattctctgacagcttattggcctctgtgcgtcctgccgtcatactcacttcaaaaaggttcgtattcagttccttggataaaaaaccgtatcccttctgcagagccagctttcctaagttctgcaccgcaatatcattatccactgtcacgatcaccgtgctgccttccggtgactcttccaacgctttcttggccaggatcaccggcatcggacactgtttccccactgcattgattcttttttccatcttatgctccttccttcatcgcactgtgatcttcttctctcttcgtttcgtgattctacccacgatcgcacacggaagttccagttcttttaactcttttaaagcactttgggcatcttcctgtctgacgctggccagcagccctcctgaagtctgggggtcaaataataattcttccatccagaaaggcacatttaaaaactccacgtcactacccactgcattccggtttctctgccctgccgctgtcaggtagaactcatttgcataatgatccgcaccttcaataaatgggataacagacgaatcaatgtccgcagattgagcttcccccaacatttcagacaaatgcttcaaaaatccaaacccggtcacatcggtacatccgtggacctcataacccgacaggatttccgccgcatatttatttaaggtggtcatagaacggaccgcctggtcataagcggccttagaggcatccttcatctggctggccgccagcacaatgcccacacccagcggctttgtcagcagaagcatatctccgtcctgcacaccgttattggtaaggatcttgtccggatgaatggttcccatcactgacattccgtactttacatctgagtccgcgatggaatgccctcctgccagggtacctcctgcctccgtcaccttagagttccccccaagcagaatctcacccaatatgttgagatccatctgctccgggaaacatacgatattcagtgctgttttcactgtcccccccatggcataaatgtcacttaatgcattggcagccgcgatctgtccaaaggtatacggatcctccaccataggcggaaaaaaatccagcgtctggacaactgccaggtcctcgctgattcggtaaaccgccgcgtcgtctgcgtgatcgaacccgaccaggagattttcgtccttattttttggtatcttactcaagacatggtccagcattccgggtccaagttttgctgtacagccgccgctcttgcagaacacaatattctcttttcccatacatactctccttacaacaatatctggtagattccttccgtctctataccttcccgtttgagaatctcctttatcgcagtctcctctttcagttccgcgcaccacgccattccgcacccagcagtgatcaccgggggcactgcgatcagacgcccctcaacaccgcttattctgcagtgcttttccatagccatggcactggtcgtattgggaaacgcaacgaccaggcggagtctcttctctctcatagcgtaaattcttctcccgctcttgttatctcccttacgattccctgataagcccttccgtcatcacagttcagatagtgccttgatatcttatattctccaaaggcatgcatcggaaatactactttgggatgaatctcttcgataaaatagttgattcccttgcagtatttatcttcctgcctcggatccagcagaagaaatgccagatcgatatcccggcccctgagccgttctacttcttctttataggaccggatcatatattcattgtcttcctccggctccccgttccagtaccaccagtttaaatctcctgcatgatagatggttttcccttctgcagtgaccagaaatgccactccttcatcgttcgatttcaaagtctccacccggatgctgccgatatctttagtttcatgttccctgattctggttgtgtctcccaaagcctttgcagagatatcctctgataaaatatagtgtatctgcggataagtcttttccagattaaatattttggggttgaagtgatccggatggctgtgggaagcaaagacatacacctctttctccttcggcatatcaggaatcttccctttataatagtcaaacagcaacaccgtcttttcaagttccacgcaaaaaccgctgtgttcaataaatgtaactttcatcgtctatttacctcctgactccaagatcttttctttcagctgtggatcaaacactccctttttgagcatttcaatctcatatttgtaaggaggataagaattttttgtcccatcttccttgatatacggggtttccagaatcttcggaacctgctcaaaatctttatggtgtacgatgtgatttagtgcatcaaaccctatttcaccgaacccgatattttcatgcctgtcctttgcagcacccttcgggttcttgctgtcattgatgtggaaaaccgcgatctgatcctttcccacagcccggtcaaaggaatccataacaccttcaaaatcttcaacaatatccaatccgctgtcgctggtgtggcaggtatcaaagcatactctcagcttttcattgtgtttcacaccgtcataaatgcgcttcagctcgtcaaaatttcttccaacctcactgcccttcccggccatcgtctccagtgccacatacagcggcgtatctcttgtcagaacctcattaagaccttcaatgatcctggcgatcccggcttcttccccggctcccacatgtgctcccggatgaagcactaaggtactgcttcccatggctttcgtccgttcgatctccagcgccagaaattctactgccagctcaaaggtctccggctttactgtattacccagattaataatatacggcgcatggacaacaaatgtctcaatccccgattctttcataagctctgaggcctcttcaatcctaagctcactaacgtcttttcttctggtgttctgaggcgcacccgtgtacaccataaatgtatttgctccgtaggacaatgcttcctttacagatcccagaaacatttccttgcctttcatccctacatgtgatcctattaacatctattctcattccttttctttgatttaataaattgcagctcttattataaatcataggagcctaaatgtaaaaggtattatgttcttcaaaaaatacaaaaatttaattgcatttccataaaatccatgatattataactgtgttgtgcagtcgtggcggaattggcatacgcgctagactaaggatctagtccgggctaactgggtgagggttcaagtccctccgactgcattctttttattttaaaagctgatgcatcaatgagttcatctcattggtacatcagcttttttgttttaagtgccctctggctttgttatgctatttcttttgtttccatacactggacatgatatcttttaataccagaaacgcatcggtatcattataaccataatccctttttaaacgatccagcattgctttcagctgctcggcatacccgcggatttggacttccttctgatacgtggataggattggatattttttaccccagacctttgtccagtcgatcttgttctgcatctcttcgcttgtattttcaatgacctgttctatttcttgtatatttggatcaaattctatcagatcatccaatgacagacgatacagtacagccaggtttttagactggcggatatcaggaagggtctcatctgtttcccattttgagactgtctgcctgctcacacctaatttccccgcaacttcttcctgggataatccgcttttctttcttgcgttatataagctatttcctaaactcatatacattacctcctccttatctgttataagataagtataggttgttctcgtaagaaacgccaccaatcatatcttgaaatttcgcacgtattcttaactttccggatcggcccgtctctgttccagctgtcccggtctttgatgcagaagaaattcaaccgcatcatcggagagtacccattgttctacctggtcttttttaaggactagcggcattctggaatggatctctttgacagattcattggcttctgtggtcaggatcacaaactgctgtccttttttgctctcacgaaggatccctgccatatacatgtcaggctgctgcctttgatagaaagcatgcttcaccttgtcacggctccattcataaaatcctgccgcagggatcacacagcggctgccctgtgcatattttttgaacattcttttttccaggactgtttctgccctggcattgatgatcagccccttgccgtcaaagcgatcaaatccccaggaacacaattccccggccatctcctgtccatatcttaaaatgaccggagcctggctggaaggataaatctcccttttccctgcaagacttatgtcaatcatttttactaattcctccgctttttttaccgtttcctcatcgataaaatatctgccgcacatcgtaccacttcctttctatctgattattgtaaccaatttctatccatcttcattcatatagaacaaagtgaacaaacctaaaaaaagaaatcctgcctgctttttctactgacaagatttctcctatatttattctataattgatatccggcttcctgcttttaattccggcatttcacttttttccacacagatacttcctggcagacactctctgtcaccgttaaagaataccgtcaaatggcccagttttccaagattttgggcagcaatctttcctacttccgtgatcttatattcattgtcatcaatgaccagcctactccccggttttatctctccaactaccggattgacttcaacaaaataacaaaaatctctcaaacttaccagtgccggttcaccaaacgtgatcaaaaaaccttttttggcaaatgcagacacatcacttcctacagccttcactgttgtatgatagatcatatgattcatcctttctttagagaagttcccgttcaatacgttctcttgcctccggcgcctgcttctccatcttttccgggaatccgaacatggatacacatgcgatgttgtctcctccggctttcggcgcatcttcccttaactggctgtttgcgaagtccatctctcttaacgtctcaaagatcccgtcaaagtccacatctccctctcccatggctaaatgctggtggatggtcacatccgctttccctcttccgtttaaccacggcgggttggcgatatagcggcagtccatggtctggttgaacgtatccgcaaacagtacgtgggtcagttcttcccctgcgtactgtaacatggagcgcacatcccctttgccttcatcatagaaaaagccatgcggagaagaatacacatacccaaggttcggagaacggaaagattttaccaggtcacaagtctcgttgttcagctcgcagaagtcatacggatgggactggatctccacccggagtccctcccgctcaatgaccggcagaagttcttccatagaacggaaccacatgccgttgcagatctcctgctggttgggatccccggacagctccgtgttgattaccggcacacccatgtccacggcaatctcaatcatccgcttccagttggctactgccatctgtctctgctcctctgtaggtccggaccagcggtacaccacgataaaggaggagatctccactccggtttcccggagtgctttcctgtattctgcctcacattccttagagaacagtgggtgtttatagaatgggttgatcctaggatgtggggactgttcaatgtatttataaccccagtctgccacctgatgcaccatccggttgatatccatctgctttgccagcacatccacgtcaaatgctattttcataaagcggtactcctttctgaaaatctataaacctgttttttctgcaatatattttcttgcctttattgcgtattccagcggattggcaactgccgggtcctgctcagcctccactaccacatatccttcatatccgcttttctcaatgatgtcaaagatcggtgcaaaatccacgtctccgtctcccggtactgtgaaggttccttctctcactccttttaagaagctccagctttcttttctggactgcgccaccacgtctgagcggaggtcctttaaatgaatatgctttgttctgtcaatgtattttccaagcacttttatcgggtcgatccctgcaaaggaacagtgtccgctgtcaaacaaaaggtaaaccagatccgggtccacttcttccataaaccggtcaatctcttcttctgtctggactacagttcccatgtggtgatggaaggtcagcatcatgcccttatccttggcgatctttccaagcttgttcagtccttttgcaagcagcttccattcctcatcgttcatcacatatttccctacaaagataggctggtcttttccctgggtgctgtagctctgctcggaaacaccgatcacttttgcgcccattgcctttagaaaatctgtctgtgcgataaattctttctctgtctcttcatacggtctggagatcagaaaacttgaaaaccagcagttgcagatttcgattcctctgatatccaatgccttttttaaggtcttaatatcttttgggtattttcctccgatttcggaacctgtgaacccggccaatgccatctcgctgacacattgctcaaaggtattttcttttcccagatccggcatatcatcgttggtccatccgatcggagctatgcccaatttcactttatttttatccaacatttctattattacctctttcctatagttttcctgagagttctctcaccgtcagttctgctatcatttctttatatgtcttatccagcttatagcacagtgcgatcagcatcatgacaacccataccacgatcggcacgtacagataagtggctttgatgactgcgatggcagccggtgcctgctcagccgctgtctgggccattccgttatatcccacataagacaatgctgctccgagagcggcattggtgattccagctccaaacttttgaccaaaactcatggaagagaacatcaggccttcgatccgttttcctgacttccactgaccgtactcgatggcgtcactcggcagtgaatactgaactccatagaacggcgacattccgataccacggataatcgaggagaaaattgccagtggtacacttgtgatgttaaacaggaagacgatctgcccagcaatccctagaatacacccggctacaatcatatttctctttccatacttcggtatgagctttggcagaagaagaatgacaaagatcatcggcactttctcagccatagataaaggcatgaccagatttacatcatttaaaacatattggcagtagtaagtaaggtcaattccgagaatgatctggtaaatggtataaaacagcatcaatcccagggaaataagaaaatatctgttttttatcatcagcttcagggctgtgaacactggaagtttttcttctgattttgctgatacttttacccgttctttacagcagcggaatgtgtttaacagaatgaggacagagatgacagaaaacactgctgtgacaatgatccaggcaagctgggtgttgtcaatttttacagccacccagttgatgatcggaagcgttaatgccgtgacgaccatgctggctgtaatggaaagagacatacggatattgctgatggtctctctctcatgtttgtcccggctcatcagagaaccgagggtgtggaatggctggctgattcccgtatacatgactgtgtttaataagttatatgtaataaatacataagctgcctgcacagtttttgtgccgtgcggcactgtcatcaacagtaccgcggcaatcgcatagggaatgaccagtcttaggatccaaactctggattttccatatttagaatgcgtccggtcaatgatggttcccatgatgacatcagacactccgtcaaatgcccgggaagcaagcatgatcataccaatgactcctgcggaaagcccgatcacatttgtatagaagtaaaccagcagagtgttggccaatgtatatacaaccgtcagcgcagggtcacccacacagtacgcaagcttctctgacatctttactttggcaaactcgccttccagttcctcataattttcttccgcattcatgttcatctttaaagtttgttcactcatagacatctttgtcccccttatgctttatgcaaagtattttgctacgaaatcccttgtcacttcagcagactttttcacattctcgtcatgggacatttcataatattctggacggaattcttcaatggtacataccccgtcgaatccgatcttctttaaggcagctgcgattcctgcatgatctaccacaccttctcccggccacaggcgtttatcatcaccgcatgatcccagaggcagatcctcacagtcattcagatggtaagcaaagatcttctttccgtccgctgcttctaaatcttctaacttagaacacatctcatggaaatggaaggtatccactgttacccctacattgtcacggtctgttgctttcactacatcgtaagctgtcccaaactggttgatggagcagttcggcgccccgcagaattccagtgatatcttaatatcttctcccaccttatcggataaataacggagacgttctactgcttcctctttgatctctgtgatgctcttatcctttacatcaaaggacggaacagtgatcagcatcttcatgccgatggccttgcacacttcaatgataaaatcagtctcttcgtcaatctctttttctccggcttcgtctctctggttaaaaaagatcaaggtattataagcccatggttttaaatgatggtttttaaaccagtccgccagttcttccagtgtgtgttctttcaaataatcctttacacagtcaaatctgatctcgatgtaatcaaatccgtatttttcacacgcttctaagtcagccatcagagactgtcctttacattccagtgcagttgcttcgttaaatccgattttcatttctattcctcctgatttatgtattgatcttatttccatgccctcgcgcagtcctgcagtttctgcaccctacttataaaatgcaggtttttcttctgtgacgatcggttcaatctgtcctgtttcctgtgcttttactaacgcatctgctgtaacagctgccagatatccgtcccatgcggtaggtccgttgatcactccctgcttcgcacagtcaacccaattctgaacttctgtgtcgtatgcatcttcaaaccttacaaaacagtctgtatcaatcgttgtggatactgccgcattttttctgatgcttggataagaaggttccgccatcttgatggcaccgtcttcgcatactacttcgcagttgatgtcatatccgaacttgcagttgacgaatacttctacatcgatgcagattcctctctttgtgcggagcagcatgatctgaggatcctttaattcagagtgagagtattttgtcaccttcggcataatgacctgagcgctttcatattcatcatccactaaccagtgaagtgtgtcgatctcatgaatcgctgtatcatgtactgccatcggagtattatagtttgtaccaacctccggatttctgtgtgtgcagtgaaggatcagcggttcaccgtattctcctgaccgaagcgcttctttcacctgaacatatcctttatcataccttctcataaatccaagctgaattaaatgttttcctgaagcagcctccgcatctacaatcttcttgcagtcctgcgctgttgtcgccagaggtttttcacaaaacaccctttttcctgcttcaatcgcctgaagaagagagtctgtatgtgcaaatcctggggatacaataaatacagcgtccacatcaggatcattgatcagatcttttccgtctgtatataccttagctcctcctgccaatgccgctgcttcttttgctccttcttcaaagacatcagaaactgccactacctttgctccctggatcttgtttgtgagacgtttaatatgatcttttcccatgccgccacatccgattacacctacatttaacattgttctacctccatatgcttgttatctgattatttgtttcatttagattgtgaacttatgataacattgagtgcgcgtgcacgcaataaacaacatgcacaacaattccaaacaaactttagataaattcacctggactatcttttctgcacaaaaaatacaataccggacaccgatattgtatcaatatttatacattttgtataaccaccccaaaaagtttgttaagttatggttatatttttattagttttataacaaatgctgtcacaacacccatgcaagatccataaaaaagatgacggctaaacagaaggcgcctcccacaagagtttttctttattgtctgaaggaggcctttccagagccgactgaagacaataaagaaaaactcatacattgcatcttgtcttaatcacgatatctgtataccagaactctccttttctagtaggatttccgcacagagtgtggaataattccataacagattcatatccctgcacataggagttttgcctgaggataaaattaatgactccttttcttaaattttcccggttttctccctcgtaatcgtgggcgatcactttgatctttttttccagcctgtactttttcaaggtgtcgcacacaccactctccccctgggccgtaaggtatataccggccaggtccggtgtctcttccagctgttcttccaggagctttcccgctacccagtcgtcatcatatgcgtatcttggctccattgtctgtatgcccggataatggtgtgccagttcgtccaggaatccttttgtacgcttcatagttgctacattttcctgggatccggagaggatcatcactttaccgtccgccggaataatctctcccataagccccccggccactctgccgctggcataggaatcttgtccgaaaaaacaaagtctctttgtatcctccaggtcagagttgatcgtgatcacagagatattttctttttccacgtactgattaatcgttctcctgagcagttcatcgtcggttggcaccagtgcgattccccttactccggcctctttaaaatcatgcatgatcttcagcagtttcttcacatctcctccatgaatccgctcaacaaacacatgtcctccgaatcgctccacctcttcttttgcggactctgtcccttccagcacggctttcataaagggagtctccgcatattggatgatcactccgatctgaagggcatgattggccgtagagagagccttcgccgccatattgggctgatagcccagctcctttgctatttccttgatccgctctgccacctccggccggatcctacctcggttgtttaaggccctgtccacagtccctctggacacccctgccaaatctgcgatctgttgtattgtaactgccatttcccttctcctttcgcgttcccgtgcacgcatcaatagctttattatagcacactggagcggagatgcaatttcttcatgtgttgaataaagaaaaaatcctctggaataccctgaggactttttctattaacaaaatataatttattatgtggagcacaccaagcccgaaggcatagaatacggtgttccctgtgggtatgtcatgttccacatgatttccgttcggctcatagaatgcctcactccaatcatgcagaacatagacgtagtgtctgctagataaggatgacggcgaaacagaaggtgcatctacgatagtttttcttcattgccggaaggaggcctttccagagccgactggagataataaagaaaaactcactgtgctgttgcctatgtttatctgcagttaaagatctggatatggcgttttacgttgtcatagacaccctttaccatagcttcgttcatatcgaagtaattatgttttccttctgtctccagatagttttccacttcttttgtcaggctgttaaagcttgcagttgcaatgttcactttgcagattccaagagagatggcttttctgaaatcctcatctgtaataccgcttccgccgtgaagcaccaatggtttggcagtaatattgtgaatgtcttccaatacaccaaattccaaagtcggagctaccggatagtccccgtgggcatttccaatggcaacggccagggcatccactccggtctgctcacagaagaccttggcgtcctgaggcttggtgcactggattccatggtcactctttccgtcttcgcttccgcctaccagccctaattccgcttccacggttgctccgtactgtgctgccagagcgacaacttcttttgtttttctgatattttcttcaaacgaatctctggatgcatccagcataacagaggtaaatcccagttccagcgctttttttacagtctcaatgttaagtccgtggtccagatgaactgccacatccacctttgcctcttttgccgcctgcaccatcatcggccccataagatgaagcggtgaatgggcgagccgcacttcagcgatctgcaggatgatcggtgtattcatctcctccgctgcctgaatcgcccctttgaccatttccatattgcccacactgaatgcaccgcatcctctgttttccttttttgcctgctctaataactgtttcattttgactaatgccatgattgatacttcctttctctttatttttttactgtaattttatctgtggttttacttcctgtttcacatttgcctgttcttcacttttgatctctttttccagctttgtcaaaaacagaaacgccgccgcggaaaatgcaaaaccgatgaaaaatgtggtgttgaccggaaactgctctgctgtaataaagtttgtgatgcagggtgataatgccgtgacaacaatgatcccaaacatcacgatcccatagttctgtcccgaatgcttcagtccaaaaatggaacttgacagagatggaaaacttcccataatgcctccgaaacagccgtagatcagcacgattgccaatgtggtgagcagcttctggcctgacacgagaaatgccatcgctgccatggaaagaaggatcactcccttgatacattggatcctgccgattttatctgaaagggaagggagcacaagcctcatccctgcattcaatatagatcccgccatgacggatcctaccgcaagcgccgtgctgacacctctgtctgtctgaagtgtctgcgataacggcgaggtaagatagtatgccatgagaccgcacatcatggtacacagcaggtagtaaaatttctttgtccttatcatttcagcggaggtgtactgctgttgatctccataggaaaccggtgtctccttctttgccgcctcacttggacttttaataaacaaggttcccagaatccatgagattcctatgagaagcccaactgtcagaaatgccagcttgggacctcccgtctccaagagtgttttgctcaccggtgccatgataaggccgcagatcccatttgcggtgatcaccaccccggacgcaaatcctgtcctgttcggaaaccatttctgagcagttgaaagaatcggtgcgtagatcattcccgatccgattccctgcatcactccaaatgtcaggtacatccacacaggtgaagaaagaagcatatatcttgaactcaatacgccggcggtaaagactgccccgcctaagaacatagcgggtgcaggtccctttttatcctgaagcctgcctccgagaacgtttcccaatacaaaaaacatagtcggcagataaaaacaaatggaggcctgaccggtactccatccggcagttttcatcacgtaaggctgataaatcgaccatacatggggatagcctgtaaataatatagcaaaggctccaaaaaccatcattgcattccgttttttcttgttcatatgacacttcccaacctcttggttatattttgattatcttttgagctaatattatcactttacccatacgttgtcaataacaaataaaaaggaggttgtaatatcaccacaatatcacaacctccttttatatataacagtatgtattttattttccttttaccgccttcacagcttctgtaagtttcggtacgatggtatttaagtctccaacgatgccgaggtctgcaatatcaaagatcggcgcatcctcatcacggttgatggctacgataaactctgagttctccataccggctgcatgctggatcgctcctgagatgccgcaggccagatataattccggacgcacagtctttcctgtctgtcctacctggcggtcagcactgatccatccggaatctacacatgctctggaagaagacacttcaccttccatgacatccgccagttcctctaacaccttgaacttgtcagcgcttccgattccgcgcccaccggaaacaaggatcttagcctctgtaatgtctacagatttatgtgctgtctttacagtttcacggacttttacattcatgtctgcatcagagaattctactttgaactcttccacttcaccgcttctggatgcatcgttttccaaggctttcattactcctggacggactgttgccatctgaggacggaagtcttcacacacgatggtcgccatgatatttccgccaaatgccggacgggtcatcatgaggagctttgtctcttcatcaatggcaagtgcagtacagtccgctgtcaatccagtatggatccttgcagatactcttggggcaaggtcacgtccgatggaagatgcaccataaagcacgatctcaggatcttttgcgttaatcacagctgtcagtgcctttgtgtatggctctgtcacataatctgccagcataatgtcatctacgacaacaactttatctgcaccgcaggcaactaattcctgggctttttcttttacgcctgccccaagcagcacggcaacgacctgctgtccaagatcatctgctaattctcttgctttaccaattaattcgattccgactttctgaagttcgccgtctctctgctcagcgaatacatatacgtctctgctcattttatcttctcctcctcgcttaaatgatgtgcttttcctgaagtttatcaacaatggatgcaacagcttcgtctgctgataaatcttttaaaatagttcctgcacctttggcctgttttgtaaaggatttctttactcttgtaggagatccttttaacccgatatttgcctggtctacagtgtcttctaagtctgcaagtccccagacgctgacttctttttctctgtatgcgtcaaatgcaccgtggactgtcatatatctaggtgttgccaattcagccaaagcagtgatcaggcaaggagtctttacttcaatgatctgatggcggtcttcaaactgcctctggacgatcaaagtgtcttccccttccacattcagggcttcgacatagctcacctgaggaattccaagatgttctgcgatctgagggcctacctgagcggtatctccgtcaatcgcctggcgtcctgtgatgatgacatcgtaatccaattttttgatcgctgccgcgatagtggaagatgttgcccatgtatctgctcctccgaatgctctgtcagaaaccagaactgcatcgtcacatcccatagcaagtgcttctctcaatgccacatctgcctgaggcggtcccatggaaacaacagtcacagtgcttcccgggcatttttcctttaactgcagggcagcttcgattccggctttgtcatctgggttgatgatactcggaacaccatccctgatcagagtgttggtctttggatctaattttacttcagttgtatctggtacttgttttgcacaaacaacgattttcatctcttattctccttccactttacgcttatcttaaaagtccgccgccgacgatcatcttcatagcttcagatgtaccttcgtaaatctctgtgatcttagcatcacggtacattctctctaccggatattctctggagtatccatatcctccaagaagctgtacggctgctcttgtcacttccactgccacgtcagatgcaaacagtttgcacgctgctgccagaggagcatagttttcatgatcgtcttttgattttgccgctctccataccataaggcgcgcagcgtcgatcttcacttggagttctgcgatcaggaactgtgtattctggaatttagaaatcggttttccgaactgttttctttcctttacatatgcaatggcctcgtttaaagcaccctgtgcgattcctacggactgagcgccgattccgatccgtccgcctgccagcgctgacatagcgatcttatatccttttccctcgcccgcgatcaggttttccttcggtactctcacatcaactaaagcaacttcacagtttgacgcagcacggatacccatacgagggatattcttgctgacttctaatcccggtgtattcctgtccacgataaatgcagacatacctcttgtacctgcagttttgtctgtaactgcaaaaataataaatgtatcggcaaagcctgagtttgtagtgaacaccttctgtccgtttaagatatattcatcgccgtccaatacggcatttgtcttcacaccgctggcatcggtacctgctcccggctctgtaagaccaaagcatcccactttagaaccgtcaaccaacggacgtaaaaatttttgtttctgctcttctgaagcaaaatcattgatgcaggaacagcacaatgatgtatgtacggaaattgtgattcctgtggaagcatctaacttagacatctcttccatacagagtgtataagttaaaacgtctgccccttctccgccgtattctttggaatatggaattcccataagaccgaattttttcattttctcaagcagttccatgctgaattcttctgtttcatccatgtccctagcaattggcttgatttctgtctctgcgaaatctttgaacatctgctgtgcaagcagctgttcttttgtcaatttaaattcaaccattttcttttttcctcctgtttgctcttacattaaaacttattagcatccatactattagcccgccaatactttgtaagctaaatattcgtgagctaatagtatcactttgtgaaagttgtgtcaacagctttcgttaatctattgtctatttatattgtatacatgtcatctttgtgcaaactgttgaatatatcaaggtaatcttgtgagaaaatactatgacgacgccatacaaatgtgaagtcgtgtacgacagaaaaatctcttaatttaagttttctcaaagtaccgttttctaattcttctctcactgccgcttcatatagaaatgtaatgccacagttttctgataccagcctttttatcatatgaaggctgctgatctcatgtcttattttaaaatcctggacattcagattccgtccctccaggcttttttccaaaatctcacgtgtaccggacccaggctcccttgtgatcaatggttcacccagcagatcttccagtacatccggctcctttttaaacaggtaggaattgccgcacactgccgtgtacgcttccctggaataaatccggtagtcgtactctcttttttcaaaatagccttccaccattgcaaaatcaatctgtccaccgtccagctgtctgagaagctcctctgtgtttgctattttcacagacacctctgtatccggattctgttttatgtactctgccactgcctttgacaggataaaatctccgatggttaatgttgccccaaagttgatctttcttttttcctgtttcatctcctgaatgctgcgtttcagatacatctcatcatggtgaaacgtcattgccgcattacggaacaaatctccttcaggagtcagctgcagttttttcccttccatctcaaacagcctgattctgtattccctttccagccattttatatgctgggataccgcgggctgtgtaatattcagcttcttggcggctttcgtaaaattcatctgcctgcacacttcaagaaacgttaaaatcctaaaatccagcatatggctcctcctgcttatccttcttttatcgctatctgtattttaacacactgcatccaattttacattttcccagcaaaaaaggacatcaaaatatatttgaatgtccttgttcctgcacagaaatattgattcatatatcattgggcatctagctcatctaacagcccttttagtttttccccttcttcttcagataatctcccgcttagagcactgataaagctcttgggagaaccatcaaaccaaatatcaagcatctcctccgcctgattcctccgataatcttccttttggaccaccggtacgacataagaaaacttccccctgcgctcaaccttgacatattctttttcctccaggtcaaacaaaaaagtacgtacggttgtccgcttataatccttgtcatatttttctcttaattcttctatcaaagtcaaaaatggtatctcgtccttaccgtaattccaaacacatctcatgacgacctgttctgcgtctgttaactttctttctcccatcaaataattctccttattcttacacgcacacttcattgccacttcactgtattactataacatatttttttgttcacagaaaccatttcacttcctgtattttgatcacacctttctaatgttcaggagttgattagaaaactctggatcatgaatttattatactccaaatgctaatgtctttttatataaatattttaccatgctttcctcttcttatcaactattatcttagtttatatttcacttaggattttctacaaaaaatgatcacacttgccgcaccaaacaataacaaaatattatcttattataaaaatatataattttgtattatcatactctcatgatatactcatttctggaaaaagaaaactaaaattaaaaagattctgaagaaaagaaagaggtttaaactatgaattttgtaagacaacactggtctggcatcctgctatgcattgggatcgccgtccctgcatggttcctcgggaatttatttccagttatcggaggtccagttttttcaatactcatcggcatgattctgacattgataataaaggacaaagggagtatgcggcccggcattgcgttcacatcaaaaaaaattctccagtatgcagtcattctactcggctttggaatgaatctgacagatatactggcaaaaggaaggcagtctcttcccattattatatctaccatctcaacgtccttgatcgtgtccttccttttatataagctgctgcatatggatgccaaagtttccaccttgatcggtgtgggttcttccatctgcggaggttccgccatcgcagccaccgctcctgtaatcgaagcagatgatgaggaaatcgcccagtccatttctgttatcttcctctttaatgtgatcgcggcactcgtatttcctgcccttggaagtatgctgcacctgtcaaatgaggggtttggcctgtttgctggtacagcagtcaatgatacctcctccgtcactgccactgcctctgcatgggacggtattcatggaagcaatacgttaaacgccgctaccatcgtaaagcttacaagaactttggcgatcatcccgatcacccttgctctcgctatttaccgtgccggcaaaaaagaggaggcactggaggaacatggagctaaattcagcttaaaacaggttttcccaatgtttgtcctgttttttattcttgcttccgtagttacgaccgtattttccctgcctgcagctgtgacagatccgttaaagacattaagtaaattctttattgtcatggccatggctgccattgggctgaacacacatatcgtcaaacttgttaaaaccggcggaaaaccgatcttcatgggattctgctgctgggttgctattgcagcggtaagtttagtgatccaaagcttcatcggcatcttataagctgtcctatcgatttacatcataaaaagagaggtaatctatacctctctttatttgctgttataaaaattttaaaatctgtatatgttatctatgccagctagaaaaccaatatttctgctcccattcctctttacctgtctttacactgacgttagatctctgatgacttcccctgctgcgatgagcccggccacggagggcacaaacgcaacactgccgggtacagctcttctgccctcttctccggacagatcaactttgggctccaaagacttttccttagaataaacgactttcagctcttttacgccacgccttttcagctcttttctcataacctttgccaatgggcagactgatgtctggtaaatatctgccacctcaaatcttgtgggatccaacttgttgcctgctcccatgctgctgataaccggcactcctgccctttgggcctgcagtacaagttcaatcttagcggttaccgtatccactgcatccactacataagaatactggtgaaaatcaaattcgtctgcgttttcaggcaaaaagaagcatttgtggatgttgacttgtgcatttggattaatctccaaaatacgctctttcatcacttccactttgactcttcccacggtactgtgggttgcgatgatctgacggttgatgttagatactgagacagtatccctgtcgatcagatcaaatgtacccactccggtcctagccaaggcttccgcaacaactcccccgactcccccgactccgaatacagccacatgggactgctttaatatctggactgcttcttctcccaaaagcaattctgttctgatccactggttttccatatcactctccaataattttgaccagcacacgcttgtcccgtttgccgtcaaattcaaaataaaagatctgttcccaagtcccaaaatccagacggccttctgtcaccgccacgacggattctcttcccatgactgtgcgctttaaatgtgcgtctgcattatcttcataaccattgtgctggtattggctgtacggtttttccggagccagcttctccagccacttttcataatcgtgatgcagaccagtctcatcgtcgttgataaatacactggcagtgatattcatagcatttaccaagaccatgccctctctgatgccgctcttatcaatggcctcctggacttgatctgtaatatttatgatgccccgcctggaaggcaggtggaaatgcagttcttccctgtatgatctcataaaacctcctgaatgtcctatttactatgagtttttctacatgattggagtgaggcattctaagagccgaacggaaatcatgtggaaaatagcatgcttcttgctacattattttaacgcatccgatattgttccgcaacagtaaaggtttttaagatctacagcttcttaacctctatttcggtataaaagttatctttgttttcctccaggaacttctgtgctttttggggagagaaaaaccgtactctcgctcctgtcaggtaccggaccgcttcattccactccctcaggctgtattggtcagcctttacggatcccgcgataaaacatgccaccggaaaccaaaaccccgagggcagatcggacagctcctggcatcccgcttcttttaccagatattcaagaagtttgttgttttgatcctttttcgttcgtatcattacttccctccaaagaatgataaagtagactttttcgttcggccaatgtatactgaaagaaacagttttatctcttgtaatctggtcgtttttagcagttttatgtacaaaatgaaccgaatgataatctctaccatttcatttatttctttctgcgcacccatctgagaaaggtatcctgggcaatgtgcagctgtttggccgcttttctggaagaaatctcaccgttttcccattgttgttttaatttatcaaagttctccggtataggctttctgggccttccaaaatggactccccttaatttggccgccctgattccatccatttggcgttttttaatgttttctctttctgtctgggccacataactgaggatttggagtaccagatctgctatgaatgtgcctgtgagatcatcttgtttttttcttgtgtccaggagcggcatatccagtaccacgatatctgccttgatctcctttgtgacgatcctccattgttccagtatttctccataattgcgccccagccggtcaatgctctggatcacgaggacatcaccctccttaagctttcttaccagttttttataattgggccgctcaaagttttttccgctcagcttatctaaatatatgttttgtttttccaccgcaaatgcttccagggccaacagctgcctagtctcattttggtcttttgtggatacgcgggcatatccatatacatttgatgttataaagatcacctccaataaaaaaatagtaccctggttcaccaggatactatttattatggatctttatctttcttttataaacatatgctccagatactcgctcttgaatttttcaacaaaaaaatcgcatttgcacaggaacagatagtagacattcagtccgcatccagacatggtctcataattgccctgcccctttgctatgatcacgtccgcgccgtttaatgcctctctggcctcatggctgatccttttcatactggtgcccgcgattctggtaccgtttccgatgacattggccacatcaggcattcccacctgcctggcatcctccatggatgcgtcgttggccacgcctgccccccggacaatcaccgtaacatgaagatgaggataaagtttctttaattcctggatcaggatcttatccaccacgatctcaccacagttatctgtcacgtagacaagactttgtgccgatgcgagatcctgacggaaggactggtagacctccggcttaagccccttgatcccattgttaaataaaaggttttcaagctgctcgctgtcgatctctcctagagctatgtaatcaatataatttcccgcctgagccgcctggaccgcagtgacgatgggatcttcagaatcttcgatcctctgcttgatctcctgttcctttgaaagcatcagatcattaaaatgccgtttcagaggatcaaaggcagtctgagtcccaaagtattgttcatacacttctgtaaactcagccagatattctggcggagacagttccatctcctcatcttttaagatttccttcacctgatcaagaaactgctgttttttttcttcctcgtgctcctgctccacttttctttgttcactgttatacaagcattgcctgcaaaatgtccctgtcctcatactattcctttcccttatcctcgaatcactgactcgtaaaaatcgtaaaacttcaacaaccgcataaaggtcagccgctgtcggacatatggggatactctggctgtccgttctttcatcctctgttccagtccaagatccgtaagcgaacatactccatttacctgattaaggtatgcttttagctgctcatcctctggcacttgctccagaatctctgtaagctgctcctctttttgtctcaaaatagaaggagaaatttcatccaacagattcggttgattctcttctattataatatcatccaatttcctgcctgcaaagcattttcggatcaattcctcttcaaacggtaccgcatcctttagcttataatctccctttttcagatattcggctgctttgtggtagatgtctgatgagaggaccagtccaacacctactttttctccgtgataaaaatcaaggtgagaattgacagcctccatctcccaaaggtgggacatatgatgttctgttcccgatgccggcctggaattcccggtcatctggattgcgagaccggacagcaatagtccatacatcagctgttcatatgaagctatatttctctctttcaaccctggaagactgctgcacatgatttcaagggcttcctcttccatccggcagatctcctggcagaaatattctcctgtaatcagatgtgcgatcttccagtctgccagcgcagtatattttccaagcagatctcccactcccgaggccgtcagcctcaaaggagcttccttcaaaatgtcgctgtctgccacaatgatcttcggtgcacaggaaggaaccgtcttcttaaatccctggagcgtcattgcggccaccgtggatgtgtaaccgtctacactggctgcagtaggtatagagataaatggaagatccatatcaaaagcacagtaccttgtaatgtcgtgaatggtccccgatcctgcggccacaagcgcatccggccgtccttgatcctttagctggtccatcacacgtccaacgctggcctcatctgcatgaatatccgccccctttaacaggacttttgtaagtcctgtcagtaaatcttctgcctgttttccaacagcctcataggtattttcatcgcagatcattgtaagctttttaaaaccagtatcttttaagatcccgggaagtttttttacggccccctcctccaaaagaatcgtgtcgatttcaatattgtgttcttttttacaggaacaagctcccctgaattggtttaaatcaaccttcattttaacctacctttcatagagataacagggacctgcatcgcaagtccctgaaaattagtgtccggttttttcattttatgctataatactatctgtaagaaagaaatgctctgacgacgcttcgccccaaatgaagactgtctatgagtgtttcttttttctttcttcttcattataacattcataacaaacctttctacatatgatctgtaaaaaattgatttaacagtgtactgatctgctccggtgattgaaggaccttgagctgtttcatctcatgttcatcagaaatcagcgaaacaagtgtgctcagcacttcaacctgctggcttggctccttgacccccaaaacaaaagcaaattttgcgttgacctgaatctcaggctcccccatgtgtgaaaacaaaaccggttctttaaatctgacaaaggagatggacgcctcatttacatgctccacatctgtgtgtggaatcgcgatctcaaatgcttcagtcttaagccccgttggatatacttcctcccgttttttcagtgcgtcagcaaagctttctttgactgtacctttttcacaaagtctgtttccgatcacttcaaaaaactggtctcggtctttaaatgtctcatccagccagatgaaatcttccctgaaaatctgctccatgcgttctcctcctttatctgccgtcaaggttcttttccacttcttcgtacagttttccggtccccatccacggatacagcagacacagtccctgaagtactgggagtgatgtgttcagatttcctgtagctgtggagatcaccatatcgcgtccctcttccaggccttttatgtcggtaacctcatatgtattgacaatcgtcacctcagcctttatgtctctctccttcaatccttcttttagaagacctgctgctttttcggccttttcctttttcatgcctcctgccagcagtaaagaagtctctctcataacatcacgctcctcttagaattcttccaggatggatttggtcttgctgataccgatccggtcagatcccgcctcgatcatcgcgatacaatctgccaaattgttgatccctcctgcggcttttacatgaaccttctcagacacggtctctctcataagcttaatatcttccgctgtggctccagacggtgcaaatcctgtagatgttttcacataagcggctccggcttcttctgacagctcacagccttttttgatttcttcttttgtgagaaatgcggtttccaggatcactttgacgatacccggggtagcgtttaccactgcctcaatatcttttttcacatcctcgtactcgccgttcctcagagctccgatgtcaatgaccatatccagttccactgctcctctagcataagcgtccacagcttccgctacttttgaaaaagtggtatgtgctccggatgggaatccgatgactgttccgatcttgacatctgtaccctccagcacttctctcgccatgtccagattgcatgggttgatgcacacagacgcacaatgattgtcttttgcaaacaaaagcccttccatgatctcttctcttgtcagctgcggctttaacagagagtggtctactttgctcaataattcttgttttgtcatttccataatctttttctccttttattataaaatgtgtgtgtttagccaaatagtgagaatatcttgacgaacagccacgatatcaagtttgcccggtccagatttccgatctgggaagctcctgccggcattttgattcctgcggtcagtgccatctgggtttcaataggtgcaaggttggtagccatgagcagcacacaggccataaccacagttcccacgatcagcgcccggataacatttcccttggacatggctgtgatcaggcacacgatgaacgggatgaccgccagatccgcaaatggcagcagcttattgccaggcaggatgatcgccaaaaatatggtgatcggcactaacaaaagtcccacagcgataacagacggctctcccagtgacactgcggcatccagtccgatgaagatctccctgtccccaaaatgctttgccataaactccctggccgcttctgaaatggggatcagcccttccatcaggattgcaaccattttcggcatcagatacatgaccgccgccatcgtgattgcaagctgtaagatcgcatcaattttctgtccccctaggaggccaagcgcaagaccgatgatcagtcccatggacattggctctccaaagataccaaaacgtttccggatggtctccgggttggcattcagcttattcaggcccggaatcttatcgatcagccagtttagaggcaccaccagcggcagaaatcccagtgctgtcaaatgcggaaaagagatgcccggcattccgaaaaacttctccacatacggctgggtgtaatctgccagtatcaatgcaagaatggaaagtgcgctggctgctacaattcccatgggaaggcttccactcaccgtcgtcactgcatacccgacaaatgcaaactgccaatagttccaaatatccacgttcatcgtctttgtaagtttcagggtcagcatggcaaagttgatgacaagtccaattggtatcatcaatcctgcagccgcccaggcccaggaaatagatgacatggcgggccatccgatatcaatgacctgtaaatccagccccagccgttgggtcatagcctgggccaccggtcccagctggtctgtcagaagtgtgatgaccagattgatcccggtaaatccgattccgatcgttactccggatttaaatgattttgagaatcctgccctcatgatcagcccgaatacgaagataatgatgggcagcatgaccgtggaacctaatcctaatataaaattcaatatttccatacaattcctcccgttgtacctttcaatcgtttatggtaccttgtggcccttgactgcggtccagaccatgaaccactgttctggcgtaagcttgtatttcaacgctttaaccggtctttcggccaagccgatctcccctgatcctgtgatcgggattggcttcgccggatgcgagaacagccatgcaaaagcaacttcgtctatatcctctgcaccgatctcctcccggatgatttccagcaccttacgaagccttacctcttcctctccttctcctgtaaagattcttcctcccgcaagcggtgaccagagcatcggatggatcctctcctccatgcacaggttcatcactccattttccatgttttccattcggagtggggaaagttcgatctgatttgtgattaaaggcactgtgagataagatttcaacaggcggaactcgtcaggcagaaagttggaaaccccaaaggttctcacttttccctcttttaacaatatttcaaatgctctgctaatctcctccggatccataaacgggctcggccggtgcagaagcaatgtatccaggtgatcggtccccatatatttcagtgacttctcaacctgtccgataatgtactcagtgccatagttataatacttgacacgtgcagtctctgatttatagacaatgccacattttgatatgatctgcatcttctctctcagatccggtctctttttgatggcctccccgaacttttcttccactgtgtagtctccgtaaatatccgcgtgatccatagttgtgatccccagatccagacattcctccatataacggatcagctcatccgtggaaaggttccagtccaggagcctccagaagccaagaacgactctggaaaactcaagaccttccgccatagttacatattccataccatacctccatacatttgccttattctttgagcttcttcaagacatccaagatctgctcatccactgcttccggtttgattcctgtcagataattgattgcaaacactgacggtgtggttaccgtatccggaactcttgtgctggcaacgatcaagtcatattcaggagccattttttcaacctccacgatctttacctgctgtactttaacagcgaatccattgtcctcgcacaagttcttgacccggttggcaatcactgtgctggtggcaataccgcttccgcaggcgatcaaaatatgatattccttcatccttctacctcctttctcttttcttctttatttttaaaactggataccagtcctaaaaatcatttactcaggtactgtgcagtattctggtctgtgatcagaatatcaatgtaccctgcctccaaagctgactttacagaggcatatttttcttcactctcgacgacacagatcttatttggtatctgtttcagctgtttctcagtaataccgatacagcgttctgtgatattctcacagcagatttcactgtccttgtccaagaatacaacagagaccacatcacagatcgcgtcttcttttcccagctgcttaaggtcctgttcagatatgtagccggatttgctgatactgctgtccttggccaatggattaccgagactgaacactgcatattctgcctgggatgtcttttcaatcaccttctttacctgctcgtcgttgattaaaaactctttttcttctttgctgttcacaagagcgggagcgatcagtgacaatgatctgcctccggcttttttcgccaaagtcgatgcaatggttgtcgcgtgcatatccagttcgctctgtccgtgtcctccgatgataggggaaaacaatagatccggatgattcattttctggacataatccgggatcagcctcatggtggagccccatcccacagcgactgtcaccccgccttccagatgtctctccagatagtaagctgccgcggacgctacctgttcttttgaagaattcccgatggatgtgtctatgaccaccacatcctttaattcatactttttcttgacatcctgttcaagctccggatagacgccggagtaatctatgataatccttacaacctcttcctctttggctttctgaagaatcctggagaccttcattctggacaaccctgtctgctttgcgatctgctgctgggtcatgttttcctcataatataacttgctaatcagtgtcatggttcttctctgcatatccatgtcatcactcccttttgttcatttgaacatatactgttactttgttcatccttatgatataacagttttgtacaaaagtcaatacaatttgtacttccataatttaactgtccgatcacaaggtattttaaatataaaaagagacatgagcccctgtatatttcacagaatctcatgtcttttttattcatatgtgtattttgtaaagctgaattatatctccaaaaaaaatctgcgaatctgctctgccgcctgaacagcattggacgcaatggcgggatggccccctttgttaaacaaaatgatccgggattgtttgatctgctctgccatctgctcatattcctcttcaaggtcttccctcaccatctcatcttctctgcttcccatgaacattatgggaaccgccaaagagcttaatggcttgtgaaacaaaggccggttttcaccggcgcaccaaagcagacattccgtatccagatcaacgaccatttcccagtcctctccctgacaccattcatagaactgtgctgcctcctcattctgcttcgcctccgcgcgttcctttctgagattttcagcaaaacccaagtgaagtgtccttccgtcaaagctgtccgcaataacctttccgatcagctccggacaatccagggctgcattgactgcagcccacgctccgccgctggttccaaccaaatgaaccttttcatagttcagatgtctcagcaacgcaatgatctgctttccctcctggatccatacatctgctgggaaccggccaatccgttctgaccttccgtttccgagaaaatccatccggattactttgaaatgttccgtataaagcggaagcagcggctcaaacatcttggacgaagccgtatttccgtgcagaagtaaaaccggtattccttttcccgtctctgtataataaattttctttgaatgataattaaaatatgacatctctgccctcctgatctgctgatttttcaccgttccagtcagacatccagggccttaaaacaagataaaattcatataagtaaaagccctgctgtcagtgctttttcatccagattcccatacacctacctccttcctgccttagatgcccgcaaaataccggatcaaattataaatgatcaaagccagggatactgcggcgatgcataactgagactttctccttctgtcttttaaataaccgtaggccgcacagccaaatgcagttgtccaaaacattgcgaagatatcccctgtgggtattccgtgagcgatattccagatcacgatcaacaggcctactgccagcgtgaacagaatactaaaagactcgccttctatcctggtctgccgttctttttcttcctgctgttccttttctatctggtcaaatatcttttttgcattcatgacgtcaatctccttctgaaatgatcttaaaccagaaatggagaaatgacaagcagactttaagtttgcttgccactctttgtattattttgttttcagaagattttgatattccgggtgcttttgaaaccagctgactgcataagaacaagttggaattacttttatccccttttcgccgagctgttctgccgccgcttccacaagctttccggcaactccctgtcctctgagagaattgtccacaaatgtatggtcaatcaaagctgtatcttttgaaacttcaggaaatgtaatttctgctatcgtctttcccttttcatcttcagcgaagatccgatgttcttcatattgaaattccacaatagtcgtctccttttgaatttattcataacctatagaatagacaccatttgtattctttccgatcttggatattttaatgtagtaggtacctgccccgtttttcaggcggtatttcttttccttttgacctgacagcttataggtcttaagcggctttttgctgccttttttgtagatcgtaatctttactttgccggaattcataaatacagctgtctcgatataacgtttcttcttcgcagtctttctgttcacgcgataccaccgggaagctttttctgtatccgtatatagatcgatcatctgggaatccagcgtgatcttcttcgctttggactttctcgtcctgtactttttcggaatcggcgttggagaataaccgaccatatacggttgacctgactttatttttacagcaactctatagctgcccttagaaagtccataaatggattgaaccaagactttttcattggaaactgcagctgttttaacctttgaaagtttcttccatccggattttgtcttcttttgtatattatacgataatccctgaccactcagaggaagagaaggctgtattaccatagccctttttttcactgtaaattcatgatagaaatagcttccactacccgtctgtaaatataaatcatctgacttcatggttttgacatgatccattgtcaagatcgcttccacagtaaaactcttacatttattaggaagtctcagtgagtatacggttccggctggaacggactttatcaaagcgccttccttctggtattcccttacctcttttccggaggcatcatacaaggttccaaatacttcgccatcgtcatcagattctcctgcgatcattaagactcctgcctgttctgcatatattttaactgtctttccctgccatgatgaattatatgcatatccatccttatccgggatctcggataaactgcggtatctcttaacatggatctccggctggtttttccctgagaccttctttcccgctttgagaatcttttctccgtttactttcagcagatctgttaaatctgtcctatcctttgctgaaaccggaatcccaaaactgcctgccgctatcacagcagagagcagaattcctatcagctgtttccatcttttcttcataaccattcctcctgttgacttgtctatttgattattatatcaaaatcaaaggagatttttgtaacaaaactatgttagatatattacaaatcagtctggctcgcttcctccgaatgtgagcatgtagacccctttctttagtttgatccctacccatgtactgtgctctccaacatgaatcgtctggtaccattttggctgtccttgttctttcaggttttcccgctgaaaatctgccattccccagccagcgccgaccaggatcattccaacaatcaaaaaggccgctcccaacaacatacactttttcttaaaactgctgatactcatgctttctcacctcttttcctgataataataccagccagccatcggctgaacctggcagtgactcccacaaaaatctttcctaaaatccaggtcagcagaccaaacaaaacaaagattcccgcggataccattccgactccaagctgtatgactcctgccgctgggttctggaatactataatggctgcgcctcccatactgactaccgaaagcaccagacctgacacggagaaggcccctgtgcacaccggaatacaccagataacaatatataccgatactaccatcaaagccgctgccaataaaaggcatacccctgccagcatcagagatccccaaagtggaaacccaaggaccagcagaacagcgatcaaccctttcattccgccggacaattgtctcccctccttgccttcctgttcctctaagatctcctgtgcgatcactcccggattgccgacttgttccactgcgtcttcctctgaatagccgtcctccatataatcatcgatgatctcgctgtaataagaaagagatttttccctctcacttttgctaagactttttaaaagccgctctaggctctgtaaaaactctcctttactcattctccaccgctcctttcacaaacttatatatacctgtaatctgctcccactcatctaaaaattctcttgtatggtctcttcccttttctgtgatcctataatactttctcagcctgctgttatgctccaccgtgtaagtatccagatattcgttgttttccagccgtttcaggataggatatagtgtagattctgagatcttaatacatcccgatacatctttaatgatctggtatccataagaatcgtccttacagagtgctgctaaaatacaaaactctaaaaagcctttttttaactgtgcattcaatctatcgcctccttatgcattatactatatattacatagtataatgtgtcaagaggtaattaagttattattgaacaaagcggacaagtcagcgtcaactccctaaatccctcaatcatgagggacttgctccgctttgcgcgccaaatgcaatttgacgtagtcaaatgatttccttacgcattctgtgtgcatcctcgcagagcgttttttatgtcataggagattccgtaggaatttcctatgacataaaaaggccatggttcttttacgaaccatggcctaacctaaaatatatctttattaaaaatcttaatccattaactcatatacagcatttccatatacatctacataggagatataagttcttcctctaaaatcaaagttaaagaaaaagatggaatcatcatccgcataaaacgatccaaaagcaagctcaacaaatggcagcaatacagtctctccaggatctaccctgtagtattccagaaaagacacaccatcttcatcaggatcacataaataaacatactgatccaaactgctgtatctaggatttgttacatatcctaattcatttacaaagattcctgtcctggaccggttgttaatattgattcctactacccgtgtatttgccccatcgtctgtatgtacaaattgtacagcaaactttggagattcctgcttcactgtaactttgcatttaaatttcttagaagaaatctttgctgttatagatacagttcctgtcttcttgccatagatatatcctttgccgtttacagttacaatgcttttgttgcttgaactccatttgactttctgtgtatttccagacactttgagctgataataggtatcctcactgattgatatagaacttttatttaatttgggagtctcaacctttactttgcatttatatttctttctgccgatttttgctgtgatcgtagcagttccttttttcttggcagttatttttccctttttcgaaacagaagcaacagactttttactgctggaccatttgggccttttctttgtaccttttacctttaatgttttgctctgccccttaatcaatgttatctttttacttgagattttaatctttgcagcatatacctgctctgttcctgcagtgattgatgtaataccaaaagacaacaccagcaaaaatgctgtggccaatttgaatattcttcgtttatttcctttcatgttctacctcttttctttcgtattgtcctaaaaattttgttattatacctaaaatcccccttcctatctacaattataaatacttataaaattgttacaagtcttgactttacatacaaacacaacttttctttatatataagaaaaaaccatttaatcctgcacccagcagtcttaaatggctttttattttgattctaacttatattcttataggctgtttctgaacgcttccagttcttctgccgtagccatagccgccaatgctccctctttcgtggtcgtgtaggctgcatatgcatttgcaaaatccaagtaactccttaatgtatcaaaatccacagcttccaagtccgtgacatcatctctcagaagctggtataaaaatgctccgataaaagaatcaccagccccggtagtatctctcacttcaatcgtatatcccggtgcttctgtcattccatttttagtataaatctctgcgccgtcttttccttttgtataaataacatacttggttcttccgttcagcaggtcagagaccgcttcttttatgtccgtatgtcctgtgatgaactctagctcttcatctgaaatcttaatgatatctgcaaacggcagaaattcattgaccgtctcctttaattcctgcaagtcatcccacagggaaaaccggaggttcggatcaaatgagacgagcacatcttttccgttggccatatcaatcaattttttatgtgcctctttcattggggattttactaggtcaacactgcagaaatggatcattccgcagtcatccagaacatcctgttcaatatcgtacacactataacgcagatccgcgctgttcttacggtaaaacttaaaatccctgtttccgtctgatgcaagagaaacaaaagccagtgctgtctccgcttctttatctcttttaatctggctggtgtcaatccctgcctgatcaagcacctcaacaatgtaatcgccgaacgggtcatctcccagcttggtcaaaaacttggatggaatcccaagtttggtcaccgctcccacgacattggcaggagcccctccagccactctggtaaatgacggcacatcctttaatctctgtcctttgacttcgggtataaagtcaatcagtgcttccccgattccgcataattttctgctcattctttttctcctatctctaaaggccgcaggcagtagatcttcatggttcctgcacagtcaccatctatgctcagctcgccctggctgctgtatactctggtggtgaaaacttcctcaccgccgtttacaaaaatctctagagaagtcgtatccgcaaaaatccttaagtctctcagttccccgatcctaacgcttctggttgtccttccggctccgcagtcacccagatcaagtgtcagcagtccgtctctgtaggataaggtaacacccttctttaatgtcagaaccgcatcggtgcattcagtaaaatggaattcagcctcatagagcttcagattactttccatcctgcctttatcagagaatgaacaaaccaattcgccctttctcagcttctcaatctcacggattggctgctgaatgagccttccattcttcatatgcagttctcttggaatcgtcagtgcatgctgccatccccgctccgtggtagggttggtatactgggcatccggaattcccatccatccgatcaggatccttctgccctgttcgtcctcaaacgtctgcggcgcatagaaatcaaatcccctgtccaactgctggaattcatcattcccgctgatctcatatgacttgttttcaaaatcatatttgatccttatggctgtacactgatggacattctgatagttgatcccttccgcctctaccccctgagggcaggtaaccagcatcatctgtccgtccagttcaaacaggtcaggacattcccacatgtaaccaaatggctccttcggaacgatcctgtcaaagtactcccaatgggttaggtccttggagtggaacataagaatcagcccctggctgtttttatccctggctccctgaaccatataataatcgtcacccttctgaatgatcttgggatcacgcacgtggcagctcatatcttggggatagtcatcggttgtcatcaaaagttcctttttagaaaactgatacccgtccttgctggttacatgaatagtgttgctgcctcttcctgaattgatgtaatcataatcatccctgtcaaaatactttagattcccggtgtagaagtaatgaatggtgtccccttttacaaaggcggaaccggagtagacgccgtgggcgtcaaactccgaatccgggaacaggaccggtccttcatctacaaaggaaacaaaatctttcgtcgtataatgtccccaaagctttagttctccagtaggttcaaacggggtgtactgataatagatatggtaagtcccgcaaaactggcacagtccgttgggatcgttgagccatcccgttttcggcatcagatgaaacttaagcctcatcggatcttttgctactgcttctctgtcgttttcatgttcagcataccacttttcatagtcttctttcaatactttattatacttcttaaacatgatttccctcttatctaacaatcattacctgtgtgtttgtatctgcatctgtctttgagatgacttccacctggccgtcgccctccgctaacatcatcatagtctgggtactatagcctttttctttcaccaggtccatatcaaatgtaaggatcttgtctccctgttttagctttgttccggcttccacgaaggtctcgaagccttccccttccattttcaccgtatcaatacccgcatggatcagaaagctgtttccagtctcggcctgtatggcaactgcgtgctttgtcggaaatatcatcgtaactgtgccgtcacatggagcatatacggtcccctcagaaggattcacggcgattccgtctcccatggctttggaagcaaaggccggatcctctgactctgtgatcggaagcacctcccccttcatcggagaataaagcacggtttctttcacttctggctgttttgtctcaatagcttctggtttttgctcaacttgtggtgccggttttacagtatctggtgtacctccaagattgtatttcttccagaagaccacggtaagccctgctgatactgccatagagaggaccaatccgataccaaagtgaaggaagtgatccgggttcatggagataaatccaggaagccccgctgccccaagtgcctgtgccagtgtttttgttgccgccgcatatgcacttcccacagcagacccgatgatggccgcatagaaaggatattttaatttcagtgtcacaccgaacatggctggttctgtaattcccagcaatgctgagacgcctgatgcagaacagatagatttcattttctggtcttttgtgaggaacaaaactgccaaaactgccgctccctgtgccacgttgttcatacttgctgttgtaaagataaagcttccgccggtgactgccttagctgccagcagctgtgtttcaatggcgataaagctgtgatgaagaccagtcatagtgatcggcgcatagaccaatccgaaaagcccgccgccggctgccccaagtgtgttgtatacccatgtgataccgtctgccaataagtttcctgcttctcttaataccggtcctacgcagatgaaggtcaaaaatgccgtaacaatgatagataacaatggtgttgtaagattgtcaagccaggtaggcgtcactttatgaagtcttttttcaatctgtgccaggatccaggagactgctaatacagggagtaccgttccctggtagccgatggcctggatgtggaatccaaagatatcccataccggcgcctgtccaatcccgatctgataagcatttaaaaggtccggatgaaccatgatcatacccatggccgcacctaagaacggattgccgccaaacttcttagtggcactgaatccgatcagcaccggcaggaacgtaaacggtgcatttgcaaatgtattgactgcatctgtaagacccttccactgtggatataattcaatgattgatcttccgtcaaacaatcctgctgttaaaatgttgttaagccccatcaacagaccgcctgctacaatggccgggatgatcggaacgaaaatatcactcagcatctttacaaaacgctgtatcactgatccctgtttctcttctttttcctcctcgccggctgtggaaggtacatccccaatctgtttctgtacttcatcacagaccaaattcactagtccggaaccaaagatgatctggaactgggactgtgtcaaaaacactcccttaaccccctctaggtcactgatggcatcctcattcctcaaatcattattcttcagctgaaaacgaagcctggtcgcacagtgtgccacagatttaatattttctttaccgcccacattggcgatgacctggcttgcaatctttgcataatccatagttttccttatcctccttcttaaatttccggtatcggttccataattgaattataggacttttttctctgttcgtcaacacctttgcggtatcggttccacaaaaaattgcacaaaataaaaggcccctttttaggagccttacacaaaaacgggagttatcccttgttataatcctttaaatcctcaagttttacgctgttcccctgtatgaattcatattctacgatctgtttcttggaaaccggttccccttttaacatcttaagaatcgtctccgctcccaggtatcccataccataggaatcaaactttaaggtcgtgagctccggagtcagcagactgctctcatcatatccgccgaaccccacaaccgatacatcctccggtatccttaagcccttctcctgcagaactttgtaggctccgaatgccagacggtccgtggcacagataatggcatccaccttttcttcctcaaggatctcccttgtgcacttctgtcctccgataaagctgtaatcgcttttcgccagaaccggttccacaatcccgtaggcctttaaaccgtccagaactccatctttcctgtgcagtcctactgccacatcggtttcgtagacgccgatatatcccactttcttatggccggtctttccaatatattcaccgacatattttccagcgttatagtcatcgtcaataatagagatcccttcctcataatcctgggccagtaccaccacgggaatctgagtctcctcaaaaatcttcttatggtccttggtcatggcgattgaactgatcagtatcccgtccacattcaaatgaatcagcttctggatattctgaagctccaggtcgatatcatgatcagaattcttgatcaatgtggtgtatcctctctctctcagataacggtcaatgcttgtaatgacacggcttgtaacctttgaattcaaagtagggacaaccacgccgatcacactgctctctttggctttcagcctcgcaaatgtattcggtacataattgtactgctcgatcaccttttgaatcttatccctcgtagactttttgacatatcccccattaaaaaaacgggaaactgtactttttgttactcccgccatctcggccacatcagccattgttattttttttggcatcgtgtatcctgcctttcctcattcttgactttattgtaagacgatttgacaaattgtgcaactgtaaatacaaagagctctattttcacaaggactgctgttgacgaaatcataattatgtaatatattacatataggaggtgtaagtatctatgaaacttaaaaattatgatagcagacatctgttgtttggaactttatttgctgttaacaataaactgcagtccatcggtgaccgcttttatgaagaaattaccacaaaacaatggttccttctggctgccctttctacatttgaagaggcccccacttttaatgaactatcgtctctaatgggcagctcccatcaaaatgtaaaacagattgcccttaagctccagcagaaaggctatgtaaaaatagaatctgacgcttctgaccggagaaaaagccggatccaccttaccgaaaagttcaaagaactgcagctggcttatgcctctaaggaaactcaatttttggatcaattatttaaggatatatctgagtcccagcttcacactgcacttgaaactctgaataccatgataaacaatatggaggaatgtgacctatgaaaaaaactgccgtaatatactcttctgtctatggatcaacaaaagaatacgcccattggatcgctgaatctctttccgctgacttatatgaaaacaaaaacctggacgcatcagtccttaagccatatgatctactgatctacggaggcggtctctatgccggaggtgtcagcggtatctcactgatctccaagcatccggaattgatacgggacaaaaaagtctttgtcttcacatgcggcgttgccgatccaaaggatcccaaaaatgtagaacatattttatcctcattagattctgttttctcagcagaattaaagcagctgatctccttctaccatctgcggggcagaatgaattatgatcttctgaagccaaagcatcggctcatgatgtggatgatgaaaaaaatgctcttgaagaaaaagccggaagaacggacggaggaggacaacggaatcctcgatacttatggggctgtcgcagattttgtagaccgggacagtatttcccccatcatagaggaggcgaaattatgagttatttaccactatttccgtcgcgcttttgaaatgcgctcctccaatagtggtgaataactttcgaaaagtggctcctttttgacagaagcccttctccagcagacattacgtccattttctacatgattggagtgaggcattctaagagccgaacggaaatcatgtagaaaatgtcatacattaaatagcttcggttcaacaaaatccaagattctgccaaagaatttcgcaatgatcccaacggccagcgctgccacgattgtaccttccctgactccatgcagattgtggaatagaacaaatgacatcgccccggcaaaaacagtcatagccgcgtcaaagcagaccttggtcatcccaaagtctgtgttccatgtggacgagactgctctgacaaaggattctccgggcagcataaccacattggccagcacttctatatacacgccaaaaccaagcaccaggcatccggccagcaacgccgcaagttttactatataagcttctggctggaagttctggatcaacagcattgtaaagtcaatgaaatatccaaacaataccgataccggtatctgaagaaggtcctcttttttaaacctttttttcagtataatcatctgcagcatgatcaaaaacaggcttaatacaatggtaaactgccccaaagtaaatctgtatccaagactcatcacgtatggtatggatgagattggtgatgttcccagatctgcctttgtgatcaggctgactccaaaagaactgataaataatccgatcaaaaataaactgtacctcttacatttctccatataccaatgtcccccgttctctacttatctttttgcccacccatacgctgaagattttcatatattgtaaaaaaggattccataaaacggctgatctcttctctttccattccccggaacgcctccctctccagcgcctgaaacgcatcttctacctccttctgaagttttctccccttttccgtgagaaaaacatgcagtgatcttcggttgccattgagcatcctgcgctcaatcattcccttttcttccatcccttgaagtactttagctgcggacgtaggttctatctgacatgcttttgcaatgtccttttgtgtcataccgtcaaagtcttttagatagtccagtactttcggctgtcccaaggtaaggtctgagggcttgagatagtcaaacagctttttatgaaaaatggactggttgaccatcagcatataatgaaaagaatgttccatgatgaattcccttcttatcgtgagttttctcattattagtatccttgttattatagaacctgatatcacaggcgtcaaatgatttctttccacacttgtctgtattacgaacggaatagaaaaagagcttgtccaatctctctgtcataaaacttctgaacaagctcaaataatttattatgttatgattctgcttctgccgcagctttttgttctatcttctcttcttgtttctgatctctctgaagataaattccggccagtatcgttcctgagattgaatgccatacacaggaaacagcgctagccatagccgcctgaggtgctgccgcaaagtgagctgttgcaagattcgttgcaagacctgcattctgcatgccaacctcaatagagattgtacgtttctttgccgtgttcattccagtcaatttaccgactgcataaccaagtgcatatcctagaccgttgtgaagcagtactgccacaaagatcacagcgccagatttaaagaagtttgctccctgaagcgcgataacacctccgacaataagagcaaggccgatcaccgaaatcccaggcatcaccagctgcgcttctttaaatgctttcttttttccaaataaggtattcaggataaacccgagtaagaccggaagcagcacagattttacaatggacatgaacatcgaagctgcattgacctctattctcgcccccgctaaaaagagcaccatcataggtgtcataatcggtgataaaagtgtagatgccgtggtcataccaacggagaacggaacatccccatggcataaatatgacataatgttggatgaaacccctcccggacaacatcctacaaggatcagtccaatggcaatttcatttggtaaccgcaggattgttgagattccataagccaggaatggcatgatcaggtactgtgctgctgctcctataaaaatgtccaacgggcgttttgccaatactttgaagtcctctgttgtcagtgtcaaccccatcgtaaacatgataactcccagaacaagactctgattatttccctgaacccatgagaaaatatccgggacaaaaaatgctgcaatagctactaaaataacaaaaacagatgttttactggacagcactctgctgattttttgtaaggttttcatatgtatcctccatctttcataaatagttctcttggatattgtattctaatatacaaaccgtgtcaagaaatgggaattacatattctgttgaaaaagtagtaaaaaaagacaaaggctagtaagcatagttaattttcattatttattagtcttgatattttctggatttataatgatataccctgtaagaattcatttatgtaatagtatactggtagttaattaaattcctatttccagggtgaccaatttccataccaggatcttcgagttttaaaattatagcctgagtcagcctgaatttgcatacctacgtctccattagctgtaaatgcagaaatgagtacactgttaggctcacaattagtgcatccagtaaacgtcctatagacaaatacaccattgtttttcagtgtatttgcatctcctgcaaagacaccgccatcatttattgaatctatctttttatttatatttcctaaatccacatttaaatggtcaactctgtcgttcacattgctgattgcttttgtatgaatctcatacgattctatatttaccaaccccgctgattctagtttcacttcaaatggtacagtattcgatgtattgaaatagaaatcccacgtaatagaaaaaccaggactttccgcttccgaagggatgtttttagattgtgatgcctgtgcaatacaaaacaggatctccccttcctttggatctgctgcataaaatcctacctgccataattcataactttctttcattcccctattttccagcaaaactggaagaattgcagtgtctccttctgttctggctggctgaagtgtaatatcatatcctccctcagtgacacttgtctgctgcctcagatcaactactggtactttttttgaacctgtagccacccttctgatctttaatgactcaccctctaaaagcttagcctgtaatgcctttccttgatctgtcaatactgtgttttcccaaatattcatatcccttaccccctggtttttcacctttataaagccaatgataatatacgtcaaacttcagctcctctttcttagatcatgatctctataaaaaatataacatgatgaccaggggcaatgtggacatgttctatgtagtacaaaaaagtgcatcggatcccaccaatgcactttctttgtactatattgaattaacatacccaaaagggcaccccgtatcttataaactaaaatacctatctaaatatccttcaaaagctttcccatgtctggcttcatccctcgccatttcgtggactgtatcatgaatggcatcaagcccttctgctttggcacatgcggcaagctccgtttttccttccgcagctccatactctgcatccacacgcattttcaagttcgtttctgtagaatcagaaacaacttctcctaaaagctcggcaaacttagctgcatgatctgcctcttccctggctgccttttcgtaatatcgtccgatctctggataaccttccctgtgggcatttctagccatagcgaaatacatccctgcttccctacattctccttcaaagtttgcgcgcagatcagctatgatatcgtcaggcgtacctttggcagccccgacctcatgttctgccgcccatgtcttttcattctcctgcaaaagaaacttatcagcccccacatgacagaccggacattccccaggagcttcctctccccggtgcacatatccgcatacactgcacacataagttttttcagccacggtttcttcggcagactccaggttttttgattctccaagttcctcactcctatcgtgatacatcgtatgaagcatctgctccgccagttcactgagcggctctccgtaaaattcttcatacaattttttgatctgtttgttctcatggctggcccttatcttcatgccgctgtctctattatataagctttcgattcttttttcctgtatgatttcacctttgaattctttatccttcggctgtcctccgccgccgatgcagcctcccggacaggtcatcacttcaataaaatgatactgtttatccgatgcctttaccttctcaatcatctttcttacattggctgtaccgtatacgactgccacattgacagtgagcccgtcaatatcaagacttgcctccttgacaccttccattccccggacagacttcagatcatagagcaattccggtgattttttctttgtgatgaacttatatgcagtcctcagtgcagcttccatgactccccctgagtttccgaaaatcacgcctgcaccggagccttctcccatgaatttatcaaaatctgaatcttcgaggctcagaaaatcaatagcttcttctttagcccacagggcagcctctcttgtagtgatcacatggtccatatccctcatgtcctgttttccaaggtatcctcctgcgtccttcatctcttccctgcggatctcaaatttctttgcagtacacggggtcagtgctacatttacgatcttctctggatcgatccccatcattttggcgaaatatgtcttgattgtaggaccctgcataccgatgggacttttggccgtagaaatatggtctataagctctggataatatatctcggcaaactttacccaggcaggacagcagctggtgaactgaggcagcggctttgttccctctgtaatcctttcaatcagttcgcttgcttcttccataatggtcaagtctgcactgaaattggtatccagcacatagtcagcccccagtgcgcgcagaagcgctaccattttcccctggacaaaagcaccatcctccatgccgaattcttcgcccagagctgcccggacagaaggcgatgtactgacgaccacgatcttctccggatccttgacagcctccttgatctcctggtattcataggtctctgtgatgctctccactggacagacgttggcacactgtccacagttgatacagactgcccggtccccggtctgggaaagtgaatacgttcccagcacagatatgtaatctttacaaatattcctgcattggccgcattgaatgcacttttcttcctgtctcataatagatggattgtcacagtcgattggtactcttacatctactggtaaatgtctgctcattggtttcccccttaaataatatataattagtaacgattactattattatatattatttcccagtgaactacaatgattatttacaatatcctgtctgaaaatctaccacatgacacagttcctctccattcagataccttctgacattttctactgcaatatccgcaataaagtccagggtctgcggcagatggaaatctcctgagacatggggtgtaatcaccgcatttttaatattccacaggcggtgttcctgaggaagcggctcaggatcggtcacctcaagtcccgctgcataaatatcccctgcgatcagagcattgcacaaatcctccgtatttacggcatttccccgtccagcgttcataaatatagctgactttttcatcttcttaaactgctgccttccaaaaacattccttgtcgccggtgtgtttggaagaattgacaggaccacatccgccttgggcagcaagtcatccagttcctccatcgtatgcagctcatcgaccccttctgggcactcccctattctccgtttgatcccgatgatatgggaatcaaatgctttcatcattctggcaaaggacagtccaatatttccaactcccgcgatcagcaccttatttccggtcagtgaaagaacctggccttcatcggaccagtcacatcggttttggttatcccggtacacatgcagttttttctgtatggacaaaagcatggcgaacatatgctcacccacagcttttccgtatgccccggtggcactggtcaggatagtctttctgtttaaaatattcactcccatgtaagcgtctgtcccggaggaattcagctgcagaagctccaggcgtccagacatgccgatcatccatgcgggaacatttccaatgatgatattggcctcctggaccatttctctgttcacatcctcataggaggaataggtaatgtcacagtcctttgcaatcccttccagtttttctttatatgtatcactcattggaacaacggtcaaaatcttttttctcattttttcgattctcctctatcctgtttgatttttttatgttttattatatcataagacatggaggaaaaaatatgaaccaagaaaagaaagttttaattatcggctcttctgtggcggatgtgatcatagatgtggaaagactgcccaggtccggcgaagatgtgcatattatagatcagcggctgtgtatcggaggctgtgcctttaacgtatccgatatcatccggcatttccagataccgcatttgttgttctccccggccggcaccgggatttacggcgattttatcagggaggaatggaagaagcgtgggatcacaccggcccttccggtcccagattccccaaacggctgttgttactgttttgtagattcctcaggagaacggtccttcgcctcctttcacggagctgaatatctgtttcaaaaagaatggtttgatctgatcgatgtctcacagtttgacacggtctatgtgtgcggcctggagattgaagaaaagactggggaacatatcgttgaatttttagaacagaatcccggtattcagatctattacgctccgggtccacggattgaaaaacagccaaaggagctgatggaccgcatttttgctctgcatcctgtcgtacatctaagtgaaacagaggcgcaaacactcacaggcgcagcagacacagaccatgccgcccgggcaatctttgcaaaaaccaaacaggatgtggtcattacgctaggagaaaagggtgcctactgcctggagcatgaaaacggccgctttctgccgtcccgaaatgcaaaacaagtggacgccaccggagccggtgacgcccacataggagctgttatcgcacttagaaaacttgcctgctctcttccagaagcggtccaaacagccaatcttatctctgctgcagtggtggaaaagaagggggcatccttagaccatgaacgatttcttcaatgttttaataaatgacagtgccgaggctttcaaacgcctcctttaattcattgggaagggattcatccaggataaatccgtcaaaggcttcaatctttgcataagtacaaatggtccgttttcctattttggacgtatcgcagaccagataactgtggtcggacgccgccatcatttcctttttaatctctgcctggtctatgttgggagtggtcgcacccttggacaaagaaaccccatccgatgacataaatgctttctcaaccgatatgttttcgagaaacttcatccccatgctgcccacagtgctctcaaaggccgtccgcacatgcccgccgatcaggatcaagtaaactccctctatcttctggagttccattgcaacaggcaggtcattggtcacaaccgtcaatttctttgcatcctttaacagcttcgcaagctctaacatggtggtcccgctgtcaagcaggatcgtatctccgtcggatatcattgttctggctttctgggccgccttttgtttttccctgagatatttttgctttcttgtggcaatggattcttccacatttaaaatatcttcatttaacagagccccgccgtgggttctcgtaagcctcccggccttttccagttccatcaggtacgtgcggaccgtagttccgcttacttcaaagaggctggacaactcggcactgctcaccctcttattttcctttaaaagtctcataatctcttcttttcgttcctctgcaaacatacggtcctcctgtcagtctctccctttataatgtcacaatctttttctctacaatggattcgttacctgcttttacgatcctcacggccatttttccgtccaggccgctgcattccacctctgtatcatctaaaatagaacggataaagctcctgtcttccgctaagtaggcatctttaaataagaacttccaactccgggtcgtcgggcgtttcagctcatggtttggcgtacaagtgagaatcttcttttcgtggatatctccaagacagatgactccctttgttccaaggatctccactcgggcatcatagccatactggacatattgagccccttccacacaggcatggatcccgttttcaaactcaccggtcatgatcacgttgtcataaaagtcagggtactgctccttgatctccttatttctgaaattcccgccgatggcatagacacttttcagttcactctccgcaaaccagcggaccgtgtcaatgtcgtggctgctgacctctgctaaaggaccgttgctctttttgatatcatacatccattctttgggcttgctgggtcctctggaatgggacttgaccagaacgatatctccgatctctccttctgcgatcatagccttcgcctcctggaagctctcgtcgaaacgcctcataaatccgatctgaagcttgacctgatgttcctcggctgctttgatcatctcatcgcactcttcctcgttcattgccatcggtttttcacagaaaatatgctttttggcagcagctgctgcaacggcaatctctttatggtactttgtgggagtcacaatatagacagcattgatctcttcatttttcaggacttctctgtaatctgtataatacagttcaatccccagttcttttgccgcactttttgcggtctcctccataggatcacagactgcgatgatccttgcgtttggaacacttcccgtataattgtgtgcgtggaccatgccggcccttcctgatccgatcagacaaaccttgacttctttcattgtgctacctcccttgactctgcatttctttgacgatttcaacacctgcgctggttccaagcctttctgctccggcctccaccatagcaagtgcagtttctaagtcccggatgcctccggcagcttttaccttcactgcatctcctaccacagacttcataagccttacatcctccaccgttgccccgccggtaccaaagcctgtggatgtcttgataaaatcaggctttacttcttttgcgatctccgccacttttttcttttcctcatcggttagataacaattctcaaagatcactttgctggtgacacccgccctccggcacacctctgtgatctgctccatctcttcttttatgtactcataattcctgttttttacttccgccacgttgatcacatagtcaatctcatctgctccttttgaaatggcatcctctgtctcaaagactttgcactccagtgttgtctgccctaaaggaaaaccgatcgccgctcccacatgcaccgggcttccctgaagcaattctttacaccgttttatctgagccgggttgatggctaccatcttaaactgatactgttttgcctctccgcaaagcttttcaaacatcccattgtctgcaaacgcctttaaattcgtgtgatccaccatatttgccaactgttctgctgtgatcttcatctctgagccctccatttcgttcacctgcgtttatttttgtttccttgtgtttatagctatatattaccacaggtaacatgatagtgcaatacataaccgaacaaaagtaaacaaaagtttttataagtacgatagtttttctccattgtctccagtcgactctggaaaggactccttccgacaatggagaaaaactatcatagatggtgcctttagtattgcagcaacatggtccagcagacattacgttcattttctacatgattggagtgaggcattctaagagccgaacggaaatcatgtggaaaatgtcatacttatggattaaataatatcatgtgtaacttggccgtttcttttccaatatttttgtacgaatgaatggcatcggccttaaaacgtatactctcgccttttttaactataaatctctgaccgtcagcatagatctcaatttcccctgtaaagattgtaataaattctgtggtcccctttaagtggggttgagattcccaataactgctctcatctaattccagataatataccgcaaatctgcggttttcattatccggaaaaattgaatagtttttaacttttccattatcttcgagtattggctgaatctctgatgtttttacaatctcatatggactttttggacggacagtcaaagcgtcaaacggcactttcattccatttgaaattttccataaagtagatatggttgggttgccatcacctcgttcaatttgtgcaagcatacttttgctgacagtgctcaactttgcgagctcctccatacttaatttgttttcttcccgcatcctttttatattcttagcaacgatcatattcattgaatccaaaataaatctctccttcccattgacattataacgcacaaaatatattattatatcatacaagtacaatataatattcgttttgtattattatacgattttgatcttgttttgtaaagccaagaggaaccaggtcagaacaatgaggccactacattttcatcactttagcagaaagaggttatatatgttccatttatttgattttttaatttattgttttatcactgcctatacaccgggagcaaacaatctgctttccatgagtaatgcaatccggctgggattccgccggagcattcattttaatctcggcatactagccggatttgcagttgttatgtctgtttgtacggcctttagtgcaaccctttactcagttctccctaaagtaaaaatcgtcatgcagatattgggggcagcttacatgctgtaccttgcatggaaagtttggaatagttcttctgaattaagtgcggatggtagaaaagaggctagttttctttcaggtatgatattacaatttgtcaatcctaaaatttacatctatgcgattactgcaatgtcgctctatatcttacctgtttatcattctaccacagccttaataggcttcactgcaatattgtctataatcggtgcttctggttcttttgtatgggcattgttcggagcggcattttgtaaatttttctccaaacacatgaagcttgttaacatcattatggcccttttgcttgtatactgcgctgcagccttatttctttaaaagccagaaagaaaaaagaagagttctataaaatttctttcatagactcttcttttcggaacaaagttttttaggtttctatctttttttcattcccatataaatcttttccgctgtgatcggaagttctctcactcttactcctgaggcgttatacactgcctctgcgatggccggatttggagtattaatcacgatctccccaatagatttggctccaaaaggtcctgacggctcataactgctctggaattctacccggatatttccggtgtccagtcttgtaggaattttatactgcataaaagaattggccgatgtctttccttttttattgtaaagaatttcttcatataatgccattccgattccctgcgccaggccgccctctgtctgaacccttgcaaggcttggattaatcaccgttccgcagtccactacagctgcgaaatcaataagttctacggctcctgtctccatgtccacttctacttccgctgcacctgccataaacggcgggggtgatgtaggtgaagagtgggactcgctggcctgcagtgcctcctcattgccgcacatgacctggtttccaatatcttttaaagatatttcctttccactttccaggtggaaaacccttttcccgtcaaaatctacctcttccaacggacattccagatactgggcaccttttttcagaatcttttctcttaagactccgcatgtcttaaccacagccattcccgtaacataggtcgtgctggacgcataggatccactgtcatacggagagacatcagtatccaccccatggacaatgatctgttccatatcacagtccagacagtcagcggccatctgggccaggatcgtatcgcacccggttcccatatcagatgcgccgatgatcaaactgtaaaatccgtcatcgtttacctttattgaaactgctgccgtatccacattggaaatcccagacccctgcatggcaagcgccagtccgacacccctgactttcccgtttcccatgtcttttctcggatatttctcatcccatgagatcatttccttcacacgctttacacattggtccagtgtgcagcttgtggcggtctcaccataataggcaggcatgatctggccttctctcaccatgttcagttccctcagcttaaccggatccattcccatcttatgggccagttcattgactgcggactccacggcaaaaatcccctgagtagccccatatccccgataagccccggctgacatcacattggtgtatacaacgtcatatgcaaaacggaatgcctcggcctttccgtacagcgggatcgacttatggccggaaagccccacagtcgtgggcccgtgctccccgtatgccccggtattggacagtgtatagacatcgatccccttgatgatcccatcttcgtctgcgccgatccgcactttcatctccatctcatgccggggactggatgcgataaaggactcttctcttgtatagacaatcttggcaggcttgcctgtttttaaggttacaagtgccggatatacttcggtcaccacagtctgctttgccccaaagcctcccccgatccttggctttaccacacggatcctggactttgggatatccagggcatgggccaggatccttctcacatgaaaggtaacctgggtggaggaaaccacattcagtcttccgtaagtgtccatatgggtaaccgtgcagaagttttccatcattgcctgctggttggctttcgtatgataggtttcttccacataatacttacatccattcagcacctggtcaatatcaccctctaccgtttcatggctggcacagaggttccttttgttatccgctccgacctcgcataaagccttccagttctcttccggatgcaccaggatcttttgatccttggcctttctgaaatccaggaccggctcaagtatctcatactctgtttttacaagcttcatagccttttccactgctttttcggatacacctgcgatgacagccaccgcatcccccacaaaacgcacccggtcatctaagatcctgcggtcataaggactcggctccggatatgtttgtcctgccatagtaaaccttttgtccgggcagtcctcatgggtcaggatacattcgattcccggcactttcatggctctttcggtgtcaatcttcttaatgaccgcgtgggcatgcggacttcttaaaacctttacgatcaagcagtctttcggcgccaggtcatctgtatagaccggctttccggtcaccaatgccatagaatctacttttgggacagaggtattgactgatctcataatgactgtcctcctttttctttcatatagttctgaatggcgcgcatctgcccctcataaccggaacaacggcacagattgcctgccaggtattctttgatctcatccatgcttggatcttcaagctctctggtcattgcgatcacgttcataatgaatcccggagaacaatatccgcactgttccgcgccttcctttgctagaaaacttccgaagtccgctgcttcttcctgaatcccttccaatgttgtgatctcttttccctctgctctggctgccggcatggcacaggacagagacggctttccgtctaccaagacagtacacagcccgcagttagtagtatcacagcctctctttacgctgtagcatcccaattctctcaataaatccagcagcatgcagtccggctcaatgacagcagtctgctgttttccatttaactgaaatttaactttcatcccttatgcttcctccaaaatcatctttgctgcacgcttcacgagcacctctgccaccgcctgtcggtactcgctgctgcccctcatattgcttccgaacttcatttctgaaactgcctgccccgctaaagcttctgccgatacaggctccccgctgatgacagccagttcagccctgaccggtctggctccgatggaaatataccacgtgtcttcttttttggaaacagcgcaggccaccattggaaaatcagttttggttgccctctgggataaataaacaatctttctttgatcctttttaatgatgatcttttccaggatatcacggtcccttttcctgcttataaactcagcaagtgttatttttcctgcatggaccaggactacttccgtatccagggccagcagacaggtcagcacgtcagaaaatccaaaccggccgtatatactgcctccaactgtagcctgattcctgaactgtacacctacgatatggcgcagactctccctgactgctccgtcaaaacaggcttccagtccctgatgcgtctccaggcctctcaaagaacacattgccccgatctcaaatgcttcttctgtttcttttatatagtctaaatcaagtccggacaagtcaatggcattttgtatgcgcggtgaacagagcctaagccacatcatccccccaagaacccggtttgccttcttctggttaagctcataggcttcctcaagactttccggcctcagataatttgctattgttaccaattcaatctcctccatcgtcatttgataaaatcattctctgtccgacacttttcaccgtttccggacagaaaacactaatttatactgtaacatagaaataagaaagagtgaaagagtttttttgagaaaatcgcagaatggcaccttctgtttagccgtcatccatgtccagcaaacactacgtccatgttctacataattagagcgaatcattctaagagccgaacggaaatcatggggaaaatgttacctttgtgtgcattttgcttagagggaggtttgaatcaccttggtaatgtaaaaaacaaaaaatccggcaatgccggatttataaataatagtttccctaaatctacagaaggtcaaacctaagtctgccatggatactatagggtaatgaataagaaaagtctgtcatccagcgaagtatgaccgtaagttgatattcgtgagttcctgggacttagctataatacaactcttgttaatgataatcgtaagttctaacaatcagtgcaatcgaacttcatcatttcaatacaactcttgttaatgtttatcgcttgtacccgattagaaagtagctttaattcgttgatttcaatacaactcttgttaatgtttatctttgtagcagcacccatttcttttgctttcgctgatttcaatacaactcttgttaatgtttatctcttctgccggccgtcatcttttgtttccagatgacatttcaatacaactcttgttaatgtttatcgagttgcgaaacgggccggtttggcggtaatattgcatttcaatacaactcttgttaatgtttatcatcacttctgctacaacagacgcaaatggaaacgatttcaatacaactcttgttaatgtttatcagtaaaggatgctgtatccttaatttccgctggaaatttcaatacaacttttgttaatgtttatccaacgcttttaagccattcttcttttttattatagtcagttttcctgataaaatcaatgtttgctctcttttttcccaaccgatttcattttttttaattttaatgccaaaaacccattcattggcttagtttggggattccccgggtcttttcaaattttcaggttgggaaatcaccattgtggatcatattcacttttaaaatataagatcactcaataatctcctcacctaattctgtcgtcccaggaaagcttccaaccaaaaggcgccacctccaactatttttctccatgatcggaaggacacctttccagatttaactggagataatggataaaaatcctcgtgaatactaacagtatttctcctctttttttgtgatactatacaaacttaatcaagtttatctcaaagctatttacttccacaaatcataggtatatactggaagcaacatatactttacttaatcaatcaagtttatattttcaacgtttctatcatagtattttaagtaccttatcgtatgaaacacacctgcccaaaaggcatgagaccagggtgtgtcccagagggtaccgaatcaaaggaggcttaatatgttatttcaaacaaccgaagctcatgaagccctgcgcgcgaaagtcagggaatttgcagaaaccgaagtgaaacctctcaccttcctcttagacaaggaaaatgaattcccaacagaggctattgagaagtttgcgaagatgggaatgatggggctgccatatccaaaagaatacggcggggccggggctgatgtgctcagttatgccattgccgtagaagaactctccagagtggacggcggaacaggtgtcattttatccgcccatgtttcccttggaagctatccgatctttgcttttggaacagaagaacaaaaacaaaaatatctggtaccgcttgcgtcaggagaaaaactaggcgcattcggccttacagaacctaatgccggaagtgatgccggaggaactgagaccacagcagttctggagggggaccactacatactaaacggcggcaagatcttcatcaccaatgccgacaaagccgacacctatgtagtctttgcggtcactaccccggatatcggaacccacggcatcagcgcctttatcgttgaaaagggctgggaaggctttacgttcggggatcactacgacaagatgggcatccgttcctcttccaccgctgagctgatctttaacgatgtaaaagtaccaaaagagaatcttctgggcaaagaaggggaaggctttaagatcgccatggccacactggacggaggccgtatcggtatcgctgcccaggcgcttggcattgcccagggagcctatgaaaacgcactggaatactccaaagaaagagagcagtttgggcgtcccatctgccaacagcaggcaatcgcctttaaacttgctgacatggctaccaaattaagaactgcccgcctgctcgtatacagcgctgcagacttaaaagagaatcatgagccatatggtctggaatctgccatggcaaaacagtacacctcagacatttgcctggaagtcgtaaatgatgctctccagatctttggaggcactggctatctgaaaggaatggatgtggaacgagcgtacagggatgcaaaaatctgtacgatctatgagggcaccaatgagatccagagagttgtcatcgcttcccacatcatcggaaagatgccgaagacacagaccacacggaagaaagatcctttgacaggcgcccgcaagaaaatgatcttaaaagacggttccgcccaggaacgggttgagactgtggtagaagccttaaaaaaagatggatatgactttacagttggaattgacttagataccccaatctccaaggcggaccgcgtggtcagtgctggaaagggcatcggacccaaagaaaatatgaaactcatcgaagatctggctgtgcaggccggggctgctattggttcttcccgtccggtggcggagaccttaaagtatgtgccgatcaaccgctacgttggaatgtcaggtcagaaatttaacggaaacctgtacatcgcctgcggtatttctggagccggccagcatttgaaaggtattaaagatgctactacgattgtggccatcaataccaacgccaatgctccgatctttaaaaatgcagattacggcatcgtgggagatgtggaagaaatccttccgctgctgacacaggccctggataacggggaaccgaaacagccggctcctcctatgaagaagatgaaacgcgctaagcctaaaaagaccgtacctacctggaaacgatatgtctgtaatggatgcggatatgaatatgatccggccaatggagatccggagggtgagatcgagccgggcactctgtttgaaaagctgccggaagagtggatctgtccggactgcggtgaatcaaaagacatgtttattgaagtataaatatcccaaggttggattacagatcaaaaggaggtatgatccatgcattgtgttagaaaagtaaccgaagatttatattgggttggcggcaatgaccaccgcctggccctgtttgaaaatatccatcccattcccagaggagtttcttacaactcctacctgctgctggatgaaaagaccgttttgtttgataccgtagactggtccattggccgtcagttcctggaaaacatagaatatgttcttggcggaaggcctctcgactacatggtcatcaatcatatggagccggaccacggcgcttccattgaggaagtgctgctgcgccacccggaggtgcagatcatcagtacagaaaaagcatttatgcttatgcgccagtttggatttgacgtggatggccacatgatcgaggtaacggaaggcgatgtgcagtccttcggaaaacacgaagtgaccttcgtatccgccccgatggtccattggccggaagctatggtaagttttgatatcacggatggcatcctgttcgccgccgatgctttcggatccttcggcgccctggacggaaaactgtttaacgatgaagtaaattttgaccgggactggattgatgatgccagaagatactatacaaatatcgtaggaaagtatggccctcatgtgcagtctctgctgaagaaggccggaaccatcgatattaaaatgatctgcccgttacacggaccggtgtggcggagtgacctgggatatttcctggaaaagtatgataaatggagccgctatgagccggaggaacagggtgtgatgatcgtctatgcttccatgtacggcaacacggaggccgccgcccagaatctggcggccaggctttgtgaaaagggcatgaccaatgttgtgatgtatgacgtttccaacacccatgtatcccagctaatctctgagaccttccggttaagccatattgttttggcttcagtcacctacaacctgggcatctatcctctgatgcataattatctgatggatatgaaggcgttaaaccttcagaagcggacctttgccgtcattgaaaacggctcctgggcctgcaagtccggttcccttatgagagaatttatcgatgacatgagagagatggatgtgctggatgagcaggtaacccttatgtcctccatgacagaagataatggagatgatatggatacgctggcagacggcctgatagaatctatgaaacagtaaaaacccatttaaaaaaatccaggcctgcagaattttctgcagacttggattttttctctgaaagaatttgcccggttccattgacaggtattttttagtttggtatattttcactaagataaggagggagaaccgtatgctgatttcaagagaaaccgattatgccctgcggattttaagggctttaagtgacggagaaaaacgttccatagaagagatatgcagtctggaagccacaccgaagcagtttgcataccgcattattaaaaagttagagaaagccggatggatcatcattatgagaggggcagaggggggctgccggctgacagccgacctgcacgatgtaagcctctatgacctgatccacggcctcggaagtgacttctgcatcaatgcctgctttcaagaaggttatgaatgcaccagggcttctgtctgtgaagacccatgccacataaaaaaaggcctcatcagggtacaggaatccctggaaaaggaattaaaagatgtcaatctgcacagtctcatcttcggaacccaggactaaatcagtgacagtgttttttactaatatccacatcttcttttggtattagtaaaaagctctcctgttccagtgctttgccttttctggccaacaggtctctgagtacagtcaattcaggtatttcacccatatccatacatttcagtttttttaatatccctggctccatgcaaactgcatatgtttcatatttccggtaggtttctgtgtccatctgacatggttttacctcgggaaatattttctgtttgatatacgaataaatccggatgcctccgtaatccagatcgccggaatgaaaatattgagtcccttttggcagcatatcccgcagattgatcagaaattccctctccttcggagtaaagaacccatgactatatatgatcaacatctcttcatcatacggcatggccatataatttgccttattctctatggtcaggactcttttgatgttttctcccttttccggcattgcgtgagtcagcgtcagcgaattcagaaccgcaccaaaccggaattccccgagatttatcttcttcccgtccactctgatccacagaggcccctttaatgccagttcctgagaatattcctcgatcaaaagctgggacaagatctgggtatcattcattccctcttctatccccgggtgaaattttctggcaatggagagcacagtgctctggaactcattttcaaaaaccttagagtctcccagacagtatttactgaacactcttttatataatggctcctttaaccggtccatctctttaagacattgaaacaacagatccctttttgaaaattcggagggaacatttcctttttccagacgtgtcagacaatggttcaggtattcttttatccacactccttcaacggataaggaaaactcatccacagcccgtctttgttcttctatgacttgtgacttaggaggaattcccaactgttcatacatacgtggaagatcccggagagcatagcaaatcttacggatatcattccccacgctctcccattgaatggtgatcaatccctgtttctcaagctcctttgcctgtgttataaactctgtctttcccacctggtcatacagttcctgatggaccaggaaggagcggtttccctgcgctccttccttccagtccaaagatgaccgttctgttttttctatgataatgttaagcagttccctcttcattctccgcttcctccaaaagactgtcaaactcccgtttttcaaattcctggattgatatgctctttttgtttggattggcgtagacaaaggtcttgtctacattctccagatagttctggatcttgtcattggtggcgcttatgatggcctggaatccaagtccccgtatcagctctatacagcttgccaccttctctgcatccatctttgagaatgcctcatccaggaccacaagccgtatggtagggcttcttctgatcttaggagacagattgatccggtaggcctgggcaaagcttgccagcagtgcaacatagagaggattctgcccctcaccccctgagtttttcttgatcattctgctgagtccaatggtgagtttttcttctccctctacaatctgttccatatcaaatgaaaggtaagtcctgtaatctgcatatttttccatgttccgtttggcctcatcaagctcctccggtgatgcattctccggcggtataaagatatcgatcaggtcgctcatgacctccccgtaccggctctcatgttccatggaaaacagattcatctgatggtccatagatgcgtccagcgtagaaggatcaatcttcagggattcatccataaacatcggataataaattccatccggtcccttgttttttgtgatacggaactgatatttatcctttccaaagtccagtctgcttataatgcggttcagctcgtcccttctctgataagcctccagtatagcgtatctgatcttggagataaaatcatccttgaaatgttccgccgctgatctggcctgctccctggctctttcctgatagtcggaaaggtggtcacattccaatgtggacagaagtttctcatacggctcattgtactcgatcgccggtgaaaatgtccggttgggatattctcttaaataagcggaccgcagttctaccagttctctgtacacttcctcttttttctcttctgcctgtctgatctttcggatggtcccatttttcagattctcgtagttagaagcgctccggtctttcatgtagtcctcaaatgcctgttccagttcttcattgaattggaagctccgctcccgttccgtaagctcactatttgtggaaaggtgaagcctctgccagtcttcaatctgtctttcccggttccagacagcctttgtcacttcgctcagcaattcctgtttctttgcctgaagttctttattttcccgctgccgttcctccaatgcgtcgatggattcctctttcatcttcagcattttggtttccagatgctttttctgctctgttttttccttcatcacagccaaagctttctgctgctctatgtactcttcctcagaacgccccagagtttccagtcccagtatctcttctgacttcgacaccatatccgcaaacggctgtttcctggcctccagctgttttaactcctgattaagatccttgatcctttgcttcatactgctctcaccgatataggaccgcttggtatagtctgctggattcagcctttttaactggaaattcttatagagcaggcagtccggtgtcacccctgtcctctgctgcctgagttcatcgatggtatgacacttgataaccctgcccagaagcaggtccacaaaagcacggacataaggctcctttgcgataacttcctcagccagcgcctggactgcaacaacaggtttctctttttgaacccgttctgtatctaacacagaggcccggaaaaacttatttccgtccatctccctgtaaacttccatggctgcttttgcataggccggctccacaaccatagacagcttattagagcccagatatccttccaccgctttatgccatgtctctgatttcatatccaaaaggtccgcaaggatatgaacctttacagccttgccaaacctggtgcttaaacgagtctggaactcatacctggcatcttccagctctctcggataagccttgtttccttttttcagctcggcaagttctgttgtgatctccttttcccgctttttgatcctcctcagttctgaggaagcctcctgccggtcattctccacttcttcccggatcgtctttaagctgtgacggagtctccgaagctccccaagacttatatttcccttacaaaagctttcgatatcccagatcgtctggtttggtgtcacatccaggtccttccactgctccagctgggcgcatgtctgctgccatgccgccttattccttgtgagctgttccagcagttcgtttacacctgtaagctctgttttgagattctcaaaaccactgttcgcgatctgttttaccagatcgtcatattctgcggcaaggacggacagctcgtcagacagctttttcctgctctcctcctgctgctgtttatctccctctgccttctccatcttttccctcagatccttaatctgctcttttaattggagcatcatgagtttttcaagacggtactggcagatctccacgtctttccccgcttcagtaaaatggccatagccgtccctgatctctttcaggcttgtgatctcctttaaagtgtcctcgatctttttccgcattcttccgtactggaggacactttcctgcatatcctcgatctgaatatcctgttccatgcagatgtattcccgcacaaaatcttccagcttgatgttcattttaaacggtatggcccgcaagccttggaaatttatctgcatctaaacctcccagataaatatcgtagagttgtctcctgaaccgttcgttgcttgtaccgaaatagaactcctctctggcaaagttggtctggatatattctctcacttcactggtggccatggctcggccctctttccggtagtggtgttcagggatccctcccttatgccagaaaaacagcctggagatttcattggtggctgtctccacgtcaaaaacaacaccgacacattccttttcccgggtgaccgtctgttcaagctccagtacaatggttgtagaaaaatttttgtttcttatatatttgacctcattgttgtcacctacagagatcatgcctctcaggtattcgatcagactcctgtctgagtcatcagccgccgccttgttgaaaaatccccttccgtctgtattggcatagaggacgatctgcaaggcatcaatgactgtggattttccgctcccggaatgtcccgtaaagaaattgatgccttcgctgaaggaaagcacctttttctcaatataatgccagttattcagacagatcttcgatagtgctttgaatgcctgcttgttctccttcgtcttctccacgttcgtcctcctctgtaaatgtctcaatcagcttctgcacgtcatcccccagcaagaccgcattaatacatgggtatacgaccatccggctttcctcgttgaggtcttccagcacatccataggttctatgatctgataccgtttcagcagggaaatggtctttctcatctctgtcgcggatgaaaggtttttcagcagatgaaaatccccgatcttttcgttgatctcccccagagatgtgtacacgtagctgctcgtggatgccgcctccatctgctcatcataaataagcttaaggatcagcagataaatggtggccagcttcggaagcttttcccccagcactgtctccccctgtatatagaaaatccccatatgactgctctcgtgcaactctaaccctgctatggcaaaatattctcttagaaattccaggtgctgattcaatatcctgaaatccttctgaaacgtaaatctgccgctcctcttttcgtattttcgttccagcacgaaggtctgacggaacaagagctggatgatgcgcttgatatcgtctttttcctcatcgcttaaccgttcgtaatattcgatcatgcctttctcctcacaaataacagatccggataacggtatttcccattttccagcatcgtttcttctctctccactacctgatagcggctgttctttctggtacagtagtcgtaggccaggatcagcttttcaaaagcctcattatcgctgatctccacatccttcatttccatatatccatccttcatatggctctccaggaattcttcaatctcctttttactgtatctggtatggatcttattcagctttaatacttcttctctggtaagctccggcatgtcctcatccggttccagcctgctgataaaatcttttctttttttccttctgtacagagacttttctgagaggacttcaagccgggaaagattcattttttccgccacctttgtaagcctctcttcttttgccctgtctgtttccaaatgctttaacaggctcacgaccaatcctttcatatccgcctcgccgctgagcatgtagttcagtctcgtcaccgtagcccgcacatacttggaatgttctttgtccatattggcgatcctgtgctctatatcgtcaaaaccgcgctctatggcatccagggtttccagcacatcttccttttcatcccggccctctgccctggctttggcacggaccttttcgatccaaactacgtcctccctcatctgctgcagacatctcttgatatccattttatacagatagaaattgtcattggttttcagcatatgatactttttcttgacaatctcctccacatatccttccaaatgttctgacaggacatccccgtaaaactgctgttttaacaggcgtccaaaaaacttatccatgttatggagcagatcctgaagtgctttgttgagtttttttgtattaatcagggcggttttcagcatgcccaggttgatccttttatcattctgaaaagaaaatagggtagcatacacgttctggatataaatctcggtgtcctccatctgtggattcaccagctgttcaaaagcctccagaaaaacagccgcatagtccgggatcacgatgttggatgtgagtgtggcaaaatcgtccagcttcttcagccatccggtctttatgagccagtttaaaatccggttgggcggagtctccaacacatccagctctgactcaaattcttctcgttgaagccagatacgcttgtccgcgttccagtcactcaggacctggatacagacttccctgctcaaaaagtagttgttgtattcatattcttcgctgatcttcaacagcgcctctatgtaaagatcccggttcacagagcggaataagctccaaaaagaatccggaatatcgtatccaaatctcataaatcctcctttgtgttatacctttttatcataacataaaacctatgaattttcaccaatgctcccggcctggttcaaaagcaatcctccaaattggtgaaaacttttgtaagttagttccttgagatataaggatgaagaaatcaggaaactataacatgaatatagcagtttagtacaacacaaaatcagggacagaaatgtccctgtccctacatataataattatttaatttaaataaagttggatagtctctattgtccgttttgatatattaaaattaattaggataacgaatttttacaactcttgttattgttaatcatatcaagatctgtttgatttgtattatcgtcaacaatttcaatacaattcttgttaatgttaatcaatttagtacaggatagtgagcaagttgttgttttatttcaatacaactcttgttactgtttatcggcctgaatccagactggattgataaacctatcacatttcaatacaactcttgttactgttaatcccaggcttgccacagatagcacaccccttatgctatttcaatacaactcttgttactgttaatcactgtatgacagttttgagaaagattacattacactatttcaatacaactcttgttactgttaatcatcagtatatttttatatgtcagacgatcatccgttatttcaatacaactcttgttactgtttatccaacgtctttccgtcattccttctttttattatagtcagttttcttgataaaatcaacgtttccatcgttttttcccaacctccttaaacttttaaacttttgagcttttcgtctattattgccttcaacccgccattttaagcgccttccagccatttgcacgaaggatccggttgggaaaactctcgatccatttcctatctcagtgttctataaaaactaaatataggtctcatcattctcttttttgctctgtaagagaaacagtaaaacttgatgtgccggtcaaaccatttctgtataactgtaatggtttttcccgcaaacagcgcgcataaaactgtgcctgccccgataccttccagtctgttcagaataaacaaggatatgatcagtgttgttgtaaggcaggtgagatcaaatgttgttttgattctattgtatggttttttcagcagcttggtcagatctctcgggaatgtatcggtagggatgatcggcatcagactgttatttgcagtacagattccaatgcacatcacaaaaaatccggtgataaaatacagacttctcataaacctggaatccggaagcataacgagccatccgctgtgtaagtcaatcattctgccgaaggcgatccccacggcaaaggaaaaaccatattcccattggatttttctgctcaggatcatcagtgagagaaccagaagtgtctgaaacagataattccaggttccaaaagaaagtaccggaaaggcaatgctgaacacataaggcacagaggatatagatgcaatccccatatcactttttgtcatcagagcaactgccagactattaaatataattgtaaaaagtaatcccagctcaccgggaattcttagtttttgattcattttacttctccttctttcctatatgctgtattatagaagcatcaattcattaaatctataacatgatctgaatgaattaattcataatcagaattgatttcatttatcattcttgatactgcttgatacagtcaggaaaggagttttccatgaatcttgaatatttaaggtacttcttagtccttgtgagggagcaacattacggcagggccgcagagcagctgtccatctcccagcctggactgagccacgccatctcttctctggaatccgaactgggagttcctctttttgaaaagagaggaagaaacataacggtaagccggtatggaaaaatctttgaacaggatgcaaagagaattcttgatactgcacagcagagcctgcacaacttccacatgatccagaaaggcggaggtctgctgagactttccagcgcagactctatggctgtctccattgtcccaaaatatatgtctgaatttaaacagcagctgtccgggatgtctggtgatttccagttgaccacaggactgtcccaggaaattattgaagatctcaaaaaagaaaactgtgatatcggattctgtgccaaagtaaagccagagtcttccctggagttttaccctatccagacccagcagatggtcgtcatagtccctgacggccatcctctggaaaataaagataaggtcacgctcaaagaaaccctgccgtatccccagatcatctttgcaaaagaatgcggaatccgtacggatgtgtcaaagctttttgaatccattggctgtcagcctcacattgcctatgagatcgcagaagaccgggtcatggtagaattagctgcctacggcttcggcatagccgttatgccagagcttccgtccatacacagacaaggaatcaaggcaattccattgacggaaccttcctgggaaaataccttttatatcgttagaaagaaaaaggattattacccgcctctggaacaaaaattctggaattttgtcatatcaaaataaagggcctgaattagacttacagattccctagtgtccgcaatgccctccgcagtttttacagtcgtttccgcattgaattgactttccttttttcttatcccgcaccatgcttctgacaaccaggcctacgatgccaagaacaaccaaacctacgattaaagttcccatgttgaacctcctttaaagtctgggcctgcacattcgatgcaggcccatgtctaccggttttattttgccccggtcactccatttatgtctacgtttaacgtcttgctttctttatacggcctcactaagagatagataaatccgatgaccagtacaaaggctaccactgtaccgattccaaaggctcctgtggtgatcagtgttccgatctggtatacacaaagtgaaactacatatgcgagagctgtctgatatccaatggcaaaccagaaccattttgcattgttcatctctctcttgatcgctcccatagccgcaaaacaaggtgcgcacagcaggttgaatacaaggaaagaatatgctgccgcagtggtcatacttcctgcgagagttccccagatttcggcaccgtcttctgccacttccgcaaagccaaacaggataccaaaggtacctactacattttcttttgccaccaatcctgtgatcgcagctaccgctgacttccagttaccccagccaagcggcgcaaagatccaggaaactccgtttccgatagcagcgagaatactgtggtcaagttccatatctgtgagcattctgaactgtccgtcaatccatccaaagtaggttgtaaaccatacaaagatggtggagagaaggataatcgttcccgcttttttaatgaaggaccatccacgctcccacatgcttctcaatacattagacacagtcggcatgtggtatgccggaagttccattacgaacggagcaggttctcctgcaaacatttttgttttctttaagatgattccagaacagataatcgctgcgatacctacgaagtaagcactcggggccacccaccatgcaccgttaaacagtgcacctgcgatcaatgcaatgattggaagtttcgcaccacacggaacaaatgttgttgtcatgatcgtcatcttacggtcacggtcattttcaatggtacgggacgccatgatacccggcacaccgcatccgcttccgatcagcatcgggataaaggattttccggaaagaccgaacttacggaaaatacggtccatgataaacgctaccctggccatgtatccgcaggactcaaggaacgcaaggaaaagaaacagtactaacatctgaggaacaaatcccaagactgcacctacaccggcaacaataccgtcaagaaccaatccctgaagccatccggcgcatccgacagcattcagtccggcttcgatcacggaagggattcctggcacgctgagtccgaaaagtttccatccgtcaccaaacactccgtcatttgcccagtctgtagcccatgttccgatggtcgtaacagaaacgtagtatacaacaaacatgacaaccgcaaagatcggcagtgcaagaaaccggtttgtaacaaaacggtcaatcttgtcagatgtggtcatactgtcttttctgtttcttgtgaagcatttctcgataatagaagaaatgtatgtataacgctcattggtgatgatactttctgtatcgtcatccatgatatcttcaattttcctgatctcggcactcacatccggaaccaccttcatctgttcctggatcttgtcgtccttttccagcatcttaatggcaaagaaacgtttctgctctgccggaatctcgctgcccagcttcagttccaccgcatccagcacttcttccactctggagtcaaatgtatgtaccggaggagccgcctttttgttattggcaagtgctaccgctttttctgccgcctttttgattccggtaccctttagcgcagagatctctacaacttcacatccaagcttttcactgagctgcttgatatggatctggtccccacttttctggaggacgtctatcatattgaccgccatgatcactgggattccaagttccatgagctgagttgataagtaaagattccgctcgatgttggttccgtccacgatgtttaaaatggcattcggacgttcctcgatcaaataatttctggcaaccacttcttctaaagtgtacggagaaagggaatagatacccggaaggtccatgatcgtgacatccttgtatcctttcagcttaccttccttcttttctactgtaacaccaggccagttacccacaaactggtttgatcccgtcaaagcgttaaacagcgttgtttttccgctgttcggattaccagctaacgcaattctaattgacattttgcatttacctcatttcttttcatatatgcttgtttgcttaaacttatatatattagttttaactaaccaataagtaaaatagagtaacttttactcaactacgatcattcccgcatccgcttttctcacagataattcatatccgcgcactgtgatctctataggatcacccagcggtgcaaccttcctcacaaaaacatctacgccttttgtaattcccatgtccatgatacggcgcttaactggaccttctccattcagctttttcactttcacagtatttccgcatgcaacttcttttaacgtcttcatcgtctctcctttttagttcaccataatcttattcgccatgtcttttccgatcgccactctggaatctttcacattcacaataacgtttccgccaatgatagatacgacagtgacgatcccgcccactacaaatccgagattctccagaaatcttctggtttcttccttgccgccgactttacagatgacatttgcttccccttcactcatcatagttaaaggcatcatttctccttctttctttattggtattgattatcatttccgttccattcactaattagtatattctaacatcagttagtagtcaatatttccaattgatactttttatcattaactctcaatttgatgttgttttgaaaatatgttatactttttcatgcttaaataaaatataaaaattagaaatgaggtaaattcatgcatgcaaatgaatctgctgaaaattatttagaaactatattagtcctgagtcaatcacgtcctgtagtccgttccgtggatatcgcgacagagcttggattcaagaagtccagtgtcagcgtagcgatgaaaaagctgcgccagaatgaacatatcacggtttccccagaaggatatatctatcttacggagtccggcaaagagatcgcggagatgatctatgagcgccacaaacttctctcatcctggctcataacacttggcgtggataaagatattgcgtcagcagatgcctgtaggatcgaacatgttatcagcaaagaaagctttgaagctataaaaaaacacgtaaaataaaggaggtgccttgccggcgcctcctttttatctgacttaacgctttgtcctctcttttgttccgtacattttggcatctgcttcccggaacagcttatatacgaaagctgacttgtcactgcttcccaacgcataccctccggccacatgaagcccttctgcattcccttcacttgatctctgggtactttcttccagatcggcaaatgccttcaggatccgctcttccgttatcccttccataatgacaacaaactcgtctcctccgatgcggtaacattctcccaattctgagaaagctttttttataaaacaggcggaatctttgatgaggcggtcccctgccgtatgtccgtaagtatcattggtgtgcttcagattgttaatgtcaaacaccgccacagcaaacactcccagtccgccctttagctgcagggcttccgcatcccggtcaaatgccgcacggttgccaagtcctgtcatagtgtccttatacgccaatattctgtaggcctccgcctccgtactagtcttgagcagtcccacgccccttttcaggctgccatagcagagaaaaacataaaacacgatcagcccgcagcggaagaacagtgaattatccccgctgtcctgaggacggaatgccagcaaagagaccatgcctcccacagccaacgcggtaatacccgccagaacaaaaaaggtgtctctgttgcggtagcgaatctgctccctcagacacaaaaaaatactcaacaccgtagccgccgccatcaggatatgagtgactggcaggattttgaccaggtcaacgatgccagccatatagaacaccgcacaaaaaatcgcctggagaataaacaaaaggctcaagaagtccagcagttcccttccatggcggcagatctgacggagaaaaaacagaaatggcaccggcagcaaagtaaacaataaaaacgatagaatatacaccggggcaaactgttctgtcaaaaactgagggatctttgaatctgtcaggatccatagggtagaaatcagaataaagataccgagaaacaaaaaatccagtttgttaaagtccagcttcttccaacgcaataaaaaaaacacaagaaggaaaaacagaccaagcaccgtagatagcaccgaaaacaaaacgatatccagacagtcatccctgatcatctgcgtcactgtgttatgatttcccagaatgacttggggaagcttccattttcccggggtatacggagcggtaatcttaacagccaatgtttttccatgcagaacctccggcagatctgtcacattccatacatttcccagcatccaccctatcggccctttattttttttcccgtaagagtataccttttgttttccaacaaatatttcaaccatctggtggtgattttccatacagagcacagcatcctccggaactgttcctgtcatatcccggtatatggtcaggcttttcctgccgtcgtcttctatgtatgcgggaagtcctggtatctgtattttcttcccagcttctatataataccagccttttgacagggtttcgatctctccctcctgattgattctgatattatcagtcacaaaagcctttttactgtaaaagaaagctcctataactatgacgagagacaaacaaaaaagaaggacaagataacggctccttatttgttctttcattcttacatccccccgtcacactttttgtttatcttaacatatggagggcaaaaaggccagcttgcgccggccctggtatcactttatacattcagtacaaatttctggctttctgactgaagtcttgtcatgcgcctgtaaattcccccctctctttttatcagttctttcggcgttccctgttccgccacatctccttcctttaaaacaatgatcttatcagctcccgcaaccgttctcatcctgtgcgctattaaaagcacagtcttcccttttaccagagtagagatcgctttttggactttagattcattctccacatccagagatgcagtagcttcatccagtaaaactacaggagcgtctttcagcagtgccctggcgatagaaatacgctgcctttctccgcctgagagggatgccccgttttctccgatgactgtttggtatccgtccggcagctttttaataaaatcttcgcactgggcagccctggccgctgccatcacttcttcatcagtggctttttttcttccaatcctgatgttctccatcactgtattgttaaacagcacaacatcctggaatacaattgaataattctttaatagttcttccggatcgatcttgctgatatccactccgcccagagtgatctttcccctggttatatcataaaatcttgccgccagcttagccgcagtgctttttccacctccggaagggcctacaagagccgtcacttctccctgctttgcagtgaaactcacatcattaagcactgcctcttcaccgctgtaggagaaccccacattttcaaagcagatgtcatagccttccggttccatgtaggtttctccctcctgtacaggctcttcccgtaccttcttcatccgttccaccacaaggagcgtactgtatacggctgagagattggtaagcgcactgtttaacggatcatacactcttgtggcggcgatcagaaacatcagcagcaggaagaaatcaatctctccctgtatcaccaggccgataccgcacagaacagtggtggcgatccctattttcagcaccatctgtgatgctgtcacaaacaccccgttgatccattccatagcgatggtggatttctccacctctatgatcttctcatccaatccattcagatactctctgctctgattgttagccctcaagtcctggatgttttcaatgcactcctggatcccatcggaaactgccagtcttttctttttctgcctgcgttccctgcggttgatgaaaggcctggtgcccaaagtcagcagaaacgcaacaggaacaggccagaagagtgcagccgccatcttccagttgaccgacagcatacccccggctactaaaattgtagagatcacggctccaaacagttccggtataaaatgagaaaatgcctgttccatgaaagcactatccgccatgattgttgttgtcagatccgagagatcacgcttcccgaaaaatgaaagcggaagcttcctcagctgctctgccagtgagattctcatattggcgctttctgtgtaggaagctaaaaaagtcgcgttgtactgcaggtactccagaaaataaatcaataccaacatcagcagccccatgactatataaattccaagtccgtaggattttatttgaacaccaaaatacggtgcaaacagctggcttaaaaatagatatacaattccaacaggaaacataaggccgatattagtcaaagtgcagactccgaccgcttttgccaggtcttttccaccctgctctgtaagagcaaatttcttttgcagccattctctcatttcactgcctccttttctactttccattccgcagctgtctgatattccttccacattcctgcgtaaatgccgtcctgttccataaggctttgatgggttccctgttccagtgcctgcccttcttccaatacaatgatctggtctgctttcctgatcgtggaaagcctgtgggcgatcatcagcacggtcttgccctttgtgatctcctgaaacgctttctggatccggtattcattatccgggtccgcaaatgcagtagcctcatccagcagaatcacgggagcgtcttttaacgcggctcttgccagcgcaatcctctgtgcctcaccgccggacagatagactccctttgtcccgactactgtctcaagtccttgcggcattttgtcaatgatatcctgacactgggcaagctttatagcttcctctacctcctgtgcggacgcgtccggccttgccgccttgatattatttaacaaactgtctttaaacagatggctgtcctggaaaacaaatgccacctggcgcatcagctcttctgtcttcatgtttctgacgtctacacctccgatctggatgcttccctcatccacatcataaaatcttggaatcaggctcgcagcggtggtctttcccccgcctgattttcccaccagggctgtcacgcccccttccggaatgacaaacgataggtcttttaaggcttccttatttccatccttataagaaaatgtcacatgttcgaatatgatgcggtagctggcaggagactcgggcttttccggttcctccaggggttcttctcttaatatttcaagaattctcccaagggcatcctttgccatcatggtattttcactggtccacatgatcttgttcatcatactgacaccgataggcgtaaaaaacaggtaaaacgttaaatccagcaggcagtctgtgtatgtccttcccgctgccagattgccgagcagcagaaaccctgccgggatcagaaacagaaagaccgcattgatgctcactgtatagctgcacataggaatcctcatggaaagtgtgtagttcactgcccattttttatacctcatgatcgaatcatgaaagctcttaaaggaaaacacactctgctggaatgtcttgaccaccgggatcccccgcacatactccacagcctcgttattcatatcacccagagccgcctgatactgtgtcatacagtctttcattccaggccccatcatctttcccaaaaacagaactccgatgaccatggggatcaggctgatcaacccaaaccgccagtcgaaagtaaacagcagaacgaggacagccacgggagtcactagagctcctgaaagatccggaagctggtgggccagaaatgtctctgtctgtcctgctccgtcatcgatcacccttctgatctttccgcttcctttggtcttaaagtatcctatgggaagcctgcccaagtgatgcagggccgctgtcttcaaatttctggcggtcctgaaagccgagagatgtgtacacatcaacgccccaaagtaaatcagcatactgagcagtgaaaatgccacagccatccagccgtagtgcacaagcacggtgctgtccgccattttcggcagtgcatttaccatatcacgtatgaccatccatatataaaggaacggtaccagagaaaacaccgcactgatcccggacaggatacatcccatataggtgagaaagcgatggttcccggcaaaggtcatcagccccggttccttttcctccggcagtgaagtcataatgttcttgaattctttcatacttatcatcctcctatttagttagtccagtctaactcatggttatattttttggggcttttaaagccccagaaccgcactccatcccgcatactgaaaatcttcgagcactttcatatattccactgctttttccaagggtatgtcgtgggaaaccatctccggaacataccgtttggtaaatcggcccatttcttctattctgctcttttacaggttttttcatataatccttatgaattctgtcataccacccgtaaaatccttccgtgttatattttaaacccgcttgatcccttctgtcaatgagatacgatgacaatatttatcaataatggagaaaaagataagagtctctttttctccattataaaagcgcctgtatctttacaagcgctttcaaacttcatcaagctggttctccttcaaattactcggtcttaatctttatctcttttccagaaaaagcaatccccagtttaagaatattttcaataccatcttccctcatttcgaaatcatatctcttattatcaatctgaattaaagcttcttccgccaatgtttcaagttcatctgctgccaaccccttcttccactttagttccatgataattcctggatactttttctcccgtggtatcaggctgatatcatatcttccatctccagactctctgttagattttatcttatattgattatccatcaaagcaattaacccaagaactaatccatgataaaatccttctgctccggcatcgtaaaagctgatagttttatccatatactcggcgattgctgtttgcaatttcttaagatcatttacataaagactttctgctatcttgtttgcagtagtccttgtgattgctccaatctgcaacagatgagacagtatttcacttttatagactgccgcaatctctcggtttggaatagacacctcacataggtaggaaccatcggcctgcagttctttctttggtatcttcaaataacccgctactaataacagactataaatatttgcaggatcctcagaaagagatctataaaccacattctgatcaattcttgcaatgactctctctccctgcaaaagagcatatagcctttcagtaatatcatctgtagctaccttcaaaacatcctcaaggatttcattttttccggtattcacccaatatgcctggggaatacacccttttgaaatataattgataactgaccatggattatatatttcctcatttccaaagagataaccatcataccaatctttcaattccatttctttgtctaaaactctgtagtaatccagcatctcatgtacttctgaatcagtaaacccaaagaaattatcatattcttcatccattacagaattcaccgttaaattatttaatccactgaaaatactttcctgggcaattcgaaggattccggtaagaaacccataagaaagattcttgttatccttaaatgctcctgagaagaaatttctcataaagccaataatctcatcataaaaattcttcgaatatccctcctggataggagtatcatattcatcaataattataattggagccttgccataatgctcagtgagcatcttcgaaagtttttgcagtgatgaagagagttctacttcatttgcctgaccccctagaatttttttaaagtaatccaattcataggtttccagtttatcactttcgcataattccatatgtctgccaaactcttcttgcagtaattcactgatttttgcaaatgtcatatcccaagaatcaaacttcacatctttaaatgtcaaaaacacgactggatattttccttgatgtgacctgtatgcttcgccgcaattccagatagctttatccttaaaatatttactcgtatcgtcgtccgaaatttcaaagaaagctctaagcatatccatattcaaggtctttccaaatcgtcttggtctggtaaatagtgacaccaacggtttctgatccaagaattctttaatcagcaaagtcttatcaacatagtagtattcagactgcgcacgtacataatctgaaatgccaataggaagtggttttttttctttggctacagcttgcttaatgtatttcccagatgaaactcgaccatcaacaggctttttggcatcatcaggaatcttccatattcttccatcctttatggcgccaggtatctttcccgatttacagaatgttgttactgtacgttctgtaacgttccacacttctgccatttctttgcaagttttcatcaatcttcaactccaatcataaataaagattattctttccgttaattataagtcatattcggatagatatcaatcatatttaactttcttccgatatatgttgaagtgtttttcctaccttctaccacgaaacaggcttcatgggaatcctaatgaaaaaaagagactcttatcatttttagataaaaatctctttctcattttatttctctaaaagaccgagaatctcttccacacttttctttccgaaatacacgtccttttcatctacgatcatacacggcacactcatgatctggtatttgtctttcagctcaggataatgggccatatcatagatatcagcctctatccggggattctccagagcaattctctgcacagccatgaccagttccggacacatggtacaggataaggatactactgtctggatcttaatgttcctgtcgatctttttgatcctgccaagcaggtcccggtcaattgcctgtccaggaccggcggcattatagatcgctatgataaaggaattaaattcatgccctccgggaactccgtggaatgaggtgccaagataattcccgtcaccgtcacagatctggatcgccgggtattccataccttccggatcgtcctgttccaactcacagcggatatgaggggacagtccctccatctctgaggcaaaaccttgcacttccctggagatcgcactgtcatccgtatagaacttcaggatcacattcttttccatcttttcaaagaccggtttcagctgccgcttcatctcttctgtcaggaaaccgctctgatccttggtctcatctgcaggcacatccacaggtttctccctttttggtgccgggatctctcgctccggaagcctcagcgcttcatacatgccggaaagatatttttccagtgaggttgcggccactgccccgtcagatactgctgtgacaacctgtctcagattttttacacagatgtcaccagcaccgtaaaaaccgtctgcgcttgtcttctggttgatgtccgtcaccaggtatccgtcttcgctcagctcaaggaaatctttaaaaagtgctgtggccggtgcgtatcccgcaaacacgaaaataccaaaactttttccttccggaggttcatacttccaggtctcgccggtttcattgtttttaaagactgcatattggagtgtgctctcccctccggcctccacaatttctgtctggtaatgcacttcaatcccgggatggtttcgtacctggtccgcaatggaggcagcacaggtaaaatcctcctccctgacgatgactgtaacttttctggcatacttcgtaaggaacatggattcctccgcagctgcgaagcctccacccagaacaaacacgtcaaggcccgtaaaaaattcaccgtcgcaggtggcacagtaagccactccccgtccctgaaattttgtctctccctcaaaaccgatctttctaggacttgcaccagtggccagcacgatccccagggtctcgaaggtgcctttttctgtgaccacttctttgatgtccccgtccggatggatttcgctgacttctgccatcataaattccgctccgaaaaattccgcttgttttctcatgttctctgtaagtctggtgccgtcggtctcaggcacccccggatagttaaccacctccgaagtaatcgtgatctgtccgcccatcttttctttttctatgaccagcacacggtatttagccctggcgagataaatggcggcggacagccccgctgggcctccgcctataatgatgccgtcatagagtttgttcatatcaagttctttcaacgtatcaccttccatttatatttaattagatcaatccaacaagatcaaggcttggctttaatgtctccgccccaggctgccattttgcagggcaaacttcgtcaccgtgttctgctacaaactgggatgcctgtactcttctgaataattcttccgcatttcttcctacattgccggcgattacttcataggcaacaatttttccttccgggttgacgatgaagcttcctctctccgcaagtccattttcctcaatcataacatcaaagtccctggctaatacaccagttggatctgccagcatcggatactggatcttctttattgtctttgatgcatcatgccatgctttgtgcacaaaatgtgtgtcacatgacactgaataaatctcacagcctgcttttttaaaatcttcatatttatttgctaaatcttctaattccgtagggcagacaaaggtaaaatctgccggataaaaaaagaatacggaccattgtcccatgatatcttcttttgtgacctctttgaattcatttccctggtaagactgtactttaaaatctgtaacttctttccctattaatgacatgctgttgtcctcctttattttcaattcccttattggttagtattgactaactatctgcagtatatacgattccagttttcaggtcaatatcaataataacaataagaattattatcgtttatactcaaaatactgttctcactccatagaatctccgaaacgataaattttatgaaaaaaacagagagagatacagcaaaatatgtatctctctctgttttttatgatttgataaactcagaattttaccatttgaagtctaaaatgttccgactcccgggtatacggcactttcccccagttcctcttcaatcctcagaagctgattatattttgccaccctctcacttctgctcggtgcaccggttttgatctgtccggtattaagtgcaacagcgagatctgcgatggtcgtgtcttctgtctcccctgaacggtgggatgtgaccgctgtgtaacccgctttatgggccatcttaatagcttccaatgtctccgacacagaaccgatctggttcagcttgatcaagatagaatttccgcatcccatcttgataccttttccaaggcgttccgtattcgttacaaataagtcatctcccaccagctggattttctctccaagctcctgggtcatgtatttccagccgtcccagtcttcctcatccaatccatcctcaatggagctgatcggatatttctcacaaagtgatttccagtggtccaccagttcttctgaggtaaatttcttgccactcttaggaagaatatattcacctttgttcgcgcctttccactcgctggaagcagcatccatagccagaacaaaatcactgcccggctcatatcccgctgcctgaacagcttccaaaatatattcgatggcttcctcatcacttgcaaggtcaggcgcaaacccgccttcatcacccacggaggttgccagccctttggatttcagcaaagctgccaaggcgtggaatacttccgtacaccaccggagtgcttccctgaaattttctgctcccacaggcatgatcataaactcctgtacatcgacggtgttggccgcatgggcacctccgtttaaaatgttcatcatcggcaccggaagacggttggcattaacaccgcccagaaaacggtataatggcagatccaggcctgccgatgccgcctttgcgcatgcaatcgaaaccgcaaggatcgcattggccccaagctttgatttatcctttgttccgtctacgctgatcatcgctctgtccaccgcgtaagtatcggatgcatccatcccttttaaagtatcgttaatgatcgtattaatattatgaactgccttggacacaccttttcctccaaaacgctccttatctccgtctcttaattccaacgcctcaaattctccagttgaagctccgctgggtgctgtgccccgtccgattgtcccgccggctaaaagaacttctgcttccactgtaggatttcccctggaatcaataatttcccttcctatgaccttttcaatctctaaataatccatactgtatcctttctgtcgtgtcccctctgccctgcgaaacacagggcaaaagagttctccatgatttattcactgtaggttagcaatcgctaactatctatagtgtatcagacgaagcgtgcattctcaagatttctaaaaaggaattattctcaataaacaactatcgtagaaaacaccttctatttagtcgccatctttattcagcagatattacatccatgttctatatgattggagtaaagcattctaagagccgaacgggaatcatatggaacatgtcatgagttattcaccactatttccgtcgcgcttttgaaatgcgctccttcaatagtggtgaataactttcgaaaagtggctcctttttgacagaagcccttctccagcagacattacgtccattttctacatgattggagtgaggcattctaagagccgaacggaaatcatgtagaaaatgtcatgaataaaacacattcctaccgaggatactaatcattaaaaagacggaggaaacatgaaaaaagtaaaattacattatgcatggtttatcctagcggctgtcatccttataaggggatttgcaggcggaggtatcaatatgacttccggcctcttcttgtctccggtttcccaggagattggtgttggaattggaagtctttccatctatttaagtatcacctccattgtcatggtgttttggctcccctacgcaggccgtctgatcaacaaatatgatatccgaatcatggctgtggcaggagctgtcctgcaggctctctcattcgccggttttgggttcttgaacaaagtttacggatggtacctgctggccattccccatgccatgggcgccaccattttagtaaatctgctgggacctatcctgatcaaccgatggttttcaaaaaatgcaggcactatgctcggcatccagatggcctttgtaggcctgttcggtgcagtacttcagccggtgacttcaaatatcatcacacagtttggctggagaacaggttattttttcataggtggaattacctttgccgtggtacttttcaccgcttttattcttcttaaaaaccggccggaagaaaaacatcttcttccgtttggcgcggatactgaaacagcaggaaaaaactccaacttcacccaaaaggaccagctggagattccagaaaaaactgcgctgcattctgcctctttttatttgctgctgctttttatgatcgctatcaccgggatcggtgtctttacccagcatattcctacctatggttccctgttgggttacagtgttaggaaaaccggatcggctctggcatatgcctccatcggcagtgccatcggctccgttgccatcgggatcatcagcgataagatcggcagtctcaaaacctgctacggaatgatcggcatcggcatcactgcagtgtccggatttctcttaagccagaggagctttgtcgtatttgctgtttccactttccttcacgggctggtaagctctggtatcatggttttagccccgatccttacactgaaattttacggtcagtcagactatgaaaagatatttgccaagatatcaatgggcgcacccattgcctccattgtgttagttcccggttatgggtttatctacgatctgacggacagctaccgtgccgttctatttggcatgatctgccttctgctcctggcttcactgtgcatcactgtcggctggaaaaaacgatgtacgaaagaaggatgtccacaatggagaaaaaacagatatgatggcaggcaaaaaagatcctgagcaatatgctcaggatcttttctactatacattatacatcttattttttatcattcagcgctgcctgtgctgctgcaagccttgcgatcggcacacggtatgggctgcaggatacataatttaatccaaccttgtgacagaattcaacggatgcaggatctcctccatgctctccacagataccaagtttgatatccggacgggttgatcttcccttttctgctgccatagcgatcaactggccgacaccatcctgatccaatttggcaaatggatctgattcatagatcttgttgtcatagtatgactccaggaacttaccggcatcatcacgggagaatccaaaggtcatctgtgtcaagtcattagttccgaaggagaagaattctgcttcctcggcaatttcattggccagaagagcggctctagggatctcgatcatcgtaccgatgtggtaatcaatgtcagactcataatatgctttcaccttctctgctgtctcaacaacaacattcttgacaaacgctaactctttcttttctcctacaagagggatcatgatctcaggaacaatatcaaatcctttttcttgtttcacttcgatggcagcttccatgacagctcttgtctgcatcttggcgatctccggatatgtgactgccaaacggcatccgcggtgtcccatcatcgggttgaactcatgcagagatgcacgggtcatgttgatctcttccacggtcacgttcatatcctttgccagagctgagatctcttccagagtagtcggaaggaactcatgcagaggcggatctaagaaacggatggtgaccggttttccttccataacctcatagagctctttgaagtccttcttctgataagggatcaactgattcagagcgatctctcttgcttccttggttcttgctaagatcatacggcgaatcttcggaattctctctgcgtcaaagaacatatgctctgtacggcagagtccgattccttctgctccgaacttcacagcgttcagtgcgtctgccggtgtatctgcattggtacggactttcaatgtcctgatctcatctgcccatgtcatgatacggtcaaagttaccgctgatggtagctgggatcgtgcggatctcaccatagtaaaccttaccggtagatccatcaatcgaaatataatctccctcccggacagtctttccgcccagaacgaacaatcctttttcttcgtctaactggatatccccgcatccggcaacacatgcagtacccataccacgggcaacaactgccgcatgggatgtcatacctccccgtgctgtcaggataccttcagccgcatgcataccttcgatatcttccggtgaagtctccaagcggacaaggataactttttctcctgcctcgtggtgaagctttgcagtctcagcagtaaagtaaaccttgccggtagcagctccaggagatgctggaagtgcttccccaatcggaacggcagctttgatcgcttccggatcaaagcgcggatgtaataactgatctaatgctttggcttcaatccttgaaaccgcttcttcttttgtgatcattccctcgtctacaagctcacaggcgatgcggagggctgccggtgcagttctcttaccatttctcgtctgtaagaaatacagttttccttcctgaatggtaaactccatatcctgcatgtcgcggtaatggtcctcaagagtcttggcaatctgcataaactgttcataacactcaggcaggtcctctttcagtctggtgatcggctgcggagtacgcacacctgctaccacgtcctcaccctgtgcattgatcaggtattcaccgtaaatctgtttctcaccggtggatgggtttcttgtaaatgcaacaccggttcctgatgtatctcccatgtttccgaataccatggtctgtacattgaccgcagtaccccagtcaccagggatatcgttcattcttctataatagatagcacgaggattatcccaagaacggaatacagccttaatcgcttctaacaactgctctttcggctcctgagggaaatcttcccctaactcgtttttatatatctctttataacgcacaatgacttcttttaaatcatctgctgtcagatctgtatcaaatttcgctcccttggcctccttcatctcgtcaaggacagcttcaaatttagctttgtccacttcttttacaacatctgcgaacatctggataaatctgcggtaggaatcataagcaaaccgtgggttgccggtcttctttgcaaatccttctacagctacgtcatttaaacctaagtttaagattgtatccatcataccaggcatagatactctggctccggaacgtacggaaaccaacaatgggtcttctaagtctccgaattcctttccttggatattttccaatgccttcatagcatcgaaaatttgtccctgtacctcatcactgatgttttcaccgcagtcatagtaattggtacatgcttctgtggtcaccgtaaacccctgaggaatcggaagtccaagtcctgtcatctctgccaggttggctcctttgccgcccaagaggtttctcatctctgcatttccctcgttaaattgataaacccattttgttgacatgtctatacctcctaaaatagtatgttgtaacaatgtatgtcgttggactaattgtaccacaaaatattttgtttgttaattatttttatacgtttttaacaatatattttcaattttatcacaaaaactatttattttctctaaatcgacatgtttttctcaatttcttttatctttctttagtaactattgataaaaagggaatccccgcagttcttctggtgatgcgataccgttttgcagagccatttcacggttgaccttgtatagttctgcccacgtcgtctgtctgtacggcaccacataaaaaatgtctagaattccgcatgtaaacgcagaaaggatcatccatccgatgaaggaaagatccagcacaaaagcgtcaaacttctgtccgtccatcatcttcctgctgatctcaaatgccctctcccttgagatggaaggattctctgccaagatatacgggatcatcgaatacgaataggattttacgatgcccggtatgatcagcagcagggtccacagccatacaaataaatttcttagaaacatggtcaacacgatgtttgaataatttcctccctgaaatgccatgccaaggagaccgaatctagcctttctgtcactgttttccacaaaaaaacggttgcagcccaccaacaggggattcccgacaaatatcttaatcagtgtaaatcccacaaagaaaaccacaagtatccccagcaacgccgtcaggatcaccaggaactgtgggctggtcaaaagatccatggttcccccgtcccatcccgcgttctctatttcattcttcatacctctgtaggatgcattcccggtcagctggccgttgatgatccccgcaaccagggctaccagtaccacaatccagtaattcctcttgatcgactcttttcctctgctttttaattcagctctcgtccacatattatgtcctccttttcttgtcatcttatgtgaaagttacaacaattagtataacattatcattcgtacttcgtccatctgaagaaaaaagcagatgccgtatttctaaacagcatctgctatgatgattctaattttctatatgttttttcagatcaacagtgttacccaccttcagcaggccgtggtcaattcctttttcctgctgtttttcttccggtttggtatagctgatctcccagaaaggtcctccagcgtctgcgccttctttcccctggcttacgatcttctttaatgaccatgtctcagcagtccttgcacggcttcccacatcggcaaccttgaccttatcttttccgaccattctcgtcactacgataaaatggccgtactgtgtaaagtctccaggtcccaccaaggctactaccggatggccgttcttcagagctcttgtaatggctttataatcggtacccaggcctttgcagtttaatccgtattcctttgcaagtcccgggatcacttcatggacacatccttgtccattaatgtaccagccttttttatatgcgatcttgcacatcttcggcacactgactttctttccagtcagtgaactgtaacagactgcaatgcaggttggcccgcatcccgctgctttgatggtgctttttccgatcttctttcctggataatctgcctgattataataaacaacgtcaagttctttcttgtcaccctctgctgccgatacatttgtcacctgtaaaagcatgcccaacataacacagcacattactgcacatacgatgcgtttcatgttcagaatcttcattatcctgtttccctccgattctatgcgcatttttctccacaattcgaagtataacaaggtttctcgcaagaagcaagtactatttttaatacttttgtaatatttacataaacaaagctgtggatccagcgtcctcagccagcagacatctgtctctactccgcactatataatatattttccatctccaagtttctgctctcttccggcgcttccagctctctggttcgtctccccctctagcagtctggcacgttttaccgcgtccattccgtatttgtcacggatagcgtcaatagattggtccagctttcgaagcttctcctttttctggtttccaaacagatccatctgggaaaattcctcttttgtgatgtctgaggcacggaccccaatcagccggacaggaattccacggaaactttcccggtacagttcctttgccgtctgtacaatctcatttgtgatatccgtgggggcgggaagttttttctggtgagaacttctgcggaaatagcagtccttgatctccactgtgatgcaggaagtcttcacatgatctgccctaagtctggatgccacggactctgacagagacagcaggattggatctgccgcctcaaaggaagtgatgtctgacggaagggtggtgctgttgccgtaccccttcgtatcggcatgctctgcctccacaggatccctgtcaatgccgttggcatactcatagatcaggattccgtgcttgttgccaatatgagactttagaagttctggatccatatgggccagttccccaatggtccgtatacccagattgtgcagcttcttttttgtagcggggcctacaaaaaacagatgctccacaggaagcggccacatcttttccgggacctctttaggaaataaagtatggaccttgtttggcttttcaaaatctgatgccatcttggccagcagcttattcggcgctaccccgatattcacggtaaacccaaacttctcataaatccggtctttcagcgtacaagccgcttgataagggctctcgtatctccctacagtctccgtcatgtccagaaatgcctcgtctatgctgaacttttcaaggaccggggaaaatgtcagggcctcatttaaaaaagccctggagtaccgctcatagagctgatgacatggcggccgtatgatgagatccggacatttgtttaacgcctctctgatggtctccgccgttcggattccctttttcttcgctggtatggaggcagccagcacgatcccatggcgcttggactcatcccctcccactatggccggcacttgcctcaggtccacctcatccccccgctcctgcattccataaacagcctcccagctcagatacgcagaattaacatcaatatgaaagatcactcttggcttcattcttatctctccttttacacttctgtcattataccatacccgaacacacgttttcaacaaaaatgactgccctggaattggaccttccagggcagtctccggcttttgctttacagctgttttcgtcttattttatctttacaagatacttctttgtaatgtttccggatttcatgaccacataaacctttccccttttcctggccttaaattttcccttcttggaaatggaagcacgcttgttggaaactgaccatttcacagatttcctggtgccataagcctttgccttgaatgttacactgcggccttttttcaccttcttatacgctttggttattttaatataagctttgaccgttacctttgtttttaaagtataggtctttccgttctgcatcacactagctgtgatataagcagttcctgctttctttcctttcacatatccagacgaactcactgaggccgtctttttattggaacttttataagagaccttagctccttttcctttgtttcctattgctgccctatatcccttagaggcataaattaccttcttagaggtcatataaggctttttcacaactgataccgttgtctttaatatgtatgttttttgattctggactactgtagaggtgatcactgcagttcctgctttctttcccgtcacatatccgtaagagctcacagaagccacggaagcgttgctgctcttgtaagaaaccttggaatctgctgttttgttcttaatggatatgcggaaaccttccttctcatccaagaccttttttccgacagcagacggcgccgcaggctcatagaccttcacttgttttgtcagctgtacattgtttgctctgtacgtaatcgtgtaagtgtcatccacagctgtgaattttctgccactaagtgtaactgtatttcctttggaatccttcacttcttccgtcactttgacatttgtatctcctgtggaaataatttgtgctgctgctttcggaacagtataggaactcctccgggccgccgtaaaagaagcatctttcggaatcgagatctccgtgtctgtctctccccaatagagtttggtgatctcaccgatggacagtgccctgctgtagatcctagcggatgcgatctcccctttaacagggttttggatctcaccggtcttatttgtatctgcacccacaaaaaaatacttggctccatctgcgggtattgtccactctaaatcagctgtgactgtatcctttagtctcccgtttatgtaaagctttaggacagaaccgtcataggccgccacagcatgaacccacttggacttatcgatctgggccgtgggttttttgtagctgccgccgtgtctggaccaaaattccaaagtctttccgtcagaattcagttcaaagcctgcccccgcgctttcctggtcagaaaatggatttcctttgctgtccagtttcatcatacactccattgtgtagcctttctgcatctttgtatattcatcagacgtaaaattgtaagcaaatgccgaactgccgtcaaattttgcggtctttctgccgaggacagtattccctacaataacagggctgccctttgtaatcgttgtatgttttgcatcagactggtcatctgcggtaccagtcttaaaatcaacgtccaaaagatctgcttttggcgcttctttctttaattcatcatccgtgagcagagccgcagtcttgatgtccactgtaagtttctgtgtgctctccttctggaacggattgacagctgtaatctcgatcctataatccgtatcatctgacagtccagtcaaagtcttggtcagtttctgcttcataggaggggcgtagtaatcggaaaaagtcagtttattcacatccgttttaccagtagttttattcattgccttgatccggtaagaatgaatccaaccgtcgtcatttttgtcttcgtttcgtccctgagtaaaggtaagatcaacagaagactctttgacatttgatgccgttgcttttgccccctgcgggaaagaaggcactgcactttccgtggttcttttctctgtagtatagggaaatacccggttctttaccatgtcaggcacattcaaactccatggagttccgatatattttcctgcagtcagatccatcctgcggatcgtcacctggttcttatcatcaacttctaccatcagtgcctgggaagcattttcactgtccgacggcctggtgccttccatctttcctgactcattttcaaaataagccccgattgtactatcctgaatcgcagtaaaaccaaggtcctgattgatagaccgcggatcatttagtgtcgcatgagaatgtccggaaaagttgataacctgaggatattgtttcagaagttcctgaatctttccaaaacttccataccactcattggttacataggccgtgtccttaaatccatggtgctgtgccagaaaaatcggcttctctggatcttctgccgctgcctcttccagctgctgcttcagccattcatagttatcagaataatctccaccatagtttttggcactcatggtgatgatatgatatccgtcccccacagtgatattattattcgtatcctgtttattgattccctgcttcaacttccctgccgctgctttatagcgctccactgccccggaagctgtattgaattcgtggttccccatcatcagtcccagcttcgtgctgtccttaagcttctcattgagaatatccaccagcttattgtattctccctctgctccgttgtttgttatatcccccacaaacacagccgcgtccagctggctgtctacactgtaaaatgcgtcaaaggcatttttcagcttctccgatgcgtcatcatttctgccgatgtgcagatcgcttcccactgcaaatcggaccttcacacggtctctggagatctcctgccattccgtctcctggggtgctgtccatgatgcggcttttaccggggccagaacacctgccgccaggagcaccgctgacatggcgcaggctgccgcccgtttcatttctcttaacatcattccatctcctttatctctcacctaatttctgtaaagcttttgaagcctcttatattgtagaagtattcacagcttctatctgccagaaaaaggttaagagtcattaaaagatcggaaaagaatcgatttggaatgtaaaaaaagaatcccctgtgtaaaacaggagatcctctgtgttccatcagctaagatgtttttcgatccacaaaattgtgtcatctatcacttcatctttttctacttcattatatatctcatggaaaagctttgcgtatatcttgagtgttttatccccggaacgaatatccccgaacatctcccttgaatcccgttcactcaccagaccgtcattggcaccgtgaaggattaacaccggatcaataaaactgaaactgttcttcttcagccactccacaccatcgtaaatactgttcaacagcgccacagagatctctttttccaccagagggtccttgttgtatgcctccaccacagctggatcgctgcataccccgtctcccagcgcattgggtacataagtatctgccggcatgtccagaggaagctccccggcacactttgtatgatatctggtcagcgctccggacaaaataataccgtctgcctttccgggatatctggcaccgaagcaggcagccgcataacctcccatgctgtgtccgatcacaaacaccggaaggccctgattatgattcttgactctgtccatcactgcattcacatcatcacttatggtctcaaaatgatcataatagacccgtctgccctcagactttccgtgtcccctgtggtcaaaccggtaaaccatcaggttctgttcgttgaggcgttctgtcagatactcatatcttcctaaatgctcacacagtccgtggacaatgaccactgccgctttcggcaaagccgtcacatcctgcaccatataaaggcctgtcccgtcaaacgtgtgaaatgtaaattcctttctcatggcatacctcccatcgtggctggtttccttgtatgtatctattttaatacaatcctctgccattgaaaaggaaattcatttgatatatgcactatgtaatcataaatagactgcccacctggtaaaccaccacggccacagcccatgcaaagatcatctgaaaagccaccagtccaagtgtccacctcgtggatcctgtctcctttcttatggtcatcaccgtagccaggcacggagtatacaaaagacagaataccagcaggcagtaggcattcagcgaagtaaatcccattccagacagcatatgcaggatattggcgtcagacgaagaagatacctgaaacaggaccataaagcttgaagctaccacttcttttgctgccagtccggagatgagcatgactgcgatctgccacagtccaagtcccgccggagccaacgccggaaccaagaaccttccaaacgacgcaccaaagctctggctcatatcgctgactaagccggtatggttcaagttaagcagcacccacatgacaatagatgcggcgcagatggtggtccctgccttggagagaaagtctttcagcttgctccatacatagatggctattgttcttttattgggagtcttgtactccggaagttcgatcagcagcggctgtttcacctttcccttcagaagcttgctgtgaataaatgccacaaaaatcccaagcactaatcccagaatatacatggaataagccacagccatggcggcttttccgaaaaaaagctgggaaaacacgagatatataggaagcttggcactgcatgacataaacgggatcagcatgatggtccttttccggtcccgctcatcctccaatgccctggaagccatcactgccggtacgctgcatccaaagccaagcagcatcggtataaatgccctgccagagagccccagcttgtccatgacactgtccatgacaaatgccaccctggacatatagccgctgtcctccaaaagacccaggctcaaaaacagaataaagatattcggtacaaaagacagtacgcctcccacacctgcaaagactccatccttgataagtgaaatcacccaggggctggcgcctatcccctgaagtccccccattacatagccgctcacataatcgatggccatttccacatatccttttagaaagtcaccaacagtgaaggttaagaaaaatacgaccgccataataccgaggaagattggaattcccaaaatgggatgcgttaaaacttcatcgatcttgtcagtaaatgccgcctttttctccttattgaccagtacttcatccataacccgttcaatgaaatgatatttctcattgataatatcattctcataggaccggtccacgatcccttccacaaggctgccgtacttctgggttacctcgtcgtcctgctccagaagttttatggcataccaccggctgttctccatttctggatagtgttcttttaaacggagccggatctgtgtaatcttctcctcaatctgatcagagtaatcgaagacctggcggtcattaccctctaccttgtgatgggccaccgcatgcatgagcacctcaaggcctgtctttttcctggcagagactgggactacaggtatgccgagcacctccggaagacggtgaagatccagctccatcccgcgctcctttacaatatccatcatattcagcgccagaatcactggcttgccaagctcgatcaggcataatgttaaatataagtttctctctagagctgacgcatctgccacatcgactatgacatccacgtcatcctggagaatatattctcgggacagcttttcttccattgtataggatgtcaggctgtagatacccggtaggtctaccagtcgatacatatggttgtggtattttaatgcgccttcctttttttccacggtgacaccgggccaatttgccactttcagtttggctcctgtgtaggcattaaacaacgttgtcttaccgcagtttggattccctacaaatccgacctgcaattcctctgcgctcatgttaaatccctcttttctgtacgttccctgacctggatcccactgacgatctcccttccgagggcaaaccgtgtcccccggattttgatgatcacagctccgttacgctttttgcgcatgacataaatctttgatccctctgtcatgccgagagattccagacggcgttttgtcgccagttccagttggatttcttccaccagatattgtgtacctgaatttgtatctgttaatttcatctttcgctccaaattgataattgttctcaacaaaatagtacgtcatttggtgcgttatgtcaagcttcttccttcttttccattctcatctcaaaaaatgtggcagccagcatcagaaccacagttccgagaatcatcaatgtagatagcgcatttacatcaggtgatactccttttcttaccattccgagaattctgattggcagcgtcatgctgtccgggccggttgtaaaaaagctcacgaccacatcatccagggacatggtcagcgcaagcatagctccggacaaaacacccggcaggatcataggcagtgtgaccctcttaaaaatcctccagtcattggccccaagatctctggctgcctcctccactgaagggtcaaaccccgcaagccttgagcgcacggtgatgactacaaagggcatagaaaatgtcacatgggaaatgatcagggtcaccatgctcatctgcacttttaccatggtaaaaaaggccagcaccgcaattcccagcacaatctcagggatgacgatggggatatacagaagattgctgactgtctctctgcctttaaacttataccggtacatgcccacagcacagagggtacccagaatcacagacaacaaagtactcaaagctaccacgatcaaagtgttaaaaaacgactgcatcagctgcacattttcaaacatcctcccgtaccactccagggtaaatccctggaaggtcacattaagctcagactggttaaaggaaaatgcgacgacaactgcgatcggcagatataaaaacagatagaatagacacgcatagcagagcgccaagggccttaatccagactttttctttttcatcacaacctccttctataccatatcttcgatacttccaacccttgagtacagcttcatgatcactatggtcaccacaatcagcgcgatggcaagcgctgccccaagaggccagttcctggcagtcaaaaactgattttttatgacattgccgatgttcatagttgtggctcctcccatcatatcagtgatgaagaaataacccagagacggtatgaacgtctgaaccgatgcggcaaaaattccaggcatggtgagcggaagtataatcttacgaaatacatgtgctttggaagctcccagatcactggccgcttccaaaagagagtgatccagcttttcaatggaagaataaagtggcagcaccgtaaacgggatcaacgcatataccatcccaagaagcactgctccgtccgtataaagcatttgtagtggctggtgtatgatgcccagatgcagcaaaagtgtgtttaaaatcccttcttctcttaagatgctgttccatccataggtacggatcagggagttgatccaaaacggaagcataatcagcaaaacacagaagggtttccatttcttctttgtgttggaaataatataggcaaacggataaccaaacagcagacaaagtgccgtagtctttaaagacagccaaagagaatccatgaggatctttatatatttagactggaacattgtcttataggctgtcaggtcaaaggtattgataacacctccgtaaagtccctttttcataaagctgatgcccacgatatataaaagtggcagcactaaaaacagcaccagccagaggatcgtaggtgataccgttgccagaaacggaatcttattgctcttctttttcattttcattcccggccccctctataatttcatagacccggtcttcccgtgtgtgcatgaccacagcctttccaggaagccagtgaagatatacgttggtgcccaccgggataatctcatcctctggaggatttgtcatcttgatcagctggctgtttggcagctctatgatggtttttatgatagatccaacaaagatatgctccattaccgttccccgaatcgtaaacccgtccaccggttccatggatactttcatattctcaggccgtacacacacatagaccatctcatcgtaatcaaattccggggcgtcaagctccactttgcctgactccatcacaagagagatcctatgtccctttttctcttcaatataggcttcaaatatattggactctccaataaagtccgctacaaatttggtcttgggatgatcatagatctccacaggagtgcctagctgttcgatccttcccccattcatgaccgcgatccggtcgctcatagtcagcgcctcctcctgatcgtgggtcacatagataaatgtgatctgcagcttcttctgcagttcctttaattcatactgcatctgttttctgagttttaaatccaaagctcccagaggctcatccaaaagcagcacctttggccggttcactaaagcccttgcaatggcaaccctttgcttctgtcctccggacatctgagacggcatccgtttttccattccctgaagctgtacaagttctatcatttcgtcgactctttttttgatctcggctttgggaacctttttttccacaagtccgaatgccacattgtcaaaaacattcatgtggggaaacagtgcataactctgaaatacagtattgacattccggtgattaggagccctgcccgccacatcttcatcttctaaaaaaatctgtcccccatctgtctcctcaaatcctccgatcatccggagtgtggttgttttaccacagcctgacgggcccagaagagttaaaaactctccctgggccacatccagattcagatggtcaatgacagattttcctccgtatattttttctatatctcttaaacgtacaatgacatttttcaacgaagtttccaccacccttctacaaagtctctgcgccccgttctcctgtacggatacgcatcacatcatccacaggggaaataaagactcttccgtctcctacctgcccggttgccaattcttcatggatggctcccagcagatcttctacgtcctcttcccacacgacgaccatcactaccacttttggcagaagattaatctcaaaattcatttcctcaaattcaggaataaatccttcctggtatccgcagcccatggctgtaaatacagtcatacccgaataatctttcctctccaggatctcttttaacttttccagcttctccggacgtatgataatatccaaacgtttcatcgctttcatactaattcctcccccaatcactctgtctttaatttcgtatacagatcatcatagacacttgccgcatcctttacatcgtcaatatattctgccctttttaactctttctgatcgacatttgccccgggatttttcagataatgatcatccaacagcttctttgtcccggtattgatgcacacaccgtagtattcatccaatacttttttatagttttccggcctcaaaacgtaattgatgaacaatctggcctcttttgcatgcttggctcccttgatgataacaaaattgtccagacacttctgggcagcctcttttgtataaatcacatccagatccttattttcttctatggccatggccgcatccatgctatacacaagccccactgcaacatcattggagatcaacacgctcttgggcgcatccgcatcatagaccttgacattcttggcaagtttcttaagccatggcagggtactcatgatctcatttttgtttgtagtgctggagctgtaacccttaaccttcagagccattgcagcaatctccctgatatcatccaccagcacgatattattcttaagcttcggattggtgagatcattaaaactcttgatatctacgttaagctcttttaatttctttttatttccgcacagaacggtaaacgatgtcatataagggatcgtatattcattgttcttgtcaaacggctggtttaaggcgctcttgtccaggtattttacattctcgatctcatctttctgaatcggttcgatcagatcctgttctttcatggcatcgatcacgtaattactggcaatggtcatatcgtactgaccggtgcctcctgccgtcagcttagccagcatctcttcgttggatgtaaaggtggattctaccactttaatcccgtattccttctcaaatccatccatgacactctgggggatgtattcggtccaattatagacatatagtttctttgcatatccgtcctttgttttctcttcttccttcccgccgcacccggccagcaaagatacggtaagtgccattaaaagcagcaggactgtcacatttctttttctcatatcacttctcctttaaaatctgccatatttaaaatgccgtcagcttacactgacgacattcactcttcctaacctattatctactatcttttttcatttgtctattatttttttatataaaatccattggtttttcttgtggtggtattgccggatttgtcagtaaatttcacatagacacgaacccactttttctttgtcttgtaagtcacactgtttcccgtcttccatttatattttgagttcttctttcccttgggcacaattttatactgaaccttcgactttccgctggtaccataagaagcggaaaaggtaagcttaatagattttttatattttttattgtaacggttcttggctgaagtcttgtaggtcttgatgcctgacttgctgcccttgatctttgcactggacggcgcggaagtatccaccgtaaatcctggaagcttgatgaccgtggagccaagccatgtattatacttcacataaatcctgcccacagaaccgttctttactgccacagagctgcccgtccggtagggaaccgttcggttgtcctgtcccttcctcacaaacttgtattgtacacttttcacttttgtaaacggctgcggcactccagaaaacttgaccgttatatttttcttttcgtataacttatagctgttggctgcactgtatgttgtaggcaccagcttatttttgccattggacgaaacgctgacgcttttcatagtaggggaagcctttttggaaggattataatcaccttcataactaggaacattgtttcctttttctgtattgacggataagttcattccatcagaagttacaacaatcgttcctctgttgctggtcagataaacatcactgctctctaggtcttttaaagtttttgctttaggtgatttattcttattatcatatccattgctgacaacagaaatagacgcattcactttgtcaattaaatatttatgatcagaagtataatttcctactttgtcctgctccagaacgtcctgcattccatgatgtggaaccttcagaacttgtgcagacaaatcatatccttttgaaacgatttgctgaatggtttctttctgagcgtctcctgtcataagaaaagaattctttccataagagattttgcatacaatggaatacttattttcctggcgtatattcagatcaacttttcttccataaataaaatccatgttcaaaggaccgtaaaatgtgattcttgctcctcctaaatatacagatgagcctgctgttggcacctcatattctgtctttccttcatctactcttttttggatttcttctttcacttcctggtaagtttcactgctgaactctgtatcttcaatatcatctgggtcttcattcccacttgactgatagattaatgaaaggctgtttccgtatatcttctctacttcaatagattcatcctttaaaacttctaccaagccaccaatatgatcctgatggggatgcgtcaatagtacaaattctagttttctaacatcatgatcttttagataactatataaccgtttgcttgtatctactatggttccgtttgtcctagtatacttctttggtcccgcatcgatcaatgcatacttagcactgcttccttccccatattggagcaatgcgccatctccggcccctacgtcaataaaatgaatctgaaatttctcagccgcctggacctgctttttctcaatacttcccgttgcaatcattgttgatacaacaagtaccgctgtcagcagataactgatccactttttgatgcccgctttcataaacaacctctttctttttgcattctctagtttcccttttacgtatatgctcagtaatttcttctccgtttataaagataacatgaatttaatatattttcaataaatcgtcacagttttgtaacaaataaatctccccagcaagaaactggagagattttttattctatagccttctgattaaaagcttttacacaattccagagtaatatctttcatggaggtgacgatatggtccaccgattttaattcctgattggcaacttccagattgcggaatccaatcacattcatacccgcacgttttgcagccgtaactccgttatttgagtcctcaataaccagacattgttccggctttgctccaagcagcactgccgcttttaaaaacacgtctggagccggtttaggatgtctgcagtcctttccgctgaccagcacctgaaagcattggcggattccgaagtagtccacaacctgttcaatttcctttcttgcagaagaagaggccactgccagaggaatcccttcctggtggattttccggatcagatccaaagacccatcaatggcctcataaccttcctcacggatcctctgttcccggatctcatcagcacccttgacacactcctccacaggaatgtcaagtcccagcatctctgtggtggttttccacatatattctgaggctccgccgaaaaactgctcaaaatattcttttgtgatgcttttgtcataccgtgcaagaaacttgttagctacaatataaaacccaggctccgtgttgacaataaccccgtccatgtcaaaaataactgcttccactcttcttctccatatcatcttttagttaaataaactctgcaacgttcccaagtctgcttcctccaaggaatgcacaaccttttgggccggctcatgggccggttttccatattccggattactgaagccgagtactttcatgcccgccctgctgcctgcgagcacaccgttgacggaatcttccacgaccgcacagtttttcggatccacacccagcttctcagccgctgtgagaaatatctccggatcaggttttgaattttcacagtcctcccctgtcactaatgcatgaaaatagtcagacacacctaaatcttctgtgatcctgataatatgatccataggagaagaggatgccaccgccagcgggatccccgcctcatggatctcacggatcagttctatggctcctttaatcggcgtaaatccgtcttcctggatcacctcttcataaatctcaaagaatcgccggttacaataatcaactgttgtatccagattcagatattcaatggtgtcggtaaaaagtttctccatcgttgttccgaagtagcgggcattgtactcctcgtctacgtattcgtcaaattcatccagcaatctcagcagagctgtataatacccaggttctgaatctacaatcacaccatccatatcaaaaataaccgcttttaacataaatcccccttcagtactgcttttaacaccttcaatacaccgtcttctttattggaatctgtcacaaaattcgcagcttccttcacttcgtccctggcattggctaccgcaaagctgtgggccgcccgtttgagcatctcaatatcattgatattgtcaccaaaagccagagtctcatctgctgaaatgttgtaatgctcctgaaaacgtttcagggagcttcctttattcactccaaggttcatacagtctacccatttttctcctgcgcttgcaacgtagatcctgccgccccatctgtcgtaaaactcttttccgactgcttcctctgcgttttggttgtggaatacagacaccttacacacgcctgcctctaccttaaataagtcatccaccatcactgcgttatagccgtagtcgtccttcatatggcggtagagcatctccgaatcaaaatagctggtctccccgtcattgagggcacaggtacatcccgggatctccatggcatcttccataatacttttcactataaacggatccatcacatccacatgcttatattccttagatgtgatacaggaaccattttcggataaaaagataatatcatctttgatcggttcaaaaaaacgctcaatactctttctctgacgtccgctggccgctacaaagagtactccccgcttcctgaactcccggatcacgtcaaaatattccggattcagattcatagccgcttcttccaccaaggttccgtcaatatcagttgcaattagtctaatcatgggcatcctttctgtaaacattgatcatcattacagcaagatggtatcatatcaaagcctaaaattcaatcaaaccatttataaatattgtcaaattttcacctgccggtttcacttctccagtacaaaatcagttttgcctccgcttatccagatacaaaaatgggcagccaatatgctctggctgcccaccttttttcattattataagctgttaaacatttgatagactttctctttatcccggcaccgcaccagccgttctacctgctttctgtcactgaaaatgttggcacaatgcattaggatttccatatgctcatctcctatggccgcaagccccataacaaccttgacctgattcccatgccagtcaataccctccggatagatcaaaacggagatcccagtccttaaaatctgatccctggccttcttctcaccgtgagcgatggcaagcatattgcccagataaacagaaaagttctgatctctagaaagcatcccttttatataaccgcttttgatgtatccgcttttcagcaaaagactgcccgcattgatgatcgcttcttccggggtggccgccttgcagttcaaaacaatattttccttcatcagtacaggtctttcttccttgtctctatctgtcattacaatccctcatttccctcttccccagccacgcgatttaaataatctttgatctgccgtctgagtgctgtgatattattgttctccaggtactgaagtattttctcatcattgacaaacccttctgaaataactgccagtgtgtccctgatctccttgtcctcttttttgtccacgatcatcaggacacctttgtcaaatcccttaaaatccggatgggtaccgtgtccatggtccagtgtaaaaaacaacagcaccggctttctattgccaggaatgttacagtgaaaaatcagaaagttccggtcttttaacgccacctgtccatccttctcccgaaggagcacagcgtcaagacaggcttttttctggatctcatccatgtcggtgtagtcaagaagcctggttactgccccggcttttcccacggaggcatccgccgtaacaatctgtaggtcatcaagcagctgcggtgaggttgttctcctgacggttcccctgtctggtatcttattttgaatcttttgttccttgagtagttcaaagtatacctgcatccttccaaagtcctcctctgaaagcagagcccccacttcaataaccgggatctcctggtccggaagcttcagcgtggatacgatgatgtcaagccccagtccctcctttgctgtcacctgctccacagacagcggaaatactttcactgttcctgcaaaccggttttttatactggaggacaaaaagctggagattccaatcccgctggcacataccacggccacgtttaagacaacagactgtttgatctgggcttttttccgctctatggctgcgccgaaatgaaaggacaaatatgcgatctcatcctcattgacttccagatgatacttcgtctccattacctgacagacatgtttacagacgacaaaaatatccctgaagtctgttttgatctgctccaacagaggattttccagtctcatatggtaattgagcctgtggagcgtggaccttaaatgagtcgcgagaccttgatacagcaccttgtcctgtctgaaatcgtcccccatgagctgtccgaaagcagtgattaagtcatccgccacgatcatgcagtcatattcatccagcattttggtcagctcatcctgcttctccacagcatatttcattctggctccttttaaatgcatgaagacataagccacctctgattccggcatctttatatgaaattctctctcaaaatattccgtcagctgtctggctttctgataatatgcatcttttttaagccttaagagcagatcctcctccatagtgatggtctttcctgacaaaagccgttcaatggcaatgacgagatggatgaccaatcctatataggaatgtctcgtgatcttgcttaaaaattcatcctcacactgcttgagaatagaaataaccttttccaggatctcctcatttaagagatccagattgctgtttctccccagactgcggaaatattctatagcctggaattctccttcacttccctggaactgccccacatctgacttcatgagcttttcgtttaaaaaatcaatgatggcgtttctaaagctctcctcctcacctgtcacagtgataccaagaccggcttttttctccagggagagccggtgctcttgaaaccacggtctgattgcctggatgtcattgctgaccgtagcctcagacaccatcagcttgtatgcgtagtagcctagtttttctatattttttctctttagaaactcaatcgttaacaaagcccggcgctgttccttcgtgtaataaaaaagtgaagaatccctgtctgagacttccataaggtatctggccaatgcttctttatcacctgaaagccggattccctttcctgttttcgtctccagctgaactcccagtccaaaaagctcctgattgacgccgcgtatctcacgaaatagagttctagtgctgattttcagtttctctgctgcctgctccatcggcagaaattcttcctcatctagtaaaatgcggaacagcttgatctgccgaagagaaaagaacttctgctccatctctctcacctctgaatctcaaaagcacctcttttgcatcttcttttaacttacggtacgcttcctcctgtacctcatgataaaacatatctccgccgttctcctttagtttctcatatacatgtctggcagcggctttcgaccagtaagaatgataattgatctttgtgatacctgccctgatggcctcctgtacctgcgcctgatccactccagatcccccatgcatgaccagtctggtgctctcaggcatcttctgacgaatctcccgcacccggtcaatatccagcatgggctcctccgcatagattccgtgcaccgtgccgaagcagacagccagcgcatccaccccggtgcgcagtgcaaattctgccgccatgtccgggtcagtgaaggtcttcttgatctcctctctgcctaaaagcctcggtcctccgtgggaatcttccgccgtgctgctcattgtccccagctccgcctccacagacagacccatctcgtgggcagccttggtaaactcccggatcctctttacattttcctcaaacggcaggtcactgcagtcatacataatgctggaataaccgcaccgtattccccgcattacaaagcttagattaataccgtgatccaaatgtacacaaaccggagctgtcgctctctttgcatactctacagtctgagggcctatattttcaatggggatcaggctgtcatgcacctggacatgcccgatgatcaccggcactgagagctcactggctgcatccatggccgcccttgccatctcaaagttggggacattaaagcagggaatggcatacccgccctcttctgcctcttttaatatgttctgtaagttcactaacatgttgttacctccattttacctgaatttttgatactgttcactggaaatatgttcattcatcgatccattttccggcaaacaggactttctccgcctctttgcaccacaccccatggttttcttttaaaatatccgctattttccggtaaaccgggtcttcatctgcatatttttcaaaatctgtgagtgccatcagcggcagatccacgtggggataaaccagcttcttgcctcccggaatatccggcaggtttaaaataatgtctggcacctcagaaagtcccgacacatgggtgatcatatactccggtgtgagcattccttctctggacaaatcaaacatttcccggatgtcgtccaaatttcctccgctgttgcctacataatgagtccttttataatgaatgtcgtagaaattgactctagctttaaattgttcatctgtcggccccgcaaaaaagttcaggcacccgttgaccgccagaaggccgctgcccagctctaccaggctttccattgccgcaaagaccatgatgtcatcatatcctgttcccccagataatacccggagctcctgttcttcgtcttccatctccgacggatttacatacacaagttccacgccgtagtctgaggcttccctgggactgatcagcttttcggctcttttgatcctttcctcgttgatctctgtcaccacaagcttcttcggccttgacggtccgtggaccgcataatcaatggctccgatccccatcggcccgcaggctgccatcagaagcatactgccgccctcttttgtgccatggatgttgtcgtagacaaacatatcctccatataatcatggatgcacgtatggaaagcactgatgatgcaggatacaggttcccccatggaggcaaaggcaaaataatcatcttcataggtgagaagacagccagattcaatatagccgcccggaataatcgtataagtcgcatttcccccgaaaaactcaaaagaataacccggagcatcctcgcttcccttataacggatccccgcctgcaaaaaacaggaagttcccggctcatatctgcctttccattcctcccccactttctcaatgatgccggccatttcatggccggtcaccaccggagtctcgtgcacgttctctggtaccctcaggtgctccttccctttcatcgctgccttataagtagaaaagcagatcccattggacataaccttgatcagtatttcatcatccctgatctccggcagttcggtttcccggatccggatatccttcttcccataaagagaagccattttcacacgcatacgattccctccctcatcaatttactgctgctttttcaattcctccaccagctggtcatattccggcgcctccacaaaattggataccgcaatgatccgcgccgtgctgttataagatttggccctttccgcaaggcttgtgtgggtcagaatgatttccgcgtcttccggaatctcgtccacagaagtatgggctaccttaatgttgattcctgctttgttcaatttgttcgtcagcgttgctgccgccatggcgctggatcccattcctgcgtcacaggcaaacacgatctttttcactccgccgtccagagaaagattcagtggatcaaaactctggaagctgccctcatcctcatcatctttggatctcttataaataatagaagccacgatgaaggatactgccgtagccgccgcaattccagccagcacaggcagtgcgccgcctttgggtgccatggccatataagcaaagatacttcccggtgtagctgccgccacaaggccgcttccaagcagagagttggtgagtatccccgcgctgcctcccaggatcacagccaggatcaaggccggtttcataagtacataagggaaatacagttcatggatacctccgaagaactggatgatgatagccccaggtgcggaactcttggcttctccttttccaaagaaccagcatgccagcaagacaccaagcccaggccctaagtttccttccagaaggaagtagattgattttcccgccgtggccgcatctgccagtcccaaaggtgtcaggactccatattggatggcattgtttaagaataagatctttgccggttcaatgatgatggatgccagaggaagcattcctgcattcacgatggcttttactccgtttccaagggcattgctggctccctcaaccaatggccccatgatccagaaacagagcatgaccagcagcattcctaagattccggctgaaaagttatcatagagcatttcaaacccagtggggatcttgtcttttaacaggccgtcaagtttcttgaccagccagccgcctaaggggcctgcgatcattgccccgagaaacatggggatagaccctccgatgataattccgaaggtggcaaccgctccgaccaccgctcctctggtgccgtagaccattttccctccggtgtagcccatcaggaccggaatcagatagttgagcatagggctgatgaccgttgccatcttttcatttggaaaccatcctccctgtaaaaagatcgcggtaaaaaatccccacgcgatcagtgcgctgatgttcggcagcaccatgccgctcaaaaaacgtccgaacttttgtacttgctgtttcataatgcctctctcctttctttcaaaagattgtattgttggtatgtctttattataaaggatgtttcaggcaaatagctgcctaagcaattcaaccttggcatgattgaatgctgtcaaatttttaggctggcttggagcaaatgtttctgcgtacaaaaaagccaaaagcaacgttcttgtacatagctttttggcgtgttatcatgaattaaagaaggaaaggcctgataaaatataaattggagggataagcaccatgttaaagaatccagcagaaaccatcggaaagatgattgataaggcaagtacaagttttatttcctacatcgatgaagaaggttttccggttacgaaagccatgttaaagccaagggaacgagaagggatcactacattttggtttaccacaaatacctcttccaacaaaataaagtgtttcagaaagaatcacaaggcaggtgtctattttgttgataagcggtttttccggggtatcagtctgaccggaacaatggaagtcttagaaacaccggaagccaaagaaagaatatggcaggacggggataccatgtactacaaagagggtgtcacggaccctgactattgtgtccttaagttcactgcggtgaaaggcaggtattacagcaactttaaatctgtagattttgatatataaatattcctatagaaaaaggacagccacttaaagtgtaccgtcctttttctgcatgaaacatctataattgagtaatatccaaatctccgaaggctgctctccagtcagtgtcaaaatcatcaacagcctttccgatggctgccattccaaggacatcgtggagaagtcccggctgtacagtagccgcctgagcgccggcttcaaacgccgcattgacctgagcgatgtttttaaagcttgcggccaatatcttcgttttgtatccatagcgctcgatctgtttcgcaaaacaggagattgtgtttttggagtcaatgtccatgttctccatccggttaaaatacggtgcgataaaatcagctccggcctccatggccagatagccctggatcttggtataaattgctgtagccgtgatgcctgccccttctgcttttaacatacgcatggctttcagcccttcttctgttgtaggaatcttgataaagaccttatgatcaatcttttcccttatagttcttccctctgctgccatggtctcggcatcctttgccgtgacctggatatgcagcgtcttgtcttcccctatcaattccctgatctctctgaaatgcctgaaaaaatcaatcttcccttcctttttcaagatggacgggttgctggtgacaccagtgatcgggtaaaaatgactgtattctttaatttcttctatatttgctgtatcaaataaaaattccatggttagatcctttctaaattctatcaaggtttcttctatatccagtttttacagtacctgctcggttctctcaatgatatcatcctgggtctgtttggataacacattaaagaatgcagagtaacctgccacacggacgatcaggtctctatgcttttcaggatgtgcctgggcatcccggagggtctccctggaaaccacattgtactggacatggtatccgtgaagcctgttgaagaatgtacgaatgatgtagatcagcttcattctgtcctctttctttgaaaggatctgcggtgttaccttctggttcagcagaaccccgcctgtgatatctttggtcggaagtttggcaaccgtcttaaacaccgcggtagggccgttctggtccatggcatggctcggagaacacccttctgaaagaggagtatgtgcctttcttccatccggcgtagccagcgttcccattccctggcccacattggctgagatagaagaagttcctgcgtaataagttcctccgatggggcctcttttgtatcttgtattgtggtattttttgatctcgtcaatatagacgtcataggcactccgaatcagagagtctacataatcatcatcatttccgtattttggagcggaaagaaggatattctggattctctctccctccggtccttcaaagtcattctgaagggcgtcccacagctcctgttttgagatactctggtcttcaaagacacatttcttgatggcagcaagtgaatccgccatgttggcgatccccacctggagtccgctgatgaaatcatagactgcgccgccttctttcagggtctttcctcttgcaatacagtcatccactaatgaagaacaaagcacatccggtaccgtctcctcaaggaccatgtcacagcaggtttcaatgatcacactgtgtcttgtaaagtcacgtatgattttatcccatgccttttcgatatcttcataagattccatgtcaaggaaatgtcccgccccttctgtaacctttacgccagattccggatctgttccgtcgttcatggcgatcagcagagattttgggaagtttaaaaagctcattccagtacagcggtatccccattttccaggaactgctgtctctacacaaccgatggcgctgtaattataggcatcttcttccttcacccctttttcaataaaggaaggaatgataatctcatcattgttaaatgccggcatgccgaatcccaggcggacaacttcaatacactctttcataaaatcatcatcaagcccggcgtggtagcggaccgtaaggttcggctgcggaaggtgggtctgggccacgcttctaaggatcagataggaaagaggattgactgcgtctttcttgtctggcgtctgtcctccgatagtcacattctggtacagcgggcttcctgcgctgaactgtgtgtgggaccagctgcggatcttattgatggtataagttttcagccagagattggtcaacagctcacatgcgctatcttctgtctcaatacctctctccacgtcttttttatagtaaggatacagatactggtccattcttccgtaagacaaggaatgtccgttggattcaatctggagcaccagatgtaccagccacatgctctgtaccgcttctctcatagtctctgccggtccataaggaacctttgaaagaataccggccatctccttcagttcctgtgcccgtttcggctctgctttttctgccatctcaagggccagctttgcatagcggccggcaaaatccttcacggcgccgatgacgatcaggatcgcctggtggaaataatactttttcaggttttccatctctgtcaagtccagcttctccattgcagcttttgtccgttcttcataatccttcagaccgcacttcatgatcttttcatactggacagccagatgtgcatcccctgaggtgatatttccctccgccttgatgatccccagatcgtaaaaaatcttgctggaggcgggcatggccgcaagtcctttgtcttttgtcgtattgtgttcccagtacggagccagttctctcaatgtctcctttgtgtcttctgtgatatagaatacgtctccgtcccgtttctcgaacttgtcaagttcatcaacgacccagtccatggcatattccggaaagatcggggcagaccggttggcggatgcctggtttccggcaatcaatgtctgcggttcgatgaagatggtcatatgctctaatatattctgaagcatgtatgccctttttaagatgactggctggtccgcgtgctctttgtaactctgtgtcgtatagacagcacgttccgcgcatacatacggttttgcctctaataaatcctccctgaattcatccatgcgttttgtaagctttccgaaatgattctctgccataatgatacctccctgatatggttcgttgattctatgctcgcttttttcattttcttctctgtacctttaatatacgcttccattttcgttttgtcaatatttttattacatttgaaactaatatatattttgttaaaacttatatttacttttattcattcttatgttaaggttctgttataggaataaaccagttgttattccgctttgtttctgaagaaggagggtttcagttgaaagcaaatatctttaatatccaaaaattcagtatccatgatggccccggcatccggaccgtagtatttttaaagggatgcccgctgcgctgccgctggtgttccaatcccgaatcccagtcctttcacacgcagatcctatgggatcccggcaaatgtctgcactgcggcctctgtcagcggtcatgtcccacagaaagtatccgtttttcagatgacagcagcttccacttccgccacgaaagctgcgaagggtgtctttcttgtatcagacagtgtccaggaaatgccttaaagtataccggagaaaaaatgtcagttgatgaagtcctgaaagaggtcatgaaggatatcgacttttacgaggaatccggcggcggtgtgacgctgtctggcggagaagtcttggcccagccggcattcgctgagctgcttctgtcagagtgtaaaaagaaaggactgcatacggccctggagacaacggggtatgcatcccatgaagtgtttgtgtctgtgacagaatatgcggacctgcttctgttcgacatgaagcatcatgacagcaaaaaacaccggctctataccggtgtcccaaatgaacagattttagaaaatatgaaatgggctgcagagcacggaatagaagtcattgcccgaatccctgtcatccccggcgtcaatgattccattgaagatgcacatgcattttgtgctcttttacatgaaaccggcatcagccaggtaaaccttctcccattccatcagttcggtgagaaaaaatatgaacagttacatatgaattatgaaatgaaggatgtaaaagccctgcaccctgaagatctcacaaaatacgctggagtctttgaggcagcaaaactttccgtcaagatctgagggacctccatatataaggaggcccctgaggtctttctttattttgccgtctccactgcaaccctgttttgttcaagaattttccttgcatcctcaggaatccctgtgtctgtgaccaccatgttgatctcatccagcctgcattggagtacgacgccctgctgtgcaaacttgctggaatccgtcaaaatgatagaatgtttggccgactccgccatatttttcatagcctcagcacgcatcatatccccgcatgtgaatcccgcctggggaataaatccgtctgttcccataaaaaacttgtctacataaaactctctggcacattttcttacaagaggtccaaccatgacctcggattctttctgataatcgcctcccagcaggacagtttttcctgcggcggactctctgatatgccttgcgataaacgccgagttggtaatgatggtgacatcctttttctttcccgcaagatactctgccagcagcgcacagctggaccccgactcgatcatgacggtttctccgtctgagacaagctctgccgccttttccgcaatttttaccttaatatcataacggactgccatgcggttgctgatatcatctgtattgcagatcactgcatatccatgttccctttttaacagccccttttcctccagcgcatccagatcctttcggatcgtcacctgcgatacgccgagagtttcggacagctgattaacctctatctttttctgctcattgaccatttccagtatctttgtctgtctctctgtcatgtcttcacctctttttcttttatcatatcatatccatatttcatatacaatttgatttcttttcaaataaaagcaggttccatgataccgatgacgagaaggaattctgtctttttcaagagatcctggcgtttacctatacctgtttttttaaagatatgctatacttaaagaaataatggggaaagggggctgcataagaaatggtaaaatctatacggaacaaagagggattcactttggtggagctgatcgtggtccttttaatcctggccatccttctggctcttttgattccttccctgattggctacatcaccagcgcccagaagaaagcctgcctggtcaacaaagcaggacttttgagagatctcaccgccgatgagatctatgaactggaaggctccgggaagtatgacactgcatatttgaagtctctggccagtaaatcagagtacaaatgccgccagggcggggcctatgacgtaagccgcggctccgacgcaagcattgtcatcatctgcaggaaacacgataaagactacgattttaacatgaatgaagctctttcctatgtaatagataataaccctgaaatcgccaagctgatcaaaggttatatgaataagaacatcgattcctcttccggaaccggaaaagcttatgaaaacctgttgaatgccctgggccaggcgggattcaacgcaggccaggcaggcgtcaactcctggtcttttcagggaaaaggaagcagctattacctatactggacaactgaggatatcaccacaaagagccccggtgacaaggtaaaagtcatccgatacaactcagccagaggcacttacactgccggatatgtagctgtaagacgcgaaaccttgtcagcttccgattcctccgacggcaaaccccgtacctataacgtcctttccagaagcgacagtgactgggaggaatatactggtgtgaagcagagcgatgcagacaagaaaaattattcaaagatctatcagatctttaaaaagatgtaagtagacctgagcgttatatatcgatcatatttactccggacaaagaataagggcggcggtccaaaatcgcacggcaaagggcagatacagtttaaaaaactgtacctgccccaatatctttacactgataaatattctatttcttcgactcctcatccctgtcattcttctttttgtccatgctcatacctacagctacacctatacacagacccaaactgattcccatggccagattatgaaatatgcttcctaaggctactccaaaacataaaccaaggctgactcccaatgagatataattcttatctgtttgaccgctgacttctttttcctcatcttcgcccataacatatcctttccaccgttcaattcatttgatagttccatagctttgtattgcttgttgtaattccattgaaaccagcccgatacatagtatctaccatctctttactgtcaataaaccctcctgctatgtagcagcagtctttgatctgcttgaaataatccagaaattctgctgcgtaatatgccgggcgcagctcaatggcatccgctcttgaaagctgtaaactttttgaagcctgttccaaggcaaaagaatccgaaagagtgattcgctggatggtcttcatgccttcatttttgatcattcccagccggatgttctggaatcccattacacagtctacacggtacattttctttaggaactcaaacgcagtcttatcggtccccaatccgccgacgatctcatggttgactatgatttttttattagcatcatgacatttctgagacaaactttgcagatttcctatatgggcgcagttgctcgtcaaaacccactcttcttctgtactcaaagcctctgtaaaatatctcaggctgcgtaccgctggtattacatgaaatttaccatcatcaaacatataactccctctctcatagccttttctatatcatatcatttatttaaaataatttcaggattttttatatcatcatgagttttccctctatggctcctgttccaccggatggccgataaaaataaccagtgccgctgagattaaaaccgccgttccaagacagatcacaaatacaatcggtttattcaccgcaaataggacaaataaccctccatgaggcgccctcattgtcacaccaagcgcaaaagacatggctgatccaatggctgaccccacgcaaaaacaaagaatacgtctcacatctttcgccgcatgggggatcgcaaattcagtgatcatacacaggcatccggcaatacatcccggtatagagcttctgtcttcttttgtaaaataatttttcttcacgagcatcgcaacggccattgccatgggaggggccatagcagctacaaaaactgccgcgatgggaagataatttcctgtctccatacaggccagcgaaaatgcataggctactttattacacggtcctcccatatcaaaagcgatcatggcaccctgtacaagccctaagatgataatattgcctgtcccaagaccgtcgagaaaatgggtcaatgcagtggttaaagctcccagcggtcctcccagcacatagtgcatcagcaggccaatcattccgcatccaagcaatgggatgatcagagtgggcagcaatgattttagtgatctgggcagaggcattttcttcaggccctccactaaacatccggcgataataccacccaccagtgcccctaaaaaccctgaggcatagccgatattccatggatccgttgctatccatccagcatacatccccacacagatccctggtttatcagcgatggaatatgccacaaaggcacccagaacagggaccataagtgtacccaggccgatctggcccagataataaattgtggaagcgaaggttttacaaggccctactgccgtccccacatcgtatcccccaattgcaaaagagatcgctaccaatatgcctcccgctacaacaaaaggaagcatgtaggatacaccagttgtaatggctgacatcactgtggctttgaattctaataaattatctttcaatatttttctccttttctttttatctatcattttcctctgtcatccctgtaaggaagtctttcagcttctcaacaccaatttctacgcttacaaccggagtgtcactggccgttccggcaaggtgcgaggtcagtgttatattttcaagctctaaatatggatgatctgtgggaagcggttcttgatcaaatacatcaatggctgcacccccgatctcacgatcttttaaaacttccacaagtgcactggtatccacaagcccggcccgggctgtattgataaaataggccgttttcttcatcttggcaaattctcgttttcccatgattttttttgtttggtctgataacctcagatgcattgatacaaaatcggacgcttctaacaactggtctagatccaccactttcacaccgtctttttctatcatctccctgctgacaaaaggatcatagaccaagatgtcactatcaaatccttttagttttttcgccaccctggatccgatcgcaccatagcctatcagcccaaccgtacatttgttcatattatggatgtatttttgattcacatatgattttacccatctcccttctttcatatagtgatggctccttgctatgttcttattttcggctatcatcatgcctacagctgcatcagaaacggcatccgcacttctccaggatgtattgatcagcggaattttacgctttgtaagctcattgatatccacattttcaatgcctccgcgaagcacaactgctgctttcagttttggacaagcctccaagacctctttgttgatcgaggtacaatgaacaacaagaatctccttatcaggacaattctccagcagagttttgtaggtcggagccgcctctaaccctttttgttccagcaacaacattcgattggttacatctcccacgtctttcatttcatcatcactgaccatggtaatacgagcaccgaactcctccaattctttcattttactcataacctcttctgtgatgtatccatcatagacgcataatattcttatctctttcatcctgacaacctttctgtaaacgaagtgatttgacgacgtcaaatgatttctttacccattttgtgtgcatagtgcccgcagggcttttttgttccatagagaggttcaaagatctttcctatagaacaaaaaaatgacagaaaattatggctgagccataatcttctgtcatattcaaatctctatacgacaatcatattttgttttaattcaggaattccttatcgttatgttatcacaaagatcttgaatctgtcaacggcagaaccaagtttcatctttgaggctctaatgaaattatcataataatgtatctgctttcgtctttattctatctccttttcttcaagccatagaaaagcgtttttcctatacataataccatagagtatctcttttcctccactttttactttgtcatactttttttgtacatatgactttatccttagtattcaaaaactccaaatattatttttcctctttattgtatcttgttaatctcatctgaaaaacatgctgtagaacccgttatctcactgccgctcacactataatatataaaaccaattgtaattattgttacaacaataatccatttatattttttcattgttttcttcctttttaaaacatcttctcattgaggcaaactttttatttgtgatccgatccataaaagaccatagttgactacttgcgcataaagcactatctacggcttgccactgctcttcacttagattgatgttgtctatttttactgtttttccagatatctctttggcggcctcctcaaatctctgttttttctttctcttttagattcattctcgacaacaaattaataaaatcacacatatgacaaatcccttcttttgattttatatcaaggttattattcaaaagccaacctatatatacaacattgcactcggattttcatacatattcaatatacgagtataattttacaattgttttatagaataaaagagaggaactttatatgatcaactataaacctctcttcaaaacaatgtcaaaaaaacaaatttcctcctatgctttatttaaaaagacttttccaaatcaacttattattcaatacaacagggaaacagcattagtacaaacacaattgaccagctttgtagattattagagtgccctgtctctgacattcttgaatataaagatgaaaaagaataataagactattcacaatctaagaggtatattcatgatcagctataacccattatttcgtaccatgaaagaaaaaaatataagttcttataaactcttaaaacgcgggttttcgcgttcgacctattatgccataaaacacgggaaaggtatcacgacaaatacaattgaccaattgtgtaagcttcttcaatgtgaagtaccagatatcatagaatatatagaaatcaattaacaatatagagttaaagaaaaaagacagatatagctttttaaagttatatctgtcttcactaatttcatcacatcccatatatgtccgcgaatcccatagaaaaacctcatgaaaaggtatttctacaaatcgtaaggggtcgcctgataaacgtaataaaacatcccaattaatctttcctataggataaaaccgccttgcttcaaagattttcttgtctttctgacaccaattctcttatactgacaccaattaacatctctattaatactattaattttatcttgtgtcaattcatctactgatttaactggattattttgtaatttaataatttctaattcttgaaaatcttctagtacatgaacatataattttgttgtcatatccggtgacgcatgccccagccatctttgaattgtctctgttcttatttctgattcaaaacatctagtggcaaaagtatgtcggaaacaatgtccactaaaatgatcaattcgttctgcagtatccaacattaaatttatttccttaaggacccggtcgattgcatcaatatagatttgagaatttattggagttcctaaagttgttgtaaacaaaaggttctcaaattttttgtcaatttcttttttagtacgcgacattacaactttcttttgtaacatctgctttttcgcataaaatttaaattgatcagtcattggcacatttcgataactggtctttgtttttggtggtccaaaatgaaaagttttctttgtatctccctcgaatttctgatatgacagtgtacgctctacatgaatgatgttgtttttgaaatccaaatttttttcttccaaagcgaaaagctcacctggtctcagtccgctttccacatggcagttaaatgcgttactataaaatgtacccgaagaggcatcaaaaaagattgattgttcttctcttgtgagcactctcacatctctctcttcatcgaaagagatttttatgtttctacaaggattttttttagctaaattatttaatatagctatgttaaacatatcaaacaaaaggattctggctttatttttcatttcaaagctatattcctttttatccattttgttgaggagtttttttatatgaaagtgctccacatcatccaaatacatcgttcctagctctggacttatatgtttaaaaaacatattcttatactgaactatactactgggtcttaacagtccatatttatatacgtccatccataatggaaaccaatcattcagacttttcttttcagcaatgttcattttgtgtcgatcttcatattttgcattttcaaaatcagtttttactttttccagatcatagcctttaatctctggccgctgtccaaaacgatttgtaaaccgggcaacatacctcccatctttcctttgtgtaataccttttcctaattctttaccattcaagtctttacccatatcgcacctcttaaattggcaataaaaaagactttaatataatattttattttatcatactaaaatctttatttgaatgttttatttttactattgtattcttcaaactcttttctttttaccaatcttttttttccaatcgacataaggaatgggcaattgggattttttagtttctccctaataagattttctccaatgtttgaatactttgctgcttcttctactgttaaattcatttttatccaaacaggaatttcaggattttgttctttcatgcaatcccccttatctttttataaattcttatattaaagtagcttaccaatttttatgtatatcattaagcacagtgatctatgctcattaatataaataaaaaatacatgttgtttctggcaagtctggtaaggacttcatatcatttcagatctcctcattcttatgacgagctgcactctatccgtcgtctgcttttacgcagatcgccgctcctctcccggcagggaaagcaactatgcagaagtatcattatccctcagtacagatcatcgcttgatcagcttaccaggcatcccaaagattttccccttatcgctacataccatcaccccctgatgatcacagcgtgaaatatcccgctccccatactggttttgtatcagatacaactattcaattgccaaagtacaaaacaatataatccaaaaaagtgtacttttttaaaacttagcaaatctattgattttttggcgattttgatgtattatatatatagacaacaagtccgaaaaagtacacttttttggat

SEQ ID NO: 7 - DNA, 138580 bp, Anaerostipes rhamnosivorans
atattatatcataaatagtggagaaaaatccaatgtatcagagttctgtttccagtattgtcaagagctgctgttttacggattcttcatccggcccctcaaccgtaatcgataattcgtctccgcatccggcccccagggccatcagatcaatcgggttctgggcggcagcctcatttccattgcaggaaaggagaatggaacagccggtacttctggataaagcgatgatggacacgcatggacgggcgtgaagtccgttatgtgcttcaatcttataagaaagtgtttgcatgagataaaacctccaaatgttacctgattaattttggtattttgatataatcttattactttctatggtaacatattgtgaaagagaaaatccataaaattgtatggatatcacgaatttcataatgaaatgatacgatagctggagggagagctatggagagagagaaaaagaccaacaaagaaagactttttgaacagatcgagaagaaagcaagaggagaaaagcagggagttgatgcctctcggcttgccgaatatctgggcattccaagaaatcttgccagcagcctgctcaatgaattggcagcggaaggaaggatcagaaagattaaaacacggccggttctgttttactgtgatgttttggaaaaagaagaaagagacgaagagaatccatttcatggatttattggttatgacaaaagcctgaaagaccaggtagataaatgccgtctcgccgcaagctatcctaacaggggaatgccggtcatgattctgggacccagcggtgttgggaagagcctgctggcggaatacatatacagatatgcaaaatataaaaatctgatccctgaggacgcaccgtttgttgtcttaaactgtgcggattatgccaacaataaagaactgttgtcatctattttatttggttacaaaaaaggagcgttcaccggcgcctcggaaactacagaaggactgttccaaaaagcagataagggctatttattcctggatgaatttcacaggctgccgccagaaggacaggaaaaactgtttcgttatattgacaaaggggtggtggcgaagattggtgacagcagccaggaatccaaagtggatgtgcgattgatctttgctaccacagaagatattagtacaatgctggacacctttatacgaagagtcccggtgatgatcgagatccctcctttttcagagagaaccattgaggagcggtttcagatcatctgcagcctgttttcacaggaagcggagacgatggactgtacattccgggttagcagcaatgtaatcaaccagctcttgatgctggatctaaagggcaatatcggaagcctgaaaaatgcagtaaagctgtgctgcgttggcgcattctgcagggaagacggagacatggtgaaagtaagtgtccgggatctgagcgatcattaccgctttgaacggggaaagtcccagatacagtacatcacggaagcagtcgtgatagacaaggattggaaacccaaagagacagccaggttgaaggtagagagggttcaaaacagcttagacttcggtgaagtttggcggcttttgggaagattccagaatcatggtatttctcaggagcgtttccggtccaaagtctataagatgctggaaggtttcactggaggggtaatggacctgagcggtgatgagatgacagagggcatctatcaaggggctattgaaaaaatcttgtattacctgcagaacaactatggcctgcagtataatgggactatggtgactgtattgagtagaaccctgctcttgttcagcagagatttaagttattcggaagaagaggtggaagctcttagaaaaaccgaagagctgatccgaaggcagttgtacagatgttataagatgagtgccatattttatgaaatggccagacagaccattgactatgaggcatgcccacagatgatccgtatttttgttgcattatattttttctgcaggatggatatacaaaatgatctgagcaatgcggtcatagcagcacacggacatgccactgcatccagtattgccagcatggcaaaccggatgtttggacagtatatttttgaggcttttgatatgccgttcgatatagagaaaaaagagattgtaaaaaaggtcaagtcttacttaaagcgggtggacacatccaaagggctcctgctgtttgtggatacaggctcactgctggatattgcaaaggatatccaaaatgaagttgagggtgacctggggattattaataatatcactacccagatggccatggaagcaggggagagaatcctaaggcgggaaggaatccattttatcgtggagcaggttgtcaaaaataatgtgaccaattttacttatatcaaacagagaaaaaaagctgacgctatagtagtatgctgcattacaggcatcggaacggcaatcaagatcagggatatgttaagagagagctttcgggagacggaagtggaagtggctgcctgcgaataccaggagctggtctctaaaaagtcccagtgcggagtatttcacaagtataatgtcttatttgtcatttccactattgagttggagatccaggatgcacatacgctgcttttaaatgatcttgtgacagagaaagggaaacatctgatagaagaagggttaagagaaaagtatccggaaaaggtgataagacaggtgatgacaaacatcattaagggcttcagcatgagaaatatcatcggacagcttacgatcctgaatccggataaaatcatcctggatgtggaggaggcggtggaaaagatagaagcggttcgtaatactgcattttctgtagatctgaaaaaaatgctgtatattcatatctgcatcatggtggaacgattgatcctggaaaaaggaagacttccccagggagatgaatccgtgtttgagaagtgtcacccggatttcataaaaagtgcaaaaaacagcctatctgtcattgaatccaaatataatgtgtcagtaaacctgagggaactaaaattaatttacgaattgattactggaaaaagcggaggtcctgcatagaattgcagggcttctttttttatgtcctatttagttggcacagcgtttgctatatagagttatataaacttattacagccacatgcaaaaggaggactgagatgataggaatggtcatagcggcacacgggggattcgggaaagagcttctgaacagtgtatcactggttgtcggacctgtttcggattgcgcttcatggtccctgaatcccggggataacattgagaggacaggacttaaactacaagaacttttagaaacactggataaaggggaaggaggaatcgtttttacagatatctggggaggtacaccggctaatctggcgctgaaatactccagaaacaaaaagatcaaagtaatctccggagcaagcctgccgatgttactggaatttatggacatacgagaggaactgggacttcaggaaactgcagtccgctgcgtagaagcagcaagaaaagggtccgtcatcattagtgacctgtttaatgaaaggaggaaggaaaatggctgaggttcagatcgcaagaattgattatcgcctgatacatgggcaggtggtgacaaaatggatgaaggcttacccggcaaaacgaatcgtcatcgtggattcagagctggctcaggatgattttatggcggatatttatatgatggccgcgccggcaggtacaaaagtagatgtagtggaaacagaacgggcggcaagttttctgaaaaatatcaaaggaagcgtatttttattatttaaaaatgtggaatcctgttatcaggctttttttgacggagtgtcgtttccaaaactggtagtgggagggattcccacggatgcggggaaggtactggtttacagcagtatttatatgagctcgtctgaatacgaaaaactggaacagatcagcggagccgggatcgaggttatcttacagtcaacgccggatgactcccatgcagagctgtcaaagattaaagaaaaactataagaaggaggattcatatggacgtacaaacgattgcaatggctgttgccatgggtttactatactggattgccaacgggtatctgggatataccttttggatctcagtgggtacaccgtttactatgggacttgtggcaggtttgatctacggggatgtggcaactggtattatccttgctggaagcattaaactgatctacctgggggtatttgctccgggcgggcagcttccggctgatgaagggattgccgcagcgtgtgtgattcccatagcattaaagacaggaatggcaccggaagtggctatttcgctggcagtgccggtggggctgttaggggctttcctttataacttaaaaaagattgtcaactgcatgtttgttgtaaaggcagacaaatatgcggaagagggaaatacaaaaggggtctggcgctgtgccagtatctggccgttccttttaagttccctgctattttttctcccagtttttctcgtaaacatctttggagcggatgtagtgaagcctgtcttaaatgccatacctgagtggctgatgcatggactggaagttgcgggaggagtgctgcctgctgtcggatttgcaatgatcatctacatgattggaaaagcaaaatatattccgctgttcctgatcggattctatcttgtgaaaatctcaaatatcaatacgctggttgcgggagtgtttgcggtctgcatcgctgtcacaatgatcgtgatgaagcgggaagtaaaggaggagatagctgatgagtgagaaaataaatataaaagaagcagtggaagtagaaagcagggaagattctgttcttacaaaaaaagacattgacaaggcatacttccgctggtggctgacagcggagatcagcgccaattacgagagaatgcagggacttgcgtatggggccagcatgattcctgttttagaaaaattgtatccaaaaaaagaagaactctcagaagcattaaaaaggcatcttgctttttttaacacggaggccacttggggaagcatgatctttggcagcgctattgccatggaggaggagagggcaaagcataaggagatgccgggagagatgatcaccagttataagaccggactgatgggaccggtagctggaatcggagataccgtggatctggctacaatttttactttggtaagtgcgttctgctgcagcttcgcggtaaaaggaagtctggctgctccgatcatcatgtttctgttaggcacagcaatgtatgtggagggccttatttttcacagacttggttataagatgggacgatcctctgtcaaaaatattatgtcctcaggcaccttaaaggatgtgataaacggtgcaaatatgatcggtatgtttatgatgggtgcactgtcagcaggattagtcagtctgtccactgtagcaaagaccaaatcttttaatctacaggagactttagattctatcgcaccgggtatactgcctcttcttgtgatattcctggcatattacggactgaagggcagaaagatgtctgcgccgaagattgttattcttatcatcctcatatgtgttgtaggatccttagtgaaagtcttataagaaagaagagggggcggtagtatcagtttgatcagctgtaatttttattccagagcactgaaacgcagtacacggttttttgcagctttgccaaaagaaacagtcaggggaaagctacaggtgctctatctgcttcacgggggaggagatgatgagaccaagtggatccgcagggttccgattgaaaggatcttctccggatgcaaggtcctggtcattatgccagacggaggtctcagttactatacagacacggtctgtggagaacattactggacctatttaagccaggaactgccggaagtggtgaaaacctattttaacgtgtctgaaaaaagagaagatacatttgcggcggggctgtccatgggtggatacggggcaatgaagctggcgctgctcaaaccggagaattttgcaaaagcagcgtccttttctgggagccttgatatggtgagggagatcaaggttgttttgtccgacacaaaagaacgaaaagagtttctcggtgattatgaaatggatgaaaccttttatacatctatcttcggaaacctggatcgggtaaagggaagtcctgcagatatatattatctattagaacagcatagagggaatattgaaatccttccagaaatatatcagtgttgcggtacggaagattttctttatggatttaacctgatctttcgggataagttaaaggaaatgggagccagggctgtatttgagcaatggagcggaggccatgactgggtgttttgggaggaggctctccggcgtgcggtgcggtggttttcatttaaaaaagagtatatactttgttaggagggatgagtttggcattcatactctgcgatttttattcaaaagccatgggcaaagataccgggatagatatgatctttcctgaatatggacaaatcggtgaggacaagataaggctttgtcttctgctgcatggccagggacaagatgcctctttctggatcaggcgtacagatattgagcagaccgccggggagcagaatctggcagttgtcatgccgcaggtggcggaaagtttttttactccgataccaaatgaaaaaaacttcacgagattcctgagggaagaacttccggattttttaatacagacattcccatttttatctgaagacgcaaaagaccatctgatcgttggaaacgggaagaacagtatggggaaaatccgggagaccgtggaagctggatgttctttttatgacagcgggaaatgcctgccctgtgattttaagagtgaggaccttagggatctgttgtctcaatggcagacctgcgcggataaagaggaaaatccggaaggtagttgacatttaaaaaaacctatactaaaataaacacaaacaaaaatttttaaaataaaacgttgacagagacagtacttatgctgtaaaagcagagagcgagtcagggacggtgggagcctgatgcaagtagcacataaggaatatcactcttgagttgcaagctgaacaaagtaagctgtgccggcatcctccgttatcaggataacatatgatagtatgtgaaataggtggtatagaatcaacaagtgttgtcctattttaggacagcacttttttttattccatagggaagttatccctatggaataaaaaacgctccgcgaggatcgcactgcggcggtaaggatttatgtcgccaatgcgacccgccgcaggcggagaatcccgcttgcgggattctttcttgttccataggaaagttctccttatggaataaaaaagtcctacgggcgttatgcacacaaatgcgtaaggaaatcatcaataataaaaggagaaataagcgatgtacaaaaaagtatcttccgacttgaattttgttgaccgcgaaaaacagacagtagagttctggaaagaacacaagatctttgaaaagagtatagaagaaagaaaaggggacgacacctacaccttttatgacggacctcccacggccaacggaaagcctcatatcggacatgttctgacacgtgttattaaggatatgatcccccgctaccagacaatgaaggggcataagatcatccggaaagccggatgggatacccatggtctgccggtagagctggaagtggagaaaaagcttgggctggacggaaaagaacagattgaggaatacggtctggctccgtttatcaaagaatgtaaggaaagtgtctggaagtataagggtatgtgggaagatttctcaggtgtggtaggcttctgggcagacatggacgacccatatgtcacttaccacaacgactatattgagtctgtctggtgggcgttaaaacagatctgggacaaagggcttctttataaaggatataaaatcgtgccttactgcccacgctgcggaactccgctttcctcccatgaagtagcacagggatacaaagatgtcaaagagaagtcagccatcgcaagattcaaagtaaaagaggaagaggcctacatcctggcatggacaacaacaccatggacccttccctctaacgtggctctctgtgtgaatccaaatgaaacctatgtaaaagtagaaaatgacggatacacttattatctcgcagaagcattgtgcgacactgttctcgaaggagaatataaggtattagagacatacaaagggactgatctggaacacaaggaatatgagccgttgttcccgttcgtcacaccaaaagaaaaagcatattatgtgacctgcgacacctatgtaacactgaccgacggtaccggagtggtgcacattgcccctgcgtttggtgaggacgatgcccaggtgggaagaaaatacggactgccgtttgtacagcttgtggacgaaaaaggtgagatgacaaaagaaactccttgggccggtaccttctgcaaagatgcagataaactgatccttaaggatctggaagagagagggcttttatttgccgctcttgattttgagcacagttaccctcactgctggagatgtgatactccgctgatttactacgcaagagaatcctggttcatcaagatgacggatgtgaaagaccagctgatcaaaaacaacaataccgtcaactggattccggagaacattggaaaaggacgtttcggagattggctggaaaacgtccaagactggggtatttccagaaaccgttactggggaacaccattaaatgtctgggagtgtgagtgcggacaccagcatgccatcggttctattgaagaattaaagagtatgtctgacaattgtccggatgacattgaactccaccgcccgtatattgatgacgtgactgtcaagtgtccagagtgcggaaaagaaatgcaccgggtggaagaagtcatcgactgctggtttgattcaggatctatgccgtttgcgcagtggcactatccatttgagaacaaagatgtctttgaggagaacttccctgcggactttatctcagaggcggtggatcagacaagaggatggttctattctctcctggcaatctcaaccctgctgtttgacaaagctccttataaaaatgtcatcgtgctgggccatgtccaggatgagaatggacagaagatgtccaagtccaaaggcaatgcagttgatcctatggaagctttaaaggaacacggcgcggacgccatccgctggtacttctacacaaacagtgcaccgtggcttccgaacagattccactccaaagctgtgacagaaggccagagaaagtttatgggaactctgtggaacacctatgcattctacgttttatatgcggagatcgaccagtttgacccgacaaaatacagcttggattatgacaagcttccggttatggaccgctggctcttatccaaattaaactctttggtgaagaccgtggatgaaaacctgggcgcttacagaatcccggaagccgcaagggctctccaggaatttgtcgatgagatgagcaactggtatgtgagacgctgccgtgagagattctgggcaaaaggaatggagcaggataagatcaatgcctatatgacactctatacagcactgaccaccgtctgcaagactgcggctccgatgattccgtttatgacagaagagatttaccagaaccttgtaaaaagcgtagatgctcaggctcctgagagcattcatctgtgcgacttcccgtccgtggatgaaagtatgtatgacaaagagctggaagaaaacatggacgctgtcctgaagatcgttgttcttgggcgcgcgtgcagaaacagtgccagcatcaagaaccgtcagccgattggtcagatgtacgtgaaggctccggccgagcttccagatttttatcaggaaatcatccgggaagaattgaacgtgaaaaccatcgagtttactgaggatgtttcaaactttaccacttataactttaaacctcagttaaagactgtgggaccaaagtatggaaaactgctgaacggtatccgcaagcatctgacggaactggatggaaacaaggccaaagcagagttggattccaagggagcgttaaactttaccgtggatggtatgcctgtggagcttgcagaggaagacctgctcattgaaatggtgaaacaggaaggctttgtgacagaggcagacaatgaatttacggtagtgctggatacaaatctgacagaggaacttctggaagaaggtttcatccgtgagatcatcagcaaagtacagtctatgagaaaagaagcaggctttgaagtcatggataagattacgatctcctatgaaggaaatgaaaaggtaagcggcctgatctccaaaaataaagatacgattatgggagatgtgctggccacaggcattgtgtcaggagctgtggcaggctttacaaaagactggaacatcaacggagaaaaagtgactctcggagtggagaaaaacgaagtttaacatcttgccgtgtacggcaaagaccttttatgagcggggaggatgcacatggacgccgattttgtaaacctgatcccggagaatcttgacagtgagcatttatgctgcatcatccgcagccggaaaccccatccaggggttgaggcaaagcggcaatggctgtcagaacggctgggggaaggacatgttttccgcaaattaaatgaaaaagctgtggtttttatcgaatatgctccccttgaaactgcctgggttcccataactggagacaattattattatctctactgcttatgggcttccggcagccataaaggaaaaggatacgggaaagccctgatggagtattgtctggacgatgccaggaagaaggggaaatccggcgtctgtatgctgggagcgaaacggcagaaagcctggctttctgaccagtcatttgcgaagaagtatggttttgaggctgtggactcaacggatcaagggtatgaactgcttgccctttcctttgacggaacagtgccggagtttacagagagtgccaaaaagcaggtaattgaaaacaaagaactgactatctattatgacatgcagtgcccctttgtttatcagaccgccaagacggtgaagcagtattgtgaggccaatgacgtacctgtctctttcatccaagtggacactctgcaaaaggcaaaggaactgccctgcgtttttaataactgggctgtattttataaaggaaaatttgagacggtcaatctgatcgatgccggctggttaaagagactgctcaaaaaataataacagggttccggcatcctgaaaaaagggaggtacacagcatttgtgtgtctcccttgttcatttattttcattgtctccagttgacattatgtccactcatcgaaagttatttaccactatttccgtcgcgcttttgaaatgcgctcctccaatagtggtaaataactttcatggagcagccccttttgtcttgcaacagccatctccagcagacattacgtccattttcaccagttcggaggttttgctgaaagttagaaaatcttacgtccctgagacagcaagccggagaactggtgaaaatgtcatactttctgtctgtcttgaataaaataataagacggacaggaaggaggattttaatgagaaataaattgtcctaccttttctttttgctgtttctgttctgcagtgtcccatatctgctgacagtggtgctttcaggaaaagaagaaacaaaacctgtggattttcagacccacagcagcggctatacagtgacggtgaacgggaaagccatggatttggagacatatctgctgggtgtcctgcccacacagatctctatggataatgaaaaggaaactctaaaagcccaggccgtgatcctgagaacagatatcatgcggagaatggacggcagaaaagatgtcagccaggattcactgccatatagatatgaggaagacaaaaatctggaggaaaagctgggaaagcaaaaatataagatcacagaccagtcaaggaagcaggcagtgggtgagacgaccggagaagtcattacctgtgagggcaagtacatacagccgtatttccacggcatcagcgtggggaccacgctcagtgccaaggagtggtttgggaaagatatctcttatctccaggaaaaagacagcttaaaggatgtggaatctccggagtatatgacagggattcctgtgacatataagcaggttgtgactcagttagaaaaagaaaaaaagatcaagctgacagtggaggaggccaaaaagtccatcaggatcaaagaaaaaacaggaaacggatatgtgaagcaggtgcagatcgggaaatatgtcatgtccggagaagcctgggccaaatgttttcagctgaattccaccaatttctatctggagccgtatgacggaaaactcagaatggttgcgctgggaaaaggtcttggattgggaatgtcccaatacggggcaaacgagcttgcgaaggatcaaaaaagctataaaaaaatattaaaatattattacacaggaattcagatcacaaaattgtccgatcagtgaataaagcctcagaattcggtaaaactatccctgaggtgatgaaaatgaaaggacataaccgggacgtctcttccccattaaagaaatactatgcggtgatgctggtaggactggccctttttatcgggatcatgacatattacagcatagaatttaaaaataaaagagacttagcaaagcagcaggtagacttgaacaaagattctgtcggtgtcaataacggagccaccgagggaaccacagaagcaacaacaaccgaagcgacagaggcagagactgagaaaaccacagagacaatgagccagaatacggtatcatatgatggaaagacaaagctcgcctggccgctgacaggaaacgttttaatgccttacagcgtggattccacaatctattttgaatccctggaccagtaccgggtaaataaaggaatcatgatcgaggcaaaagagggaatggcagtcaaagccccaaaaagcgcaaaagtcgaagaaatccgtaagacagaagaatttggacagactgtactccttgatttaggagacggctacacagctctctatggacagctgaaagacctggctgtgaaagagggggattcggttacaaagaaccagatcctcggcaaagtagcggctcctacagactgcttcacattggaaggtgccaacgtgtacctgcagatggaaaaagacaagaagacaattaatccaaccagttatttagaatagtggaacaaagatctgaaaatatcgtatactatataagaagcaaaaataacagtcaatgttttttctactttactttgctttttcgagtatcttacttttcacatctttggctgctgtagaagaaaggctgccgcttcggcagctttttcttcgaataaaatacgaagggatataccaatgaagtgctatacatatgttttaaagtgcagtgacgggagtctctacacaggatggaccaatgacattaaaaaacgtctgaaagcccacaatgagggcagaggcgccaagtacacaagaggccggacaccggcagagcttgtgtacttggaggaatttgatacaaaagaggcggccatgagaagagaagccgccataaagaaaatgagccgggcagagaaactgaaactgcccggcttaaaagtgtaatattcttaaacaaagaacatcatgatcagatggcatgcgctgccgcccatgacgaacaggtgaaagatctcgtgcagtccaaagtttttccagtggttttcaaaccaggagagcttcagcgcgtagatgatgccgcccacggtgtagatgatgccaccggcaagaaggaggccgaagcacagggcagacagcttgtggaacagcggagcaatggctatgacacaaaaccagcccatggcgatgtacataacggatgacacccacttgggacaagtcacccagaacatcttaaaaataattcccaggatagcgatgatccagatggctgtgagaagcccgtatccaatcctgccgcccagtacgatggtgcagatcggggtgtaggagcccgcgatcaagataaagatcatggcatggtccagcttttttaatatcttcatcacatgctccgaagaataaatggagtggtaagttgtgctggccgcatacagacccgccatactcagtacaaaaattgtcagagaggcaatacggacagtattatgggtgggaatgctgttgatgatcaaggggatccctgcaacaatggacaaaaccattccgataaagtgtgtgatagcgcttccgggatctttcagtctaaacttcataatgtaaacctccgatatatacttgggtcataaaatattatatgtagtaatcaaaactatattcgatgtatttatatactactactacactatgtccatttcaaggacttttcttatatttataaaatgttaagattttatttgacatatgtcattaatgtggtatgattataagtgacatatgtcaagaatagttcggtaaaggagggaatggatgccaagaccaagaaaatgcagacgagtctgcgcaatgccggagaaccaagggcttgagccgctgggaggccgggagaactgctgcgggagcaggatcgtgatgagtattgacgaatatgaagccattagactcattgattgggaaaagcttacgcaggagcagtgtgcagtgcagatggggattgccaggacaaccgtcacaggtatctacgaatgcgccaggaccaaacttgcggacgctcttgttcacggaaaggttttaaagatacaggggggagattacaccctgtgttctgaaaataaaaaagaatgcagcagacactgctgtaaaaaagaaaaggagaaataacatgaaagttgcagtaacttatgaaaacggagatatttttcagcattttggccacacagagcagtttaaaatttatgagacggcagacggaacagtaaagaacagtgaaattgtatctacaaatggaagcggacacggtgctttgtctggatttctaaaagaacacggagcggataccttgatctgcggaggcatcggcggcggagcacaggaagccctgaaagaggcaggaatcactttttacggaggagtttccggtgatgcggaccaggcagtggaagatctgctcaaaggctgtcttgcttatgacgaaaatgttatgtgcagccaccacggagaagaacatcaacatggaagctgcggggaacacggctgcggccgtcattaattgtcgagagacaatcgcatagtcttcttgacgttgaataggaaaatatgttatagtggataacgttgttgctctggattgtcagcatgcctgacaacccggagcattatttttgattgaaagagaaagatacagaggaatttatggacgcagtaagatttgatgaattaaacattgacgataaaatattaaaagcagtaaaagagatggggtttgaagcagcctcaccgatccagggagcagcgatccctgtggtccttgagggtagagatattgtaggtcaggcacagaccggaacaggaaaaacagcagcctttggtatcccgcttttagagaagctggatccgaaactgaaaaagccgcaggccatgatcttgtgccctacaagggaattggcgatccaggtagcagatgagatcaggaaactggcgaaatttatgtcaggggcaaaagtgctcccgatttatggaggacagaatatcaccaaccagatccgttctttaaaaacaggagcgaatattatagtaggaacgccgggccgtatcatggaccatatgcgccgccataccttaaaattagaagatttaaaaatgatcgttctggatgaagcggacgaaatgctgaacatgggattcagggaagatatagagagtatcctggtagaagtgccggaagaacgccagacactgttgttctccgctaccatgccaaaggcaatcctggatattacgaaaaagtaccagaagaattccaagctgatcaaagttgtgcgcaaggaattgaccgtaccaaacattgaacagttttattatgaagtcaggccaaaacaaaaagtagaagttctctgccgtctgttggatatgcattctccgaagctctccatcgtattctgcaatacaaagcgtatggtagatgaagtgacaggggagttgaaaggccgtggatactttgcggaaggacttcacggagatttaaaacagagccagagagaccgcgtcatgaagagtttcaggggcggacgtgtggatatcctcgtggcaaccgatgtggcggccagagggattgatgtggacaatgtggatgcagtctttaactatgaccttcctcaggacgatgagttttatgtacaccggattggaagaaccgggcgtgcgggaagaacaggaaatgcatttacctttgtggcaggaaaagaaatctataagttgagagatgtacagcgatactgtaaaacaaagatcaaggcaagaccgatcccaagtttaaatgatgtccaggcaaccagagcagaaaagactctggaagagatcacggggctgattgaagaaaataatctggacaaatatgtggatatgctggatgaattcatcaatgagacagattacactgcattagagattgccgcggcattcttgaaaaagcagatttctgagaatgaagaagaagtccgtcagggagatgattttggggacaccggcgccgaagaaggaatggtgagattattcatcaatatcggtaaaaagaaaggtgtccgtccgggagacattctcggagccatcgcaggagaatccagtatttccggagatttggtaggagccatcgatgtccatgaccaatatacctttgtggaagtgccgaaagaagtcgcaaaagacgtactgtatggcatgagccatgctaagatcaaaggaaagagtgtcagcatggaaccggcaaatagaaaataaacaaaaagcactatgtcagaattttttctgcatagtgcttttttctattgacaatgtacatatggtattctatactaaaaacagtaacaattattattatgagaggaggagacctatgcagccggcaacaaaaaaaagcaagcagagggatgctatcatcagatttttaatgggcagaaaagaccatccgactgcggatacgatatatgttaatattaaagaagaatttccgaacatcagcttaggtacggtttaccgcaacctggcactgctgtcaagccggggtgatatcttaaagctgagttatgacggcggggcagacaggtacgatgccaacgttgatccgcactatcattttatatgtaaagagtgcggggaagttatcgaccttgagatggatcccatcgatcatgtgaatacgatcgcaagtgcccacttcaaaggtcgtgtagacgagaatgtcacttacttccgtggaatctgtgaaaaatgtttaaaaaaagatattgacaatacaaaatagcggtggtattattaagacaacaagaaaacagtaacagttactattatctgaactcgctttcttgaatagagtagaaacagtaaaataaataaattaaaaggagatcattattatgaagaaatgggtttgtacagtatgcggatatgttcacgagggagaaacagcaccagagaaatgtccaacatgcggagttcctgcagagaagttcaaagagcagacaggagacagagaatgggcagctgagcatgtagtcggagtggcacagggagccagcgaagacatcatggcagacttaagagcaaactttgaaggagaatgttctgaagtaggtatgtaccttgcaatgagccgtgtggcacatagagaaggatatccggagatcggattatactgggaaaaagcagcattagaggaagcagagcatgcagcaaagtttgctgaactgcttggagaagtattaacagacagcacaaagaaaaaccttgagatgagagttgacgcagaaaatggagcaacagcaggtaagtttgaccttgccaagagagcaaaggcagcgaacttagatgcgattcatgacactgtacatgaaatggcaagggatgaagcccgccacggaaaagcttttgaaggtttattaaagagatatttcggttaagaataaattataaaaggagactgcctcatcgcagtctcctttttagtgcgtcatagaagcttaaggctccaggatattttttaccacatctgcatcgcttaagtagaccatctttgatcctttcagctgcacatagtagttttctttgtccttatcttttgagccgatataaagggtgagatttttggttttctttgaatccgtatccttataggtgatatccaccgagatgcgggatttgctgtcaagcccatacttggacagctctttgtctttcactgaataattctggcagtctccgaaggtgaataccccaagacccccggcgatattgtccatatcagtttttgatttggatgtgtaggtctttttcttgccactgccagttattacgacctttttcagatttccgctgcttaaggacgggaaagtatcggttttcatcatatccttaagggagtaggataggttggagagcagatcagcggataccgtataaatctctgatttatcatctagggtcagataatagttgtccccagaagcatttccaatgtaatacgtcgttttggttccctctttatcctttaccttaatggtatatgctggcttttccaggccgtagtctttcaggctgtccccattcttgagcctgcgcactgccgttatcttttgaaactgggatgccatggtgtttagatagctctgttccagcggatatgcgctgtctttttcatagtaccaggtcccgtccttttttacaaaagacagatcctgtccgttgttgtaggagatggacgtgatggccttcatattctttacagtcaattgtccagaagaaatttttctcgctgattggtttttctggtaaaaggtgattccggcatacagggctaaaagccctgcaaataccagaatcaggatcatcaatgtttttttctgtctcatagtggttccctcctttaccttcttctgcgcctgaaccagattacaaagcctccggcgatgaccacaaaaggaatcacaaagatgatcaggatactgaaaatacccggatgggcgatggtgttatatgttacctgaagactctttggcgagatggatatattgtcagcattgtccaggttagctgtgacggaattcataaataacgtaaggttttcaagtgtcgagaaggactgtgtgacctgttcgtcaatgagcatattgctgccgaagactgtcagccggctctcctttttttccttcttgccgctgctgtttttgacagtgaccgattccgtggaagccgcgccaagtatataggttccctgtgtctgttttttctcggtgacggcataaccgctgtcagaagtggtcataaaggactctacactgatcgtatcgcgcgctgggtctgtctgtgtcataccttttgagttgatcataagcacggaatttgatgaaataccggaggccatatcgtcgctcacagataaattcggtatgagataataataatttccctgatagcagcggtctccgtctgcgatatatccgtttgcaacttttagcccataatcttcaaggagtccgttgaggcggggcatcttcttatttgtataagtcagaagcgtcatgaccttcccacccttttttagataagaagacaacactttggcctcatccttcgtcagatcactggtcggtccgttgaggatcagaagatcgcagtccttaggtatggaagaggcagtcaggagattcagttctgacgtagagatcctggatttttccatcaggctggtaacggaggaggagagagcggcctccccgtgtccggaagtgtaataggccttatattcctttgtgttggtcacataattcacagcactggtcaactgtccgtctccgtcaaactgggtagcagaagtggacgtattataataggaagattcagtgactagaatatcgtcgaaagagatcgaagtctgccggcctgttttctcgcaggatacgacaatgctgttcttttccgtatcatattttgtcagtgcggaagggtgcagtacggggtcgatccattccattttcaaatggccggagagagacacgtatttgctgatgaatgttttgatgcggtcgtcagtgctgcttttctccgcgatcacataaaaggttacatcgttctccagattctttattagtttttggcttttggatgagatctcatagatattggtatcactgatatcaatctgccgaatcttttggggcagctggcccacaagaaggttaaacaggattacgataccaatgactacggcagtgacggcaacactgtaggagccctttctggaatcctttgtctgaaacaatttttttattttttccaattcaattcccccccccctaactccatcgtcttttctgaaatgtctgtatggtcaagaaaacaaaaagaatgatgatggagagatagtataaaagccctccgatatcaaaaatgtaattctgggcaaaattatagaaaacgtcggtcaggacaaaatgctccagtatgtcatggatcagattttcaaagatggatgattttataaaatataccgcgatggttatggccactccggcgatctccacagtaccggcgatcacctgattctttgttatatgaaagattaggccggcggccagtgtcaatacaatgatgaggacgatgacactgcttaaggcgctggtggggacatagtttaaaaggttttccagcatatatagaaaaaacaaaaccccgcatgtgctgatcgccgcaatgaccggactctcagtcagagaggataaaaacatgccgatcccgataaacacacagcccagaaggtaaaatgccaggatggaagtatagtccaccagtagatgggcatttccctgtaacttaatgatcaatggaaacaggcagtagatcagacatgggatagcgaagacggtgatcatcgcaaagtatttgcccaggatgatcttgggcagggatacaggggaggtaagcagaagctgatctgttttattttttcgctcttcggcgaagcatttcatagacagcaccgggattgtaatcaaaatagcaaatataacaccggacagagaataagcaaaatagggatatccgctgcttaagttatataccatgaaatacacaccgccgatgatggtgagaaatgccacaaaggcacacccgatcatagaggtaaaataggaacggagttcccgcttataaattgctttcatcttcgatctctccttcctgatcatcactatctgtatcggttaactcaaggaagatgtcttccaaagttgttttggaaatataaatcctggtgaccggtatctgttccgctgcaaaggccatggaaatatcctggcagatcttctggctgtcttctgacagttccaataccagatcacaggaatcaccggtatgtcctttccaggagatattttggataccggggatggtatccagcacggattgtatccgggaaggatctgacatgactgtgagttcaatgttgtctttcccgcgggacatatgttccagctgagcaggggttccctcggcggccagccgtccttttgagataatgagcacgtaatcacagatctcctggacctccgccaggatatgggaacttaagatcactgtatgatccttggccagtgtacggatcagctgccggatctcgatgatctgttttggatccagtcccacggttggttcatccaggatgatgatatcaggaaaaccgagaactgcggcggcaagaccggtcctctggcggtatcctttggacaggttgcggatcagacgatgtgagacttcgttgagttttacgaggctgcacacctcatcgacttccgactcccggtctttttttggaatatcttttagttcagaaacaaagcttaaatactcccggaccgtcatatccagatagagcggtggaatttccggaagatatccgatggattttttggctttttccggttcctcgaggatgtcacatccatttatgaggatttctccgctgtcagcaccgatatatccagtcataatattcattgtggtcgactttccagcaccgtttgggccaagaaaaccatagatctgacctttctcaattgtaaatgacagatcatccaatgccagatggctgccatacttctttgtaagatgtttcacttctatcaatttgttacctccttttgtctaactctatttagaataagggagaaacctaaacataatgtgatgaaagtttgacaattttgtgttcttcttttatccgaaggtctgttgcaggtctttttttttatttccatttctggtataatcttagaaaataatttctatgtgacctgcattgtgtgaaaaggggcgatgactatgagagtaaaaggcgtcagactttacggggtaaaggacatcaggatggaagagtttgaacttccagagatcaaagaggatgagattcttctcaagattctctgcaatggaattgccatgtctacattgaaagagatcacacttgcccaaaggcatctgcgggtaccgaaaaatatccggaagtatccgatcctgatcgggcacgagttcgccggcatcattgaacaggtgggggataagtggaaggagcagtatcatccgggagataagtatgtagttgttcctgagattccggaccagatcgagtccccggggtattcctatgagtactttggcggggcagccacttactgtattgtcccgggggatgtgatcgagaagggatgcctgctcaattttgatggagaaagcttttttgaggccacagtggcacaggcactgtacagcattgtgggaagtttccattccaattatcacagcaagccgggctcccatgaacacatctccggtatcaagccgggcggcaacactgtgattctgggcggatgcggacccatggggctgatggcagtacgttatgtgctgactatggaacaaaagccaaaacggctggtagtgacagacattaacgatgagaggattgctaaggccaggaggttgatcccggtgcaggaggcacagagaaatggagtggagctttattacataaacccgtccatgatggtggaccctgcctccgcactgctggccctgaccaatgaaaagggctacgatgacgtgtttgtctatgcgccgcccaagaatgtggcggagactggaaacaggatcatggccatggacggctgcatgaatatctatgcggccacggcggacaaaaagtaccgggcaggcatgaatatctatggcagccattatctgaagacaaagctgatcgggtcctccgggggactcagaaccgatatggaggaggcccttcaactgcttcgtgacaagaagatcaatgcggccatgaatatcacacacatcggcggccttgatgcggtggtggacaccactctgtatttaaagaaaatgccaggggagaaaaagatcatctacacacatatcaccatgccgctgacagccattgaggatttcaggaagctggggaaagatgatcccctgtttgagcatctggcggacgcatgcgatgaggccgggggattctggaataagaaagcggaagatatcctgcttggcagccatatggcccaggattagaaaaacggattttttcaccgttatttcctaataacttccttgcatatttgtatgtgagttagtataatataggagtgaatttacttgacaagttcgggtataaataggtatactttgataatcaaactattatgaggtatgaaggagattaaattatgttagagaaaatgaaggaaatcattgcagaacagttaagcgttgatgaaagtgaaattgcgttagagacatctttcaaagatgacttaggagctgactccctggacttatttgaattagtaatggcattagaagaagagtacgatgtagagattccgtctgacgacctgacagagcttaatactgtcgaagatgtaatcaactacttaaagaataaaggcgtagaagattaagattgacaaaatattggcttataactgattttttgaggttataagtcaattttttagaaacagatattttgaaactcaaagtaattgacgaggtgataacgatgggtaaaattgtttttatgtttcctgggcagggagcacagtatgtcggtatgggacaagagttctatgagtattttgaacacagcagagaagtatttgaaaaagcaaatgaagtgttggatattgatgtgaaagcattgtgcttcgaggaaaatgaagacatcaacatcacggaatacacacaggcggccatggtgacagccagtgttgctatccttaacgagattgaagccatgggcataaaaccagatatgacggcaggattaagtcttggagaatactgtgcccttgttgccagcaaagtcatgagctttgaggatgcggtcaaggttgtccgccagagaggaatccttatgcaggacacggttcctgccggagagggtgctatggcagctgttcttggcatgaagaaagaagagattgaggccgtactacctaaagtggacggagttgtctccatcgccaactacaactgtccgggccagatcgtcatctccggagaggcagcggcggtagaggcagcggcggcagcccttaaagaagcgggggccaaacgggtgcttccgttaaaggtcagcggtccatttcactctgccatgcttaagccggccggtgagaaactgctggaagtcctaaaagatgtggaggttcatgacccgcagatcccatatgtatcaaataccactgcggaatttgttacttccggggaccaggtaaaagacctgctgggaaaacaggtttattcttctgtccgttgggaacaatctatagagaaaatgatacaagccggagcagatacttttatcgagatcggcccgggaagaaccttatccggatttatgagaaagatcgaccggaagatgaaggtggtcaatatagagaaattagaagatttgaaaaagcttgaggaggtcttatgatgttagaaggaaaagtagctgttgtcacgggtgcaagccgtggaattggccgtgaagtggcgctgacgcttgcaggatacggggcaaaagtcatcgtcaactactgcggatctaaagaaaaagctgaggaagtggtggcaatgatcgctgcagacggcggagaagccaaagcgtaccagggagatgtttcagattttgacacagcaaaggaaatgatggcttctgtgaaaaaggaatttggagccatcgatattctggtaaacaatgcaggcatcacaaaagacaatcttgccatgaaaatgagcgaggaagagtttgaccaggtcatcaacatcaatttaaaagggacctttaactgtatgaagcatgtggcaagaatcatgcttaagcagaaatcaggacatatcatcaacatgtcttctgtctcaggggtgatcggaaatgcagggcagatgaactattgtgcttctaaagcgggagtgatcggtatgaccaaatctctggccagagagctgggttccagagggatcacggtcaacgcagtggcacctggatacatagatacagagatgacggaagtactttcagaggatgtaaaaaaaggtatccttgatacgatcccgttaaaaagagtgggaagtacaaaggacatcgcagagactgtagcatttttagcatctgacaaggcgtcctatattactggacagacaatcagtgtagacggcggaatgggaatgtaaaggagagcagcatgaagaatttaaagagagttgtagtaaccggcatgggcgctatcactccgatcggaaatagtgtagaagagttctgggacggaattaagaatcagaagatcgggtttgccccgatcactcatttcgatgccagcgaatacaaaacccatctggcagcggaagtaaaggactttaaagcaaaggattacatggatccgcgatctgcgaggagaatggaacttttctcccagtacgctgtggccgcggctaaggaagccatcgagaattccggtcttgatctggaaaaagaagatacggcaaggatcggtgtgtctgtcggctctggtacaggaagcttacagattgtagaaaaaagtacagaagtgatccgcacaaagggacctaacagggttaaacctctggtcgtccctatgatgatctccaatatggcagcgggaaatgtatccctggcctttggcttaagaggcaagagcatcaacgtggtcactgcatgtgccacaggaacacagtctatcggagaagcttaccgctctattcagatcggtgaggcggatgtcatggtggcaggaggaaccgaggcctgtatcacaccggtagcggtagcgggctttgcatctctgacagcgcttagcggatctgaagatccagaacgtgcctctatcccatttgataaagagagagatggatttattatcggagagggagccggagttgttgtgctggagacattggagcatgccaaagcaaggggagccaagatccttgcggaggtggtcggatacggcgctaccagcgacgcattccatatcacatcccctgcagaggacggagaaggcgctgcgagagctatgcagtttgctatcgaggaggctgagatcagtccagatcaagtggattacattaacgcccacggaacaagtacaccggccaatgataagtttgagacaaaagcgatcaagacaaccttcggcgatcacgccaaagatctaaagatcagttccacaaaatctatgattggacacggccttggtgcggcgggagccattgaatttatcacctgtgtaaagactgttttggaagactatattcatccgaccgtaggacttaaagtgccggatgaagaatgtgatctggactatacattagagccggtcacagaccgtacagttaattatgtcctgagcaattcgctcggattcggaggacataatgcaacgcttctgatcaaaaagttcgtggaatagggaggataggtaatgaaattagaggaaatgaaagaactgatccaggcattgtcagattctgatgtagataagtttgaatataaagacgacgatttctcagtgaagctgtcaaagaatgagacaaaagtcatcgctgcgccggagtttgcagcaccgccggtacctgcagctgccgcactgccgcaggcagcacccgagtctgttcctgtaaaagaagaggtagagggaaacgcagtgaccgcacctttggttggaaccttctattcagcgccttcagaaggagctgagccgtttgtgcaggtaggtgatacggtgaaaaagggccagatcgtcgggatcgttgaggccatgaagctgatgaatgaagtggagagtgagtttgacggaacggttgtcagcatccctgtaaacaacggggacattgtagaatacggggaaccgctggtcatcatccggtaagaaaggggtaacatatgctgaatataaaagaaatcatggagattattcctcacagaagccctttcctgctggtggaccgcatcgaagagatggaagtcggcaagagagctgtagggaaaaaatgtgtgacatataatgagcccttttttgcaggtcattttcctcaggagccggtgatgccgggagtgctcatcatcgaggctctggcgcaggtaggagccgtgtgcacgctctctgcggaagaaaataaaggaaagatcgggttcctgggcggagtgaacaaagcaaaatttcgcgggaaagttgtacccggagacgtgcttaccctggagattgagatgatcaaggtgaaaggaccggtaggtgtcggaaaaggaaccgcgacggtagacggaaaagtcgtcgcgtccggagaaatcacatttatgatcggctaggaggaagcgtcttatgtttaagaagattttaattgcaaacagaggagaaattgcggtacgcattatccgggcctgccgtgagatggatattttatctgtggcgatctgttctgaggcggataaggatgccttacatgcacagctggcagacgagacggtctgtatcggacctgcggcggcaaaggacagctatctagatatggagcgggtgatcggagctgccatggcagtgggagcagatgcgatccatcctggattcggttttttatcggaaaacagcaagtttgtgcgcatgtgcgaaaaatgcaatatttcatttattggaccttccgcagacatcatcgacaagatgggagacaaatccgcagccagaaagacgatgatggaagcggatgtccctgtggtgccaggaacgaaggacgcggtttatgaagctttggagggcaggaagatcgccgatgagatgggatatcctgtcatgatcaaggcctctgccggaggcggcggaaaaggaatgaggatctgtgaagcctccgaagagtttgagcatacatttgaaacggcaaagagggaagcggaaaatgctttcggcgacggcaccatgtatattgaaaaatatatccgtgacccgagacatattgaatttcagatcttagcggacaaatacggcaatgtgatccatctgggtgagagggactgttctattcagaggcgtcatcagaaactgatcgaggagtcgccgtcaccggcgatcaacaaagaactcagggagaagatgggcgccattgcggtcaaggccgcaaaagcagccggatactacagtgccggtaccattgagttcctgaaggaccaggacggaaacttctattttattgagatgaacacaaggatacaggtagaacatccggtcacggagtgggtaacaggaatcgacttgatccgggaacagatccggattgcggcgggaaggcacttaacctatcagcagaaggatatccacattgccgggcatgccattgaggtcagagtcaacgctgaggacacagaacatgatttcaggcctagtcccggagtagtgacaaacgtgcattttccgggaggaaagggtgtgcgcattgattctgccctgtttacaggataccagattccaccgttttatgattcaatggttgccaaactgatcgtctatgataagaacaggaagctggctcttagaaaacttaagaatgctttgggcgagttggtgctggaaggcatcaagacaaacattgattatcagtatgatatcatcaaccaccaggatttcatcgaggggaatgttgataccggatttattgaaaggttccagaaggaacgggaagaagagaaagaaagccaaggtgaagcatcatgttaaaagaaatgtttaagaaaagaacattgacacctcaggagaaaaagcaggcggaacgggtaaaaaaggccaaagataccctgcttgaataccaggcgccggaaggactgtttcaaaaatgcagcgactgcggaaagccagtctataatgaagatattattgaaaactactatatctgtccccattgcggaaattatttcaggatccgcccgaggaccagggttgccatggtcctggaccgcaatacttttgaggaatgggataccgggcttactacatccgatcctctggagttccctggatatttaaagaagctggagcaccagaagtctgtgacaaacctggaagaggcagttatcacaggaaaaggaaagatcgctgggaacgaagtggccattgctgtcatgagcgctgattttatgatgggcagcatgggccaggttgtcggagaaaagattacaagggccatcgagagagccactgaggaacggattcctatcattattttcacctgctcaggaggagccagaatgcaggaggggatcatttccctgatgcagatggagaagacttctgcggctttaaggagacacgatcaggcagggcttctgtacatcagcgttttgacggatccaaccaccggaggagtgactgcgagcttcgcaatgctcggggatgtgatcctggctgagccgggggcactgatcggatttgcgggaccgcgtgtcattgaacagaccatcggacagaagcttccggatggtttccagagatccgaatttttgctggaacatggatttgtagacaagatcgtagagcggaaaaatctgcggaaagtgcttgccaccattataaggagttgttgttatgagtcataataatttaacaccatgggagagagttgagatctccaggtcagcggagcggccgaccagcctggactacatcacaacgatctttgaccgatatatgtctctgcatggggaccgcctatttggtgatgacggcgctatcgtgggaggacttgcctccatcgacgggatgccggtcacggtggtcggacagcagaagggccgttctacaaaggaaaatattaagaggaatttcggaatgccttctccggaaggatacagaaagaccatgcgtcttatgcgccaggcagaaaaatttcaccgtccgatcatctgttttgtggacactccgggagctttctgcgggattgaagcagaggaaggcggcatcggggaggcgattgccagaaacctctatgagatgtcatctttaaaagttccgatcctctccatcatgatcggggaaggcggcagcggcggagccatcgctatggctgtaggaaatgaagtgtggagtatggaaaattccacgtactctgtgctctcgccggaaggattcgcaagcatcctctggaaggatggaagcagggcatccgaggcggcaaaagtgatgaagatcacggcagcagatttaaaggaactgggtatcattgaaaaagtcatcaaagagccggaacctgcaagtattgacaatatcattgagctgtcagaagaaatgagggaaatgatcactgatttcctcaaacgatataagaaaaagacgccggatgagattgtagaagagagataccagcgctttagaaaaatgtaagtgaaagaaagaccacggaggtaatggaagtgaaaccattaaaaatcggggatttagttgcaaaaatccctattatacagggaggaatgggcgtaggtgtcagtttaagttctcttgcgggggctgttgcaaaagagggcggtatcggggtactgtccgcagctcagattggatatgatgagcctgactttgaaaaggacccagaaggggccaacatgcgcgccatgaaaaaacatattaaaaaagctagagagatcgctcccaacggaatcattggcattaacattatggtggctaccaggctgtatgccaactatgtcaaagaagctatagctaatgggattgatctgatcatctcaggcgcaggccttccgacagaattgcctgctttggcaaaagggagcaagacaaagcttgttcctatagtttcacccaaaaaatctgcccgggtgatccttaagatgtgggacaaaaagcaccagacagcaccggatgctcttctgatcgaagggccgaaagccggaggccatctgggattcaaatacgaggaacttgtaaacgatgagacttatgaaaactatgacgatacgatccaggagatcatcgacatggtaaagccttacgaagaaaagtatgagaaggagatcccggtcattgtagcgggaggcatttcttccaaagaagacatggaacactgtctatctatgggggcttctggtgtgcagatcgccactccgtttgtcaccacggaagagtgtgacgcgcatataaagtacaaagaggcttatatcaattgcaaaaaagaagatatcaccattgttaagagcccggtgggaatgccggggcgtgccattaagaataaattcatggacatggtccagagagaaggcaggatcaagccgaagcactgcttcaactgtatgtctgcctgcaatccggctgagactgtttactgcatcacggaacggctgatcgaggcggtaaaaggaaacattgatgacggattgatcttctgtggggctgacgcctggaagtgcaataagatcacaacagtaaaggacgtaattggaagttatttaagatgagaagagagagagaaaaagaaaaacgttatctgtggatcttcataggcatagctgtgttgatacatttaatcctccagagcgattttggggatgacttaatctttggagcacagctggaacacaaagctgtcctgccgtggctggtccacaggtatcacagcctgtcttccagattcttggttgagatctccatggcggcggcgcttaaaatgccggttctgctctggaaggctttagatatcttggtctgtatcctgctgggtgcaggactgaattatctgctggacaacaaggggaagtgtgcaattttcaccgcagcgctgctctgtgtatatccatttatgcatatgggttctgcaggatggagagttaccacagccaattatctctggcctttggccgcagggatcggctgtcttgtgctgtttaaaaagttcctggaacaaaagaaactgtcagtggctgagtatgtgctctatatggccggcatactttacgcggcgaacctggaacagatggctattgtgctcgcaggcagtctctgtctgctgatcttctgtttcagagatcataaaagagctgtggtttttcttgcggcaggacttatcgctgtcattgggaacctggtatttattttgagcaatccgggcaattctgtccgagtggcaaaagagatccacgacaaaatgccggaatttattcgtctgacatttattgacaagctgagacttggatttgtgtcaatcttccaacattttaccgtggtgccaaacttcatcctgtttatctttagtcttctgcttattcttcttgctgttgacaagaagttccggggatggaagtttgccgcagcactggtccctatggggcttgatatcatctacagcttgtattttcttgttgatatcgtcaagaatcggtcagtggaatacacggaaccgcgggttctcccggaaaatgcagctcagtgggggttccagatccttatgggcgttgcttttctgatctttatcgtatgtgtgatctttgtctgtatagaaggacttaaggacagtagggaccggatgcttgtgatatcagggtttttgatcggaggagctaccagaatggccctggcttttaccccgaccatgtttgcgtccagcactaggacgtatctgtttttatatatggcattcatacttggatcggcggtcatctataaaaggattgagaaggtccgttttagctggctcctgaatgcagccattgtttttggggttctcatgaatctgggaggtatcgttatgctccagatgaaatattaaaaattcatagtaatctaaaatctccgcagaaggatcgtttgtcctctgcggagattttttagtttttgcatctcaaaatttgcatagcgagaggtcagctcaatgaaagttcccagcgctgctatcagttttatgatatcaataccgattctgtctatgtatgatgaagcagtgataatatacttacaccagaaccacatcagtcatttcctgtatgttgcgcagcacgtccccgggaatatctccgtcgatgatcaaatggtcgatatcatgccagcttgtgtactggatcagggaagatgcttcggccttggagctgtctgcgatcaccacattggttctggcgttcggtataatggcctgttttgtctgggcatcctgaaagtctgatacagcgggacctttgtgctgttcaaaaccgttggtacctaagaatgcaatgtcaaccttcagtgagttaatcagactggtagcctggaagccctcggctgccatgctgtttggattcagcatgccgccggtaagaatcaccttattgttgctgtgaaccaaggcataagcagcctccagtgaagtggtcacaatggtgtagccggatttcttgctcagcattcctgccaggcagaagatggtgcttccggagtccaggaaaatcacattgccatcctcgatgaactccatggcccgttcgcacagcttttctttcagcgggaccttctccctgaccctggactcccacggcagaggttttagttcatagacagaagtggccccgccgtggcttttctttaccgctcctatttcatttagatgtagtaaatcccgccggatcgtttctctggatacctggaactgtttcgcaagctggctgatctttacgctcccattgctgtttagcagccttatgatttctttttggcgttctgccgcgattaatttgcccatgctgtgtctcctttgtagatcaaactataataagttttcttacttgaactattttagaaatagtttacatcattttgattatgaagtcaaatttatacaacacaaaaaactgcaaaactgcaaaaaaagcaaaatatcatgttgacattgttgggatgtgaatctataatgaaagcataaagcaacaaaaagccacaattaaaaaacatattgccacatgtcaaggaaaaggagaatatcatggaagcagtcaatttaaagataatcacggatgaactgtcaaagttttcagggatggtcaaagaagaagaaatccagggtctggcagatgagatcaagaaagcaaacaagatcttcctggcaggagcaggtcgttcgggactggcagcaagaggatttaccaaccgtttattacatatgggatttgacgtgcattttgtaggagagatctcttgtccgccgatcaaagaaggagacctgatcgtcctcggatctggctcaggaacaacgcagagtctgatcgtcatgggtgaaaaggcaaagaaggttggagcaagaatcgctactgtgactatgtttcctacacataccatcggacagatggcagatgtgatcgtgacagtgcctggatctactccgaagaaagcagaaggagaaaagaatctggcagaatccaatcagccaatgggaaatctgtttgagcagatgagctggctgacctatgacagcattatcatgaatcttatgagcgacctgggacagacaagcgaagagatgatgggaagacatacaaatttagaataggaatctaaaaaggaggaagaacattgcagagatttgtaaataatccggattacattgtagaggatatggtcaaaggctttctgaaggcccatgacgatttgattgttaaaaatgaaaaaaatgaccgcgttgtccaatataaaaacgctccggtagaaggcaaagtcggcttggtcaccggaggcggaagcggacatgagcctgcgttccttggatacgtaggagaaaatatgatggatgcggtagctgtgggagaggtattttcttctccgtctgcccaggcattttatgacgcgttcatggcagcggactctggaaaaggtgttgcctgcctgttcggaaactatgccggcgacaatatgaatgtaaaaatggccatacgcaaagcaaagaaacagggagtcactgtaaaatatgtgacagcaacggacgatgtggcatcttctccgaaagagacaaaagaaaaacgccacggaatcgcaggtggtgtcttcatgtggaaggttggaggcgctaaggcggctaagggagcagacctggacgaagtcatcgctacagcgcaaaaggcagtggacaacacgagaagtatctgtgtgggactgagcccgtgtgcaatcccggcagtgggccatccgaactttgacatcaaagagggggatatggaatttggtatcggccatcacggtgagccagggatcaatgtccagaaactaaaaccagccaaggaaattgccaatgatatggcaaaagcagtcattgatgacctggagcctgctgacggtgatgaagtggcagtgcttttgtccggattgggagctacaccgatcatggaactgtatgtgctctacgatgagattgaagcatacctgaaagagcaggggctttccatatataaagtactgatcggtgactatgtgacctcacttgatatgaatggtgcggctcttactgtgatgaagctggatgaggagttaaaagagctgcttgactatgatgccaaagcgccaggtttaaaataaatttattgacaatgttaatcatttaggaaaggaatccaattatgaaattacagttagcattagacgaaatgccgttagtagacgccttgagatttgcagataaggtagcagagcacgttgatatcattgagatcggaactccatttgttatggatgagggaatgcgcggagtgcgtgagttccaccgtttcttccccgacaaagaaatccttgcggacttaaaaatcatggacggaggatatcttgaggcaagctatgcgtatgaagctggggcagcttacgcaacgatccttggagtgtctgacaacctgacaattgaaggagctttgaaggctgccagagattttgaaaggaagcttgtggtagacatgatctgcgtagaagatctcccaagcaggatcgcaaagatggaagagatcggcgttgacatcctggcagtacataccggagctgaccagcaggcagcgggaagagaaccgattgaggatctcaaagttatgacagaaaatgcaaaaaaggcacagatcgccgtagccggaggaatcaatagtaaaactattgacaaatatgtagcattaaaaccggagattatcatcgtaggttctgctattggtcatgcagaggatcctgtagcggaagcaaaagcaatcaaagacgcaatgttgtaaaataatataaaagtgatgaggtgagaacgatgactagttttaaaaatgccgaagcaggtttgatcgttgaccagctgatcaagactatccaggaacagagagattatctgagtgagattgacggtaagatcggggatggggaccacggtattaacatgaataaaggctttacaatgtgtgaagaaaagttaagccatatgacatataatctgagtgaagctttgtcaacccttggtgagacattgttagacgacatcggaggttctatgggaccgctgtacggcatgctgtttgatgaaatggccatggcctgcgaagacgcagaagatatagacgcagaagtcttcggtgagatgctggtcaatgcggtagagggtatccaggagatcagtccggcaaaagtcggagataaatcactgattgataccctggtccctgccaaggaagcctttatcgcggcaaaagaagaaggaaaagaatttgtacagtgtctggaagcaatgaatgatgcggccgaaaagggatggcagtcaacaaaggatcttgtggcaaagatcggccgggcaagccggctgggagagcgctccagaggtgttctggacgcaggtgccaccagctgttacttcattgtgacgggtatcggaaaagcagcaatcgggctgctcaaataaatttgcctgaaatatacaatgtgagagattgagggatttcttaactaggaaaggctgtcattccggagataccggcggacagccttttgtagtagaaagcaaatgtatttcctctgggttatgctataatattagtataagaaactaaaaatacaatcaatctggaggtgttgcatatgtggggttggagaaaacggtggaccgcctgcctgatggcctgtttgatcgcagcaggaactatgggcagcggcacggtaaaaagcgcagcggcagaacagacaaaagatgaagaggagagacaatacaatctttctgagttaaaggttagtgggtatccgaattggcagattgcaaatgcggtgacggatgagtttgccccagtgtatgagccgtcctatcataccaacgatagaatggtaaaacttcaagtaaaagacagtggaatgctgaatgtagaaatcacaccatggagcgacgaaaaagcagtttctgtggctgctgtgtatgatggcagcaaaaagtttataacaaatacatggaaagatggcgacagacaaatatacagaaaaacatatgtgaaggagggggacatcttttatgtaaaactccctcaaagcaagaagtcctatacaattaaggcagctgttctttacaatgcaaagaaaatcaagtcagggccagatgagacaacgattttaggtgagggaggaaaatgttacagaacctttcagctaagaaagaaaagtattgtaacatttgcatatggctgtctgattcccgatgcggggaatgtttctgcttatgttcaaaaaaagacaggaacaaaatggaagagaaccggggcaaaaatgaagctggcttttagcgggaaagaatttacatacggtcttcggaagggaaaataccgtcttgtatttcagatgcctaaaacgcaggcacttatttttgattacgatacgcagggatcattttacaatggtaagtatggaatcaaaaagtcttcggccaaggacttaaagaaggtggagggctataaagcgtacatggcagatcagatgttcacagacaagacagagaaggctagatggtaccgctataaaaagaaggcgaagaagaaacaggagttatacctgtatagtgcgggaaacagtgggaaagtaaagtttacgatttatagacgtggaagaaagaagacgtggaaaaagataagccttcataatgcatcaaagaaatataaacttcccaaagggaaaggaacttattatataaaagtcagcaaaagcagcaagaagatgaatggttcatatgaaatgattgcggaataatcggtgttttttttaaaggaggaagacggatgataccaacaagaaggctgagtaatgggattgaaatgccgtatttgggattcggaacatggaagcttaagggggaagaatgctcccgtctggtagagtatgcattgaaaacaggctatacggccattgatacagcgcaggtttatgtaaacgaggaggcagtgggagagggtatccgccgctccggaaagaaaagagatgagttctttgtcacatccaaggtcagaaaccgtttccagggttatgatcatactctctatgcagtagaagcgtctcttaaaaggtttggtctggagcagctggacttgtttttagtccactggccaggagaagatatgtatgttccaacatggaaggccctggtccgcatgtatgaggaagggctgcttcgcgcagtgggcgccagtaactttttccctgagcacttagaggtgtgcgcccaggagacaggaattatgcctatggtaaatcaaattgagctgcatccatatcttcaacagcatgagatattggattattgtagtgagcatgatatttttccagttgcatggagtcctctgatggcgggaggagagagccggaaggatgcaaagacggtaaaacaggaggatattgcagaacctgtagaaaaccctatgaaggacccggtgatcgttcagattgctaagaaccataaaaagacaccggcccaggtgatccttcattggcatgtgcagaacggattcggtgtggtaccgaagtcctcaaatgaggaacgaatccggcagaacatggagatttttgattttgaactttctgatgaagaaatgaagcagatgcagaagcttacggacagacagtaccgtgtaggagacgatccgaggacttaccgttttccgctgctggatgagatgattgcagcgggaaatgaaccagagagagacaggttcgggaattacatgtaagaaaacgagaaaagaaggacgggtgtaccgtccttctgataattgcagagatatgagtctgttttatataatgtgtattagtttagctttttacaatccctgcctaacaagctacttaaatttatagtattttactgtataattctgatccatataattcataccttttgaggaaatattccaagtacatatgaccttaatatttttggcgagatatcttttttgggagccatttcgcttacaacggatgacatctacaagaaagccttttttgagcgtttttttatagtttgaataatataaagtttttccgcggaccgtataatttgcacatttggaaattgttttaactttatcattttttgtgaataaaaacctaagaggctgtccgccataggcgtctcctgaatatgggtctaaatataggtaattgccagagcgcgttgtcgaagtgacattctttgcaagctgttttatttttttgttttcataacattagaccacccttccttacttcttataattatacgattttttgggtgattatccaagttattaattgtaaaactacagacaatgataaattgcatacctcaaatagatatgctacatttattctagataaaagtagtcaaaccaaaaagaaaaattagaaataggaacaaaatatatggatatcattgatactagtggaataaagaaaatagtatttgaagagatcagagatctggcagaagattacggcgttaaaaaggttattttattcggctcccgtgcccgtggggattactacgagaaaagtgacattgatctggcagtgtgcggcggagacacaaatcggtttacacttgcagtggatgaggagacttctactctgttgatgtatgatgtagtggatttgggcctgccggttcaacaggaattgaaagataagatctttgaagaaggggtagtgatctatgaaaaagtttgaaaacttctgcagggcggcagagaatctggaagatatatataaatataaagagccatatgacaacgttgttctcactggtttggtaggactctatgagatttgttttgaacagtcgtggaaagcaatcgaagaagttctatatgaaaatggaatcaaagaagcggctacaggttcgccacgcagtattataaaactggcttacagtgtagcactgataaaggatcaagaggtgtggctggaggcgctggtctccagaaataatgttgctcatgcatacaattatgctatcgccatggacattgtcaagaagacaaaagagaagcatgttgatatgtttggtgaactgagagaagaaatgaaagaaaactggatttagatgtatttcttctatattatataagtaaaagaaaaaactttgaccaatttagaaactttacagccaggtattccaaaaaaaacaaaaaaagccttgcaataccttggatattcgtatataatcaaatcgttgtgaccttgatagcggtgaagcgtgaggttgctgtaccggcaaaagccggcgcaggttttccgtggagcgaatgtcaagttgttaaaactggcgacaagtcactgtacgaatattacaatctatttttataatataaagatagagacgcagtgtgtaaatcttacgatacacacggaggagtgtacagtcaccacttgtcgtgctacaagaaatttatagtgcgaaaaggaggcggctttttttatggcagcaagtcaagtaatgagaattacattaaaagcgtatgatcatcaattaatcgatgcatcagcaaagagtatcatcgaaacagtgaagaaaacaggatctaaggtgagcggaccggtaccgatgccgacaaagaaggaagtagttaccatcatccgtgccgtacacaagtacaaagattccagagagcagttcgagcagagaactcacaagagattgattgacatcatcacaccaacacagaagacagtcgatgcgttatctaaattagaagtaccggctggtgtttacatcgatattaagatgaaaaccaaataggaagttatcccgcagggttatgaacaaataaggaatccccttaagctttcatagcgtctaggatgattttaacgtcaagcgttataatccgctgtagattaaataggaggaaatatcaatgaaaaaagcgattttaacaacaaaagtcggaatgactcagatctttaatgaagacggagttttaacaccggttactgtactgcaggctgggccttgtgtcgttactcaggtaaagacagaagaaaatgatggctacgaagcagttcaggttggatttgcagacaagaaagaaaaagctgcgaacaaaccggaaaagggacacttcgacaaagcaggtgttacaccgaaaaaattcgtgagagaattcagatttgaaaatgcttctgaatacactgtaggtcaggaaatcaaagctgacattttcgaagcaggagataaaatcgatgcaactgctacatccaaaggtaaaggatatgcaggtggtatcaaacgtcacggtttaagtactggtcctaagacacatggttctaagtatcaccgtcatgcaggttccaatggtatggcttctgatcctagcaaagttttcaaaggaaagaaaatgccaggacagatgggttctgaaagagttaccatccagaatcttgaagtagtaaaggttgatgcagaaaaaaacattattttggtaaagggtgctgtaccaggacctaagaaatctttagtaatgttaaaagaatcagtgaaggcgtaggcctagggaaggaggacaaacagatggcagaagtatctgtgttaaacatggaaggaaatgaagttgagaaattaaatcttaacgacagcatcttcggtgttgaaataaatgagcatttagtgcatttggcagttgtaagccagttagcaaataaccgtcagggtacacagagcgcgaagacacgttcagaagtacgcggcggcggaagaaaaccttggagacagaaaggtaccggtcatgcaagacagggatctatcagagctccacagtggacaggcggaggagttgtatttgctccgaaaccaagagaatattctaagaagttaaataagaaagaaagaagattagcgttaaaatctgctttaacttccagagtgaatgaaaataagttcatcgtagtagatgagttcaaatttgaagatgtaaagacaaagaatgttgcaaacatgttaaacaacttaaatgtaaaaaaagcattggttatcatgggagataagaacgacaacttaatcttatccgcaagaaacattcctggagtaaaaactgcccttacaagcacaatcaatgtgtatgatatcttaaagtatgataccgttgttgtttccaaagaagcagtagcaaatatcgaggaggtgtacgcataatggcagacatcaaatattatgacgttatcttaaagccgattgtaactgaaaaaagtatgaatgcaatggcagaaaaaaaatacactttcttagttcatccatctgcaacaaaatctcagatcaaagaagcagtggaaaaaatgttcgagggaacaaaggttgcaaaagtcaacacaatgaactacgacggaaaaacaaaaagacgtggaatgacttttggtaagaccgctaagacaaagaaagcgatcgtacagttgacagaagaaagcgcagatattgagatcttcgaggggctataagactcagcgaaaatgagtgcagcgaagtttgagcgctaagtcgggccccgttcggaggaacttaatgagggcaagccgaaggcgcagtgcgaatttagtgaaccgaacttccttagccgttaccgagactcagtgaagccgagccgcaggcgaaagctgaacgctagtcgagtgtaactaccttatatatcttatgaagctatacgcaacaaaagcgtgatattaaattggaattgaaaggagaaagacatgggaatcaagacatataacccatatacaccttccagaagacatatgaccgggttagattttacagaagtgactaagaccactcctgaaaaatctctgacaacttctttaaagaagacagccggacgtaataatcagggtaaaattacagtaagacaccgcggaggcggagtcagaagaaaatatagaatcatcgacttcaagagaagaaaagatggtattccggcaaccgtaacagccatcgaatacgatccgaacagaacagcaaacatcgcattattgacttatgcagatggtgaaaaagcttatattatcgcaccgaacaaattagctgtaggcgctacagttatgaacggtccggatgctgaaatcaaagttggaaactgcttacctatggcaaacattccggttggtacagaaatccacaacattgagatgtatcctggaaaaggcggacagttagttcgttccgcaggtaactccgctcagcttatggcgaaagaaggaaagtatgcaacccttcgtcttccgtcaggagagatgagaatggtacctgttgtgtgcagagctaccatcggccaggttggaaacatcgaacatgacctcgtaaacatcggtaaagcgggacgtaaacgccatatgggattccgtcctacagtccgcggttctgttatgaaccctaatgaccatccgcacggtggtggtgaaggaaagactggaatcggccgtccgggtccgtgtacaccttggggtaaaccggcacttggtttgaagacacgtaagaaacataaacagtctaacaagatgatcattagaagaagagacggtaaaaacgttaaatagtttaaggaggtaacttatggctcgctcactgaaaaaaggaccatttgcggatgcaagcttattgaaaaaagttgatgcaatgaacgaagctggagacaaaaatgtcattaagacatggtcccgccgttccacaattttcccttcctttgtagggcatacaatcgctgtacatgacggaagaaagcatgtacctgtatatgtaacagaggatatggtcggacacaagctcggagagtttgttgcgacaagaacattccgtggtcatacaaaagcagagaaaaaatcaggaattagataatagatagaggaatggaaggaggtttcacaatccatggctaagaaatacagcagatctcagtacaaaaaagaaagaaatgcacaaaaagatacgagacctagcgctaccttatccaacgccagagtgtcagttacaaaggcatgtttcgtattggatgcgatcagaggtaagagcgttcaggaagcacttggtatcttgttatataacccaagatatgcatcaagtttaattgaaaaattattaaagtctgcaatcgccaacgcagaaaataataatggaatgaatccggaagacctttatgttgcagaatgttatgcaaacaaaggaccaacaatgaaaagagttaaacctcgggcacagggaagggcatacagaatcgaacaccgtatgagccatatcacagttgtgcttgacgaaagatagaaggaggcaataatgggacagaaagttaatcctcatggtttaagagttggtattatcaaagactgggattccagatggtatgcagaaagcgattttgcagataacctggttgaagatgataagatcagaaaatatgtgaagaaaaaattatacaatgccggaatctccagaatcgaaatcgagagagcttctgacagagtaaaattgattgtttatacagcaaaacctggagtagtgatcggaaaaggcggatctgccattgaagaactcaaaaaagaactccagaagatgacagacaagaagctgctcatcgacgtaaaagaagtaaaaagaccggacaaagacgcacagttagttgcagaaaatatcgcacagcagttagagaaccgtatctctttcagaagagctatgaagtcctgtatgcagagaacgatgagatccggagcacagggaatcaaaacatccgtatccggacgtttaggcggagctgacatggcccgtacagaattctacagcgagggaaccattcctcttcagacactccgtgctgacatcgattatggatttgcagaagcagacacaacttatggtaaagtcggagttaagacttggatctaccatggtgaagttcttccgacgaaagaaaagcaggaagggggaaataaataatgttaatgcctaagagagtaaaacgccgtaaacagttccgcggaagcatgcgcggaaaagctactcgcggtaataagatcacttacggagaattcggtatcgtggcaacagagccggcttggatcagatccaaccagatcgaggcagcccgtgtcgctatgacccgttacatcaagcgtggtggtaaggtttggatcaagattttccctgataagccagtgacagcacagcctgctgaaactcgaatgggtaaaggtaaaggtaacttggaatactgggtagcagttgtaaaaccaggacgtgttatgtttgagatttctggtgtaagcgaagaagtcgcaagagaagctttacgtcttgctgttcataaactacctgtgaagtgtaaaattgtttctcgtgaagctttagaaggcggtgacaacagtgaaaactaaagaatttgtaaaagagttaaataataaatctatcgatgaattaaacaaagagctagtagctgcgaaaaaagaattattcaacttaagattccagaatgcaacaaatcaacttgagaacacaagcagaatcaaagaagttagaagaaacatcgctcgtatccagggagcgattacagcaaaggctaacgcttaaatcgaaaggaggaatttgttgtggaaagaaatttaagaaaaacccgtgtcgggaaagttgtaagcgataaaatggataagacaatcgtagttgcgatcgaagataacgtaaaacatccattatataagaaaatcgtaaagagaacttacaagttaaaagctcatgacgaaaataatgaatgccgtattggagacagagtaaaagttatggaaacaagacctctctctaaggataagagatggagacttgtggaagtagtcgaaaaagcgaaataggattgttccattaggaaaggagaaacagcatgattcaacaggagtcaagacttagagtggctgacaacactggagcaaaagaaatcctttgcatcagagtgttaggtggatccactagaagatatgctaacatcggcgatgttattgtagctacggtcaaagatgcaacaccaggtggcgttgtaaaaaagggtgatgtagtaagagccgttgttgttcgtacgaaaaaaggtgcccgccgtaaagacggatcttatattagatttgatgagaacgctgcagttattatcaaagaggatatgaacccaagaggaactcgtatctttggaccagtggcaagagagctcagagacaaaaaattcatgaagattgtttcattagcaccagaagtattataaggaggaaacactgtgtcaggaattagaattaaaaaaggcgatcttgtgaaagtcatcgctggaaaagataagggtaaagaaggcaaagttgttgcaatcaaccacaagaagaatactgttatcgttgaaggtgctaatatgctcacaaaacatacaaaacctagcgtacagaaccagcagggtggaattgtaacagaggaaggcccgattcatatttccaatgtgatgttcgtgcataacggaaaagctacaaagatcggttacaaagtagaagatggtaaaaaagtccgcgttgccaaagcaagcggagaagtgattgactaataaggagaggaggtttcggacagttgagtagattaaaagaacagtataccggtgaaatcatggatgccatgatgaagaaatttggatataaaaatattatgcaggtaccaaagctcgaaaagatcgtgatcaacatgggcgttggtgaagcaaaagagaataagaagctcttagatgctgctgttgcagatcttgaaatgatctctggacagaaagcgatcgtgaccaaagcaagaaaatctgttgcaaacttcaagttaagagaaggaatgccaatcggatgtaaggttacattaagaggcgaaagaatgtatgagtttgctgatcgtctgatcaacctggcactgcctcgtgtacgtgacttcaggggtgtaagccagaactcttttgatggaagaggaaactacgcattaggaatcaaagaacagttaattttcccggaaattgaatacgataaagtggacaaagtcagaggtatggatgtaattttcgttacaacagccaacacagacgaagaagctcgtgaattattaaccttatttggtatgccgtttaagaaatagttaggagggttcccatggctagaaagtcaatggtattaaagcaacagagaaaacagaagttttcaacaagagaatatagccgttgtaggatttgtggacgtccacatgcttacttaagaaaatacggaatctgcagaatctgcttccgtgagttagcgtacaaaggacagattccaggcgtgaaaaaggccagctggtaagaatagggaaggaggaacaaacaatgacaatgagcgatccgattgcagatatgcttacaagaatccgtaatgcgaatactgcgaaacatgataccgtagaaattcctgcttctaagatgaagacagcgattgctgaaatccttttaaaggaagggttcatcaaagcattcgacatcaaagaagagggtgcatataacaacatcgttatcacattaaagtacggccaggataagagtgaaaagatcatcacaggtcttaagagaatctctaaaccaggacttcgtgtatatgcgaactcagaagaacttcctaaagtattaggcggtcttggagtagctattatttcaacaaacaaaggtgtgctgacagataaagaagcaagaaaagaacacgtaggcggagaagtattagcctttgtttggtaggcattgagcacttggcgaagccgagcgtatgcgaaagctgaggttagtgcgaaagccgttcggaggaacttaatgagggcgagccgcaggcgaagtccgaatttagtgaaccgaacatcattgcttggacgcaactcagaaggcgcagaaatctttgcaacacaattttttaacctgaatttaaattattttaaatctatatactttataataaaacgaattctgaaaacagaaaggaccaggcgtcctttccgacaatttaaggaggtaacctatgtctcgtataggtagattaccaatcgatgttcctcagggagttgaggttaagattgaagaaggaaacaaagtgactgtaaagggtcctaaaggaacactggaaaagaatcttccagtggagatggaaattaaattagaagacaaccagattgtggtatccagaccgaacgacttaaagaagatgaaatccttacacggactcaccagatctttgatcgctaacatggtgactggagtgtctcagggatatgaaaagaagcttgaaatcaacggtgttggttacagagctcagaaaaagggaaaagagattacttttaaccttggtttttcacatccggtagcaatgacagatccagaaggaatcgagactgaaatggatggtcagaatatcattatcgttaaaggtattgataaagaaaaagttggacagtacgctgcggaaatcagagaattaagaaaacctgaaccttacaaaggaaaaggtatcaagtatgctgatgaagttatcagacgtaaagtcggtaagactggtgcgaagtaaaggagtgagataggatgattaaaaaacagtcaagaagcaaagttcgtgtgaaaaaacatttaaagcttcgtaatcatattagcggaacggcccaaaagccgcgtttaagcgtattcagaagcaataatcatatgtacgctcagatcattgatgacaccgttggaactactttagtatcagcatccactttacagaaagacgtaaaagctgatttagagaagacaaacgatgtaaaagcggcagctcacttaggaaaagttcttgctgagagagcaatcgcaaaaggtatctccaccgttgtttttgacagaggcggatttatttatcagggaaaagtaaaagcattagcagacgcagcacgtgaagctggtcttaaattctaacaggaggaaatcaaatgaagcgtacaatgatcgaccctagccagttagagctggaagaaaaagttgtatctatcaaacgtgttaccaaagtagtaaaaggtggacgtaatttcagattcgcagcattagttgtcgttggagataagaacggacacgttggtgcaggattaggaaaagcaatggaaattccagaagcgatccgcaaaggaagagaagcggctgctaagaaattagtagaagtaccgattgacgaaaagggaagtacaccgcatgatttcacaggtaaattcggaagtgcgtctgtattattaaagacatctccggaaggtactggaatcatcgcaggaggtccttcacgtgacgtattggagcttgcaggatacaaaaatatccgttctaagtctttaggttctaacaacaagcagaatgttgttctggcaaccatcgaaggtttaaagaatttaaaaactccagaagaagtagcaaagcttcgcggaaaatctgtagaagagctcttaggttaggaggaacattaaaatggcagataaattaaaaattactttagtaaaatctacaatcggtgccattccaaagcatagaaagacagtggaagctttaggacttaagaagttaaacaagactgttgaaatgcctgataacgcaagtgtcagaggaatgattcatcaggttcagcatttagtaaaagtagaagaaatttaattgtagattaggaggtgcgaaggatggaattatcaaacttacgccctgcagacggatctaagcacagcgataacttcagaagaggtcgcggacatggttcaggaaatggaaaaactgcaggtaaaggacataaaggacagaaagcccgttccggcggaggaacaagaccgggatttgaaggcggacagatgcctttatacagacgtattccaaagagaggcttcacttgcattaactcaaaacagatcattggaatcaacgtatcagcattagaaagatttgaagatggagcagaagtttctgttgataccttaatcgaaacaggaattgtttctaatccgaaagacggagttaaaattttaggcagtggcgaacttacaaagaaacttacagtaaaagcaaatgctttcagtgcaggggcaaaagaaaagatcgaagctcttggaggaaaagccgaggtgatttagtatggcgaatgcattgacaaatgcgtttaaaaacaaagaactaaggaaaaagcttgcgttcacggtaatcgttctgattgtcgtgcgcttcgggtcacaactgccgattccaggaatcgatactgcccaggtgactgcttatttaaagagtactttgggagattcttttaatctcctgaactctttcactggcggatcctttttgcagatgtcagtatttgcgctgagtgttacgccttatatcacatcttccatcatcatgcagctgatgacgatcgccatcccggcattagaagaaatgcaaaaggacggcgaggatggaagaaagaaaatcgcaaagatcacgagatacgtgacggtcgtgctcggactgattgagtctgcaggcatgaccatcggtttcagccgcagtggtgcgctgggagccgatcacacaaacttcacaatcgtgacgatgatcatcgccctgacagcaggtgcgattcttgtcatgtggcttggagagcgtatcacggaaaatggtattggaaacggtatttccatcatcctgttgatcaacatcgtatcaggaatgccgaaagatttttatgcactctataaccagtttatgaaaggaaaacagatcgggccggctcttatcgccggatgtgtgatcgcagctgttgtgctgttcactgtcgtgtttgttatcattctttcagatgctgaacgtcatattccggtgcagtattcaaagaaggttcaaggaagaaaaatggtcggcggccagtcaagccacattcctctgaaagtgaatacagccggagtgattccaatcatctttgcctcatccatcatgcagttcccgctgatcattcagcagctgtttaagtatgagagcaacggatttatgggaaaggttctgcatagtttaagttcatctacatggtttgacgtaaaccatccaaagcggtctctgggactgctggtctacattgttttggttgttatttttgcttatttctatacatcgattacttttaatccgttggagatctcaaataacatgaagaagcagggaggttttgtaccggggatccgtccgggaaaaccgacagtggattatctgaataagatcttaaaatatattatttttataggtgcagctggcttaacaattgtagcagtcattccgtttttctttaacggtgtatttagtgcgcaggtttcttttggagggacttctatcatcatcgtggtaggagttatattagagactattaagcagattaaatctcaattgttagtgcaaaactatactggttttttaaatgactaaatgtgcgataagctgtagggactctacagcttatttgtgcattacataatgtaaggaggattcattatgaaaattattatgttgggggctccaggagcaggaaagggaactcaggcaaagcagattgcagagcagtacagtattccacatatttcaacaggagatattttcagagcgaatattaaaaatggtacggagcttggcaagaaagccaaagagtacatggaccagggactgctggttccagatgaacttgtagtcgatcttgtggttgacaggatcgaaaaagatgactgccaaaaaggcttcatcttagatggattcccaaggacgattcctcaggcagaagcattggattcagcccttgccgcaaaagatatgaaaattgattttgctttggatatcgaggttccagatgagaatatcatcgaccggatgtccggaagacgttcctgcaaggattgtggtgcgatcttccacgtaaaatataatcctccgaaatcagaaggaacctgtgatatatgcagcggtgagctgatcctccgagatgacgacaaagaagagactgtaaagaaaaggctggatgtataccacaaacagaccgcacctttgatttcccattataagagtgcgggcagccttcatgtgattgacggtacaaggcatattgatgtagtatttgatgagatcaaaagcattttagaggcataagataaagatggcagtgacgatcaaatcaaaaagagaaatcgaacgaatgagagaggccggtaagattctggaggagacgcatgaccgtttagccgagattatcaaaccgggaatttctactttagagattgaccaattcggggaaaagatcatacggggatacgggtgtattccttcttttctgaattataatggttatccagcatccatctgtgtatccgtcaatgacgaagtggttcacgggatcccgaaaaagggccggatcttagaagacggagatattgtcagcctggatgcaggagtcatccatcagggataccactctgacgccgcaaggacttatggtgtcggagagatctcagatgaggcagcccgcctgatccggatcacaaaggaaagcttttttgaaggtatgaagtttgccaaagaggggaatcatctatttgatatttccgaggcgatccaaaaacacatcgagagaaacggctattcagtggtgagagatttagtaggacatgggattggaacacatcttcacgaagatcctcagatcccgaactttaagggccggagaaaaggcatgaagttgagggccggtatgaccctggcaatcgagccgatggtcaatgcagggacctgggaagtcgaatggctttctgatgactggactgtagtgacagcagacggaagtcttgctgcccactatgaaaacacaattttaattaccgaagatggttacgaaatattatcattatcaaagtagaaaaaggagtcggaaaaatggcaaagtcagaagcaattgaagtagaaggaatcgtattggaaaaactgccgaacgcgatgttcaaggtagagatcgagggagggcatgtgattttagcacatatcagcggaaagctcagaatgaattacatcaagatccttcctggtgacaaggtaactcttgcactttctccgtatgatctgtcaaaaggaagaattatttggagagataaataagaaaagccttgaaaattaaataacatgatgatataattgaatccgaacgttttgggaaaggagaattacaagtgaaagttagagcatctgtaaaacctatgtgtgaaaaatgcaaggtaattagaagaaaaggatctgtcagagtcatctgtgagaatccgaagcacaaacagagacagggataattactatttcagatagcaaagattcctatctttgttctttgtgtgtgtgtttatattactgtatctaaggtaccatacagtaatactttttttaggcggctgcagtatggaacgtcgttttcatgctgatatttatatagataaaatcgtagtcaggctagagacatatatatcatttcaccgtacgcggatatatggattgcccctgaataacattagaatgaataatttttggaggaagaaaaaacatggctcgtatttcaggtgttgatttaccaagagaaaaacgtgtggagattggacttacctatatctatgggatcggtcttacaagctctaaacgtattttatcagaagcaaatgtaaacccggatactcgtgtacgtgatcttacagacgacgaagttcgcagaatcagcgaagtagtctctgagtcacagacagtagagggagatttaagaagagaaatcgctcttaatattaagagattaaaagaaattggatcttacagagggaaacgccatagacagggacttccttgccgtggacagaagacaaagacaaatgccagaacatgtaaaggtcctaagaaaactgtagcaaataagaagaaataatagaaatgcatgacacaccccgtagggttgtcagatttcttctcagtatttaagtggatatggtttagtataaagaaaggtaaagagttaattatggctaaagttacaaaaaaagcggctaaaaaacgtgtgaaaaagaatgttcagcacggacaggcacacattcagtcatcttttaataatacaatcgttacattaactgatgctcagggaaatgctctttcttgggccagcgcaggtggattaggattcagaggatccaagaaatctactccttatgcggcacagatggctgctgagacagcaacaaaagcagcgttaatacacggtttaaaaacagtggacgttatggtaaaaggaccgggatcaggaagagaagcagcgattcgtgctttatcagcagctggtctggaagttacaagcatcaaagatgtaacaccggtacctcacaacggatgtcgcccaccaaaacgcagaagagtttaattaggaggaatttgaaagatggcaatagatagaactccagtcttaaaaagatgtagatccttaggcctcgatcctgtattcttaggaatcgacaaaaagtctaacagaacctcaacaagaggaaatagaaaaaaaagtgagtacggacttcagcttcgtgaaaaacagaaagcgaagtttatctacggtgtattagaaaaaccgtttagaaattactatgcaaaagcagagaagatgaaaggtcagacaggtgttaaccttatgactcttctggaactgagacttgacaatgtattattccgtctcggatttggaagaacaagaaaagaatgcagacagatcgttgaccacaagcatgtgcttgtaaacggcaaaactgtgaacatcccttcttacaaagtatctgtaggtgatgtgatcgagatcaaagaaaatcacaaaacttctcctagatacaaagaaatcttagaagtcacaggcggaagaatggttccttcttggttagaagcaaatcaggaagcattaagcggaactgttaaggaaattcctacaagagaagaaatcgacgttcctgtaaatgagactctgatcgtcgagttatattctaaataatcgtaataaccctcaacaaattcctaacccagaaggagggcttaaatgtttgaatttgaaaagccaaatattgagattagtgagatttctgaagataaccgctttgggcgttttgtagtcgagccgttagtgcgcggctacggaacgacgctcgggaattctttgagaaggatcatgctctcatccctgccgggcgctgcagtcagtgccgtaaagattaagggtgtactgcatgagttcagttcagtcccgggagtgaaagaggatgtccctgagatcatcatgaatatcaagtccctggcgattaagaataacagttcaacagacgaaccaaaacaggcctttattgaatgctctggaagcggtgtcgtaactgccggtgacatcaaggctgacagtgatatcgagatcttaaatcctgatatggtcatcgctacattaagcggagatgatgcacatctggatatggaacttacgatcacaaagggccgtggttatgtcggtgctgacaaagcagacaaggacggcaattctattgatgagatcgctgtagatgcaatctatacaccggtagaacgtgtgaacttgaaggtggagaacacccgtgtaggacaggtgacagattatgataagcttactttggatgtctttacaaacggaacactttcaccggacgaggcggtcagcctcgctgcaaaagtattgtgcgaacacctgaacctgtttgttgatctctctgagaatgccaagactgctgaagttatggtagaaaaggaagacgacgaaaaagaaaaggttctggagatgagcattgacgaactggaattatccgttcgttcttacaactgcttaaagagagcgggcatcaatacagtagaagaactgaccaacaagacttcagaggatatgatgaaagtccgaaacctgggccgcaagtcattagaagaagttcttgcaaaattaaatgaacttggattggcactgaattcaggggacgagtaaaagatacaaaaagacccgcctaggctgaaggtatgaagtaagcatggcgaaaaatcacaggaggtcattacaatggcaaagtatagaaaattaggaagaacttcttcccagagaaaagcattattgcgttcacaggtaacagatcttttatatagaggaaagatcgttacaacagaggcaaaagcaaaagagatccgcaagatcgctgaaaaactgatcgctatggcagtcagagaaaaagataactttgagacagttactgtcgatgctaaagtggcaaagaaagacagtgatggaaaacgtgtcaaagaagttgtagacggaaagaaagttactgtatatgagacagtaaagaaggagatcacaaaggatatgccttcccgccttcatgcaagaagacagatgttaaaggtattatatccggtgaaagaagttccgacagaacttgcaggaaaaaaagctaacactaagaatgttgatctgacagaaaagttattcaacgagtatgcaccaaagtatgcagacagaaacggtggatacacaaggatcgtcaagatcgcgcagcgtaaaggtgacggtgctttagaagtattaattgaattagtttaagatcagatatataaaaagtagcagaattcgtttctgctacttttttattgtacatattatgaaattaaattatcttttcaaacgtcttgtaagaagtactccggaacagatcagacttcctgagagcaccatgaaaagggatgatagatcatctctgtggtctccagtggacgctgttttcttataggaaacagcgttgctgtgttctggagctgaagtttctttcttagagaccgtggctttggatgaggtactccgcctgcctatggatgtctgcttctgtttggaagtggtcatgttttctccagtagaagaattctcagtattttgttctgttgttgtgtctgaggaatcctgtgtatctttgtaatccagagagtatatagaaaaccggtcagtctcaattgtaaccttgtcaggatcggggtttaagtcttttaaagtgtcagtctcataagtaccgtcttcccgttgatgaagccggattacaaggtattcccggccttccctttggtattcctccggcacgtcaaaggtaagcataagcggggttcccactgtggggattttttcttccgtgccgtccgttactttcaggagattgatatccaggagcatagcctgctgggcggaagtacgcttcagctccttattcagcagatcctctatctttttggagggggaggatacaggctccgattttaaaataatttctacagtacttccgtcggcaatcttttggctatcttcttcagtaaggagttcatcggctatattattttctatagtcatatcgggtacttcgggagtcttatcaacattaattgaaccggaagcagttccaaaggaagcgatgttccaggttgcagattcggaatcagactgatacttaagttttccgttttttaaggtaaaccagttttcttttgcgccggagccattgaaggccacagctgtatctcctacgtccaggccggatgtctttaatgcagtaggctttgtttgagattttggttcaaaggaggatagattcagtgtatgttttatattcaatgtattgaaattagcaattccgtcaaatgaggacgtattatctttgaggatcagttcggagtccgtattggaggatagtgattcccctttcataagaaggcctccccataagaactcaaccttgctctctgagactgtcacggtacttttctcggatgctgcaaggtctttagcgtctgcgtcatcggtttcaccgcccgcgatataatctccgtaatacatggtacctttatactcacatcctttcacattggagagggagattgatgtctgggtgactttggcggacccaccctgacttgacccgcctcctccaatgatcgttcccacaatgctgctgtccttcatggtaacggagcttgaacccttaacatccgcatgggagccggaaccgttggcggaacctcctccgttaaaggcggcagccacgagattgccccattgctcatctaccggggagacagagccggtcacggtcagggagacagagccgtatacatccgcagagcccccgctgtatgaggttccgccggatgtcacataaccataaatattggaacagccggacatgacggcgctgacacttcctgtaacgtcggcacacgcactgttgcttgcattgccggcaccctggaaaatcatcacttcattaccctggccctggaaggccgtagttgtggaacctgcctttgcgcgggccttggcaccgtccgcatacccgcctgcatagacttcacgtatgtcaacgtttttaagcgtacaggaaatcgatccagaaacgtcagcagttgcagaacctgagtcctttgatgtggcagatcctccgccacgcagagagtaggttcgtccggttacgctgaagctgacagagccggtgttggccgaagcgctgtaggaatttgtggtgtatgcatatccgcctccgtaaagatttccgtggtttccagacggcacagatggaatatcaactgtgacagagccagatacattggcgcttgcgctgcctttggaagccatggcataacctcccccgtagactttggaagcgtttacggtaccgcttattgtgatgagaacatttccggtgacatccgcaggaccggtgccgtcagagtaaccaccgccatatacggaggatacctgaacattctgaatgacgatgctgacattggacttcacagttttattctttccgccgccatagattgaaaagccagaggtcaccggagtttcagacagccgggtttgcccttttgagtcaaatacatatgctttgccgtcagagtctttctttattacaataggtgtcccctgagcatacagatttgagccctcgatcagtatacctgaattctcatcggagacagtttttttcgttttctccgtagacctgcccgtggatgtactgccggctgcggtgacagaagacggatcgctttgttccggtaccagctgttctgttgaggatgcttcagtggtctgttccgtctcagacactgcgtcagtggttggagcttgtgtcggcggctgtgtgtttgaagctgcctcttcggtggttttgttctgtgtctctgatactgcggaggcctgagccgcctctttattctcctttgtttcatcggctgcgtaacttagattgccgagtgttgccacaataaatgccaaaagcgtagccgccagcacaatggtgtgtcttttccatctcttcatagtgattcccccttaaatgccccttatgatcttttaattaaacaaaaactacatgctgacgaaaaaaactccggcagaatactgccggagtctattttatctttaaaatatacaacgtaagataaactgcacataaaaagtgcagtataagatccattgatagaactgtcagatcaaatagatcatgatgtcctgtaggtaaaatggagcaaccggctgccataccataacatggtttaggcccttggctttgcgtcaccggatttccccggttttgcccatttataaaggccgctccccgcggttcttgtttatatatccagtatatgatttcgctgccgtaatgtcaatgaatacctattgtttccagtgcattttattgatataatggagcatatgccaaaggagaaaccaatgtcaatattacagattagagatttaattcatcaatatataacatatggggagaaggaagaagagaatcagacagtcaacgctgtggacggagtggatctgacagtggaaaagggtgaattcattgcgatccttggacacaatggatcagggaaatcgtccctggcgaagcacatcaacggactgcttcagcccacatccggtaccgtatatctgaaaggtatggatacgagagatccaaagcagatccttagaatccgccaaagtgcaggtattgtattccagaacccggataaccagattgtcggttctgtggtggaggaggatgtggcctttggcccggagaatatcggggtgcccacaagagacatatggaaacgtgtggcgggagccctggagggagttgggatgacagcctataaaagcgccagccccaaccatttatccgggggacagaaacagcgggtggctattgccggcatcatggctatggagccggagtgtattgtgctggacgagcccacggcgatgctggaccccaaggggagacgggatgtgctgtctctggccagagagcttaatgagcagaaagagatcacgatcattttgattacgcatgatatggaagaagtcctgatggctgataaggtgtttgttatggatcagggaaaggtagtcatgaacggaacaccgaaggaagtctttgcccatgtgaagcagctcaaggaatacggattggaagtgccgtttgcctcagagcttgcctatgagctcaagaaggaaggaatcaggctttctgatacgataacgacaagggaagaactggtggaagagttatgtcaattagtttagaaaaagtaagttatatatatgaagataattccgatttaaaaaagcctgccctgattgatgtggatctagagatcggagagggagaatttattgggattatcggccataccggatcggggaagtctaccctgatccagcatctgaacggcttgatggaacctacaaagggacatgtctattttgagggggagaatatccatgcccaggactatgatatcaaaagcctccgcggccaggtgggtctctgcttccagtacccggagcatcagctgtttgagacgaccatactggaggacgtgtgtttcggtcctatgaactttggggcttccaaagaagaggcgctgcaggctgcaaaagaggcgctcagagatgtgggagtggcagaagagctgtttgagaagtctcctttcgagctttccggagggcagaagagaagagctgccattgccggtatcctggctatgaagccgaaatacttcattctggatgaacccactgcaggtctggatccggaaggaagagtgcatctgttaaatcttctgaagcgtctgaatcaggagcagggcatcacgatcatccttgtgtctcacagcatggaagatatcgcatcctatgtggatcggatgatcgtcatgaaccggggccgactggagtttgacggtgacagggaagaggtgttctcccaccagaaggaactggagcagatggggctgtccgttccgtttttccgttatctggccaatgatctgaaggaaaagggattccctcttgagggagagatcctgactcttgaagatgccaagacggcgatcctagaaacattaaagaaggaacaaacatatgattaaagatattaccataggacaatattacagatcagattctattcttcaccggctggatccgcgggtgaagcttttagggacgttaatatatgttgtaacactgtttttctcaaaatctccgctgacctatgcggcatccatactgtttcttgcagtgatgatcggaatctccacagttccgctctcctttattgtcaggggattgaaggcagtgggtgtaattctgctgttctctgtggtcatcaatattttctttattccgggagaggccatcgttcatttgggcattttcaggatcaccaaagaaggagttgtgacagctgtttacctgggtacaagactggtgatgctggtgctgggcacttcccttatgaccttcaccaccacacccaacgagctgacagatggtctggaaaagtctctggggtttttaaatattataaaagttcctgtgcacgaaatcgccatgatgatgtccattgccctgaggtttattccgattctcacggaggagttagacaagatcatgaaggcgcagactgccagaggagtggattttaaaaacggaagtttcctgcatcggatgaagagtatggtgcctatcgtggtgcctctctttgtggcggcagtgagaagggccaatgacctggcaatggcgatggaatccagatgctatcatggcggagagggacgtacaaagatgaagcctttgcaataccgcagaagagatctgctggcttatctgtacctgtttttatttctggcactgatggtttaccttggatttttctgcccggtaggaagatagacgtgaggtgggcagatgaaacggattaagttagtagtggcatatgacggtacaaattactgcggatggcagatacagcccaaggacgcaaccatagaagggatactcaatgaaaagctcagcagtctcttagatgagcagatcacagtgatcggcgccagccgcactgactcgggagtccatgcccttggcaatgtggcagtgtttgataccgacacaaagatcgcgggagagcggatcgccagagcattgaaccagagacttcccgatgatgttgtcattcaatcatcggaggaagtgccgggtgattttcaccccagatatcaggatacacgaaagacctatgagtacactatttacaacgcggcatttgacaatccagttaccgcgagacatcatcattttgtgtatgtaccgttggatttccaacgcatgagcgaggcttctcagtattttctgggagagcatgattttctcagcttttcgaccacgggaagtcctacaaagaccacagtgaggacgatttatgagtgtgaagtgagacaggaaggacaatatatcaccatgagggtgacaggaaacggtttcctttataacatggtgaggatgatggccggtacgttaatctcaatcggaagagggcggagagaaccggagtggatcagggaattatttgggaatcccaaaagaggaaaagctgggccaaatgctccggcaaagggtcttaccttgataaagatacgctatatggatcaggagaaggatggagattaaatgaagatcatgggactgcaaaaatcgaccctgctggattatccaggaaaagtcgcctgcacggtttttaccggcgggtgtaattttttttgtccattctgccacaatggggagctgattgctttaccggcagaagagaggggactgccaagggaggaactggcagcatttctaaagaaacggaaggggatcctggacggtgtctgtatctcaggaggagaaccgctgatccatcaggaacttccggatctgttaagagagatcaaagatctcggatatctggtaaagctggataccaacggtagttttcctgacaggctcagaaagcttgccggtgaggggctattggattatgtggccatggatattaaaaattccaaacgaaaatatgcattgacaacgggactggaagcattttctatagagccggtggaggagagtgtcagattcctgatggaggggaagctgccttttgaatttcgtactactgtggtgagacaactgcatacaaaagaggatatgctggaaatcggagactggattaggggaaaagaaccatactttctccaggcgtttgaacgatcctccaatgtgccggattccgggcttacggcttatgacaaggaagagatgcaggaactggcggatatcctgaagggaaaactgccaaatgtagaattgagggggatataacaatatattgtgcatggagataaataaagatacaatatattgactttgtttcacaaggtgatataattctaagtattgaatatagaaagaatggggtgtaattgtcatgtattatgtaataaaaagagacgggacagaggcagagtttgatatccggaaaataacaactgccatcacaagggcatttgaggccaaagaaaaacagtaccatcccagcgtgatcgacctgctggctttaaaggttacggctgattttgagccgaaggttaagaatgatgtgattgccgtggaggatatccaggacagcgtggagtccgtattgatccaggcaggttatgcggatgttgccaaggggtatatcttatacaggaaacagagggaaaagatcaggaacatgaagtctacgattttagactataaagaactggtggacagctatgtaaaagccagtgactggcgtgtaaaagagaattccaccgtgacttactccgtcggcggcctgatcctgagcaacagcggcgctatcacagcgaactactggctgtccgagatttatgatgatgagatcgcagatgcccacagaaatgctgacattcatattcacgatctttctatgctgacaggatactgtgcaggatggtctttaaagcagctgatccaggaagggcttggaggcgtgcgtggaaagattacctccgctccggcaaagcatctttctacactctgcaatcagatggtgaactttcttggaatcatgcagaacgaatgggccggagcccaggcgttttcatcttttgacacctatctggcaccttttgtgaaggcagatgatctatcctactatgaagtgaaaaagtgtgtgcagtcctttatctttggggtgaatatcccaagccgctggggaactcaggctccattctccaacataaccctggactggacggttccggatgatctggcggaactgcctgctatcgtaggcggaaaagagatggactttaggtataaagactgcaaaaaggagatggatatggtgaacaaggcgttcatcgaagttatgatcgagggagatgccgacgggcgtggatttcagtacccgatccctacatattccatcaccagggattttgactggtctgacacggaaaacaaccgcctgttatttgagatgacagccaagtatggcacaccttatttttctaattatatcaacagcgaaatgcagcccagcgatgtgcgcagtatgtgctgccgtctgcgactggatttaagggaacttaggaaaaaagccggaggattcttcggcagcggagagagtaccggatctgtgggggtagtcaccatcaatctgcctaagattgcttatctgtctaaagacgaaaaagaattttaccacagactggatcatctgatggatgtggctgcaagatctttaaagatcaagagaaccattatcaccaagttatttgatgaagggctttatccttatacaaaacgttatttagattccttcggcaaccatttttcaaccataggattgatcggtatgaacgaagcaggtctgaacgccggctggatcaaagcggaccttacggaagaaaaggcgcagaaatttgcaaaagaagtgttaaaccatatgagaaaccgtctgtctgattatcaggagaaatacggagatctctacaatcttgaggcaacaccggcggaatccaccacataccgtctggcaaagcatgatgtggcagattatccggatatcatcacggcttcggaagaaggaggagcaccgttctatacaaacagctcccatctgccggtgggatacacggatgatgtttttgatgctctggatattcaggacgaattacagacattatatacatcagggactgtcttccacaccttcctgggagaaaagcttccgggctggaaagctgccgcggcattagtgaaaaagattgctgaaaattaccggcttccttattatacgatctcaccgacctattctgtgtgcagaaaccatggatatttgagcggagaggtctacgagtgcccggattgcggagaaaagactgaggtgtacagcaggattaccggttattaccgtccggtccagaattggaacgatggaaaggcacaggaatataaggagagaaagctgtatgatgtagagcactccagcctgaaggcctccagcattccgaaaaaggatgtaagcattgcctctgaggcagaaaagaagatcgaggaagcccaaaagatgcttttgtttaccacaaaaacctgtcccaactgccgcatggccggggaagtgctgaaagagtcgcagattccgtttgagatcgtggatgcggaggaacatcaggaactggtgcaggaatacggcatcatgcaggctccatccttggtcgtactgcggggggaacagttcgagacgcactgcaatgtttccaatattaaaaaatacgcggagcagaatcactgcggctgatgaacaggcaggcctgtcagatttgtttgatattttttggatgaaatttattgacacaccccggtcagtgttatataatatgaaaatgtgacataaaagaaaatgcttaccccaatgccccggagggagtattttatatagaagacacattgattgagaaatttaggaggaagaaccatgaagagctttatggcaagcccatcaacaattgaaagagaatggtatgtagttgacgccacaggacatacattaggacgtttagcatcagagatcgcaaaagttttaagaggcaagaataagccgacttatactcctcatattgacacaggcgacaatgttatcgttgtgaacgcagataaaatccaggtaacaggaaagaaattagaccagaagatctactacaatcactctgattatgtaggtggaatgaaagaaacaactttaaaagaaaaaatggcaaaaaagcctgaagacgttatctatcttgcagtaaaaggtatgcttccaaaaggtcctttaggaagagcaatgattaagaaacttcatgtatatgcaggcgcagagcacaacaaccaggctcagcagccaaaagcattagagatcaagtattaagaaggaggacgattaagtggctacagcaaaatattacggaactggtagaagaaaaagcagtatcgctagagtatatttagtaccaggaacaggaaaaatcacaatcaataaaagagatattgatgaatatttaggattagagacattaaaagtagtcgtacgccagccattggttgctacagacactcttggaaaatacgatgtattagttaatgttatcggcggtggatttacaggtcaggccggagcaatccgtcatggtatctccagagctttattacaggtagacggagacttccgcccggtattaaagaaagcaggatacttaaccagagatcctcgtatgaaagaaagaaagaaaccaggtttacgttctgcacgtcgtgcaccacagttctccaaacgataagaactattataagagaattattaaaacccttgaaaacgtaatgttttcaagggttcttattatattttacgttttgtaagtagttctacatggcaaaaccgcccttgtagttcggcgagtaagggcggttctttaactaaacttataggtcaacctcttgtgggcggttgttccttttctatctataacataacaagatattaaattcaataagaattaggatactaaaacagctgaagtgaaaagtttatttacactttgaaaaacgttaagaaaaaagtggaattttttctacaaaagctgaatcaatatgactgagaacaaggttcaaatcttcctggctggtaagccccaaagatttcaggtctgtcctttttggaaggatataccgcaattcgatatgtttgttttcaagggtgcctttctgaccggactgcatcggatcgcagtagaacacaagggtacgctttgtgccatcagaacctgtttccatagcatcggcatatgtaaattaagaacctctgtcggtaaggagcacatggacatactttctaaatacttcagtaccgagaatggtttcgggcaggttaatgccctgtttcagtaaaggggcaatggtctcagcgattacttttccttccctgaatagtaagattaacgccctgacgggaatcaatcagtgttgtcctgtaatccaaatgggcatcttgcacttgtgagtaagaacccgatgcagcttgatttccttgccgacagtagatttgtctttgccgatggtttgtgcgatagctgtttttgaagagccgttggtaatgccagttaagataaaacgtctttcttccaaagttaaatgagaaaatgaatttgtttcacacataaagatacctgcctttccaatggctgtcaggtatcataattgtaagactaaatgcaacatttatgaaagtggaagaaggtgtaagactaaaatctactttgccctattcaaagtggaaataaacttttcacttcagtcgatatttccttgtcaaatctgtgaaaatatattgactatttttaataagatgttataatgatgatattgataggattgtaactcttcgaggcattacctttagtttattaggtatgctgagaagagtttttttatttgtggaaaggggaaaaatgtttaacttttttaaaaagaataaaaatttagatggtgttattatgtcaccggtcaatggaaagtgtatagatttatcagaagttccggataaagtgttttcagagagaatgataggggatggtgtggcattcatttatgaggatgacatgatatgttctccatgtaacgggacagtagttatggttgcggatacttctcatgcaattggcataaaaagtgaagagattgaaataataattcacattggattagatactgtggaacttaatggggaaggcattgaagtattcgttaagaccgatcaaaaggtagaattaggaacaccattagttagaatcgacaggaaatttatgaaagaaaagacggtgaatctaactacgccgatgattataacaaatactggagattttaaattggagtttgaaaatatagggaaagaagtaaggcgcagtaagtcagaagtgataaagtataccaagagtgaatagataagcataaaatttatttaatttaagaagagggggggcttttttgtgaggattactaaaaaaattaataacaacgttgtattaggggtagatcctaagggaaaagaagtagtgattttcgggaaaggaattggattccacgaaattccttacgaattaaaagactcatctttgataagtaaaactttttatgatattgattcaagttatttggaattattatctgaaattcctgaagatatttttaatgtttcatctaaaattgttgattatgcaagaagtaaagtcggttgtgaactaaatccaagtctggcatttatgttagccgatcacattaattttgctgtcataagattaaaggaattcatagatgttacgaatccgttaaccaatgatatcaaatatttatataaaacagaaatggagattggatataaagctctggatatgatagaggaggatttacagattcgctttccgaaaggggaggcagcaagtattgcactgcatattatcaatgcagaaggtatgcaaaatgatatgaataatacaataaaagttacgaagcttcttaaagaaataaccaaaattgtagaagaaagctttgattttgaaattgatcaggacagcattgactattccagatttgttattcacttaaagtattttgtacagcgtgtgaaagaaccaaaagagaaagtttcagattctacgaaattgcttcttgaatctataaaagctcaatctccggatacgtataaatgttttcagaaaatagagagctatttaaaaaaaatattaaactggaaatacagcgaagaggatcaattatatctattggttcatatcaataggattttaaataactaaagaacgcatgtcacgtattaccctaaaatttatgtatttttccgcattggattgtaactctgccttgaggcattaccaatgatagatattagtatatttatcatttgctgccttgaggcttttttatttaattgatgtcaattataaggggggataaagatgtaaacaataaaaatcatttatgtatacaagttacattcaaaaatggaggtgaacatgatgtcagcaagtgaattaagtaagaacattatttctaatgtaggtggtgtggaaaatatcaattcattaacgcactgtgtaacaagattaaggtttgttcttaaagagaaagaaaaagtaaataaagataccattgataatttggacggagtaacaagttcattatattccgggggtcagtatcaagttattattggacaagatgtggcaaatgtatttgaagatattattagtaattatgatttgaatggtactaaaaaaggtgttgctgatacaaatcagggggaagataaaaagagtattttggggcgtttagatcaattgttcagcatattagcatcaatctttacaccattaattcctgcgatgcagggtatgggatttttaaaaataattttggtcttagcgaaatttatgggtgcgtcaccggaaagcactacttatcagttggtcaatacattatcagattcttttttctatttccttccgtttcttgtggcgtggtccgcagcggaaagatttaaggctaataaggcactggctttgatgttaaccggatttttgctgcatccaggttttatggaattattcaaggcaaatgaacaggtttcatttttggggattaatgttccgaatataaattataccggaagtatattgccgccaattctgacaatacttttgttatcatatgttcaaaaattattaaataaattactgccaaaactatttaagacagtattttcatctgtgatcgctttgattattacaatgccgattgcaatcttaattattggaccgattgggaattggggcggtgctatattagtaaatttattcaatagtttatatcagtttagtccattgctgtctggtgcagtaatcggaggactgtggcaagtaatcataattgttggtatgcactggctggtactgacattgattcagttcccgaatataaatagtttgggagtggacagagttacagttgcgtttgctcctagtataatgtgtcaaattgcagcaggacttgccgttgcattaaaagttaaaaataaagtggttcgggagaatgcattatctttaacagtaacaagtttactctccggcggagtaattgaaccggtaatgtatggggtaaatataaaatatagaaagcctttctactttgtattagtaggaggcgcagtaggaggagctattacaggagcatgtggagcagggattaccgctccggttatgtttggtatatatacgttgccggctttctttggcaaaggatttacagggttgatgataggaacattagttggttgttccgtgacatttttattaacctatttctttggagttgacaaggcaatcgaagaaaaacaaaagaaagaattagaagcttacacagcagaaattgtataagaaggagatagattttatggaaaaacaatatttatataacaagattaaagggactttagtagctgcgggaatgggagatgcaatgggggcgccttcagaggcttggagcagagatgaaattattaaaaactatgggggaccaattactgattttatagatccaagtttaaatctttatgtgaaagataacctgatgggtgaagttacagatgatacatctcagatgtatgaaatggcattggcagtcattaaatctaaaggaaattttacggtaaatgatgcagcaaatgctttgatagaatggtcggaaaaatatccgaagtattatccaagaaatgcaggaccaacaacaagatatttgatagaggacttaaaatcaggcaaagatcctgttgaattggggaaaacgggcggaacatatgaccgtggtacttctaatggtgcagcgatgagaattgctccggcgggattgctgtttcctggaaatttggaaaaaaccatagaagttgcaattactatgactaagccgtcccatggaacacagcatggatattcgggggcatgtgcaattgcatgcggaatctcaaatgctttaatggaagattctgatttatattctattataaaagcttgtctttacggagcgaaacgtggagaagaaattggaagggaagaagccagaattgctccgggatttgcagtttatgaaaaaatcgttaaaagtatagaaattgctttaacctcagatcaaatggacgaagcgatggaaagattggaaagaagtgttggaaatgacggatctattcaaagttctgctgcatgtgccattggcctttttttagcaagttccggagatgtattgaaaacaatcatcggcggcgcaaatattggcggagataccgatacgattgcttgtattgcgggaatgttagccggtgcatatacaggatttgaagagatagacagtgataaatatgaggtgtttaaaaaggctaatacaggatttgattttgataaagtatctgaagaactgacagatttagctcataataattatttgaatgctaagtaattctttaaacttcttaggttgttgttttgattcttatagcggtctcctttagaactgtctgatatgatagagacttaaaggaggctgtttttttatttcctgatcatgcttagacaaaccctgacaatgcgtgtcaggataaaaatggatgttgacaatatgaaaagcaaagactataataaacaaaaaataagaaatgaaatgaggtgtcttggtgttacgggtttctggaatgagcattgcagaaaaataaaataatgatcagggacgacaggtatggatatgccggtctgttttttgtcagcctgcatataaagcagactgatctgatattttgccttacaaacccgtttcatacgctttatatagatggtaagagatgttggaacatagctgtgtaatgctgtgtttttttattcttttaatttagacttctttcgttaaaagatcacagggaatgtgccggtttcggggcaatgtatctgtgatctttattttatttcaggaaattaaactatgataatataggcatcattctgccttgactgagaaaggaatctatcatgaaaaataaatcattgacaacattgggatatcatcagatattagagcagctaaaagactatgcattttctgcgggcgcaaaggaacggatcggccggatgctgcctttattgtctgaactgaagctgaggaaacatataaatgacacatcccaggcaagaggaatggtggagacatatggaacaccacctctcccagccatggatcatatggaagaatatataaaaaaagcagctgcgggggcactgctcctaccggaagaattggaagaattatgtatgttcttaaattctgtcgcacggctgaagatctaccttaagaaaggggaggctgaacaaatcagcctggctttttataaccagaatttagaatccctggatgacttgaaagaggagatcaggcagtgtatcagaaatggaagggtagatgactatgcgtcaccgtacctgaaagacatccgaaagcagatgcttctgctcagtgagaaaatcggagagaaagctgaaaaagcactgagggcaaataaaacgtatttgagcgatgcatttgtagtgaaaagaaacggaaggtattgtattcctgtccgtaaaaaatgcagaaatatggttttgggaagcgcagttgaccagtcttccaccggtgccactatctttgtggagcctgcttcggttgcagggctcagagaggaactggaactttatcaaattgaggaggattcggaagaaagaagaatcctttacagcctgacgagcctggcagcacagaatgaggaagccttgaaagaagatattcgcgtgatcgaaaagcttgactttatatttgccaagggacgcctgagccttgaaatgaatgcagtggaacctgagatcaatacagaacattacatcaggcttaagaaagccaggcatccaatgctgtcaggggaaacctgtgtgccgttagactttgaaataggaagagagaaccgcggagtcatcataacaggaccgaatacaggcggaaaaacggtagcaattaagactgtcgccttaatgagcgcaatggcatgctccgggcttcatgttccctgtgaatgtgcagaactctgtatgcagaatgagatcctctgtgatattggagacggacagaatatatctgataatctgtctaccttttcagcacacatcaagaatgttctggaaatattaaaaagaattcagaaagacagtcttgtcatattagatgaactgggttccgggaccgacccggcggaaggaatgggaatcgcagtggcaatcctcgaagaattgagaaacagcggagcattatttctggtaaccacccattatcccgaagtaaaagaatacgcagaccggtatccggaagtggtgaatgcaaggatggagtttgatcgggaaactctgaaacctttgtaccggctgacggtaggggaggcaggagaaagctgtgcattatatatagcgaaacgtcttggctttccgggcaggatgctctgtgaagcggccagagaggcttatggagaggaatgtgagaatgttctcggcacattgcagttaagtgacagggaagaagaaatcagaagagaaaagtccccttccatacagaaaatacagcctaaaaaggaaaagagggagaagggtagaaaatttgttaccggtgacagcgtgacagttctgcccgatggacagatcgggatcgtagtgaagccgtcggatgaaaacggccaggttttagtgcagataaaaaaagaaaaaaagctgtacagccataaacggctcaaattaaaagttgcagcatccaagctttatccggaggaatatgatttctctatcatattcgattccgtggagaacagaaaagcaaggcataagatgggaaaacgataccgggatgatcttgtcattaagtcagaagaataacaatagattgtttgaaaggagtatgatatgaggatcagaaaagaagaaaaaaaagactatgctgaggtctatgaacttgtgaaagctgcatttgagacagcggagcatgcggacggcaatgaacaggatcttgtggaagcactgagaaaaagcagtgcttttgtgccggaactttctcttgttgctgaggaagacggtaaaatcgcgggacatatcatgtttacggaaataagaatcgatgataagatagaacttgctctggcacctctttccgtactgccgaaataccagaatagaggcatcggaatgaggctgataaaggaaggccataaaattgcagctcaaatgggatacggaatctctatcgttgtgggaattgaggattactatccaaaggctggatataaaagagcgaaagattatggaatcaaagatccatttcaagtgccgaacgaaaattttatggtatgcggccttggtaaagaaatagggcagtaccatgggactgtagagtatgcaaaagaattttatgatgcagtggaaggaagatgacaggaggaaatcacgatgacagaaaaggaaaaagcagccctggggatgctgtacgatgccaactatgatgaagatataaaggcagaaagacttgaatgccaagacttgtgcgcggaatataaccgtctgatgcccagtgaagtggagaaaagaacggagcttatgaagaagattctcggaaagacagagggggagtttgtaatagagcagccctttctgtgtgactatgggcacaatatcgagattggggagcgctgttatctgaactataactgcaccatactggatggggcgaaggtcacattcggtcatgatgtctttgtcgctccaaattgttctttctatacagcggggcatccatttgacgtgaaacagcggaatgaaggtcttgaatatgcatatccgatccatgtgggaaataacgtatggatcggcggaaatgtgaccgtggtcccaggagtgaccatcggcgacggaacagtcgttgcagcggggagtgtcgtgacaaaggacctgccggcaggagtgctggcagccggaaacccatgcagggtgataaggaaacttacagaggaataattcagatcaccccttattctattcctttcaggtggacgcactacgtgcaatgcggtatacccacagggcaccccgtattttatacccttcgggtggacgcactacgtgcaatgcggtatacttaataaaagaagtagggaaggaagtgtgatgcatatgacaggccttattttacagctggagtacagcgggaggatccttctggccgctgtctgcggcgcatgtatcggctatgagcggaccaacaggcttaagaccgccggcatcaggacccatgtgattgtatccctggctgctgcattgatgatgatcatttctaagtatgggtttaacgacattttagcgatgcataatattggattagatccatccaggattgcggcgggagtggtgacagccatcggctttctgggtgcaggcattatctttgtacataaccagagtgtcagcggcctgaccacagcggcaggaatctgggctaccgtgggtgtgggaatgtccgtgggaggcggtctctatgtgatcgggattttcagtacaatcctgctcatcattgtacagtggatcctgcacagggattttaagtggatcaagaccccgactgttgaagtcattaccctaaagctgcccaatagccctaatgctgttaagatgatccaggagacgatccgtgaggagtctatagagattctgaacatttcggtggaaaagatgggcgaagaaagtattaaggtgaggcttgatgtgaagctgcctgacagctttaatatgtatgatgcgattaagcggctgctggagaacgaaaatattgaatccattgatatctgagacagaaaaggaaccggatatgatcagaaaagcacacaaagatgacgtaaaaaggatcacacagatttataatgaggtggtggccaattcagccgccacctttgacttggaagagaagtcattagaagaccgggcagcgtggatggaagagcataagggaaaccacccgctgcttgtttatgagacgaatggaagtgttgtcggctatgcaagcctgtcttcttacagggagaaaaaagcgtttgacgccaccgtggaattgtccgtctatctggacagcaggtacagaggcagggggatcggcacagcgctcatggaagcaattcttttggaagcaaagagccgaaaagatatccacacagtagtctctgtcatcacgggaggaaataaagccagccagaagcttcatgaaagctttgggtttgatttctgcggcacggtcagggaggctgggtataagttcggaacctacctggatatagacacctatcagctaattgtcagaaataaataagaattttgaagttttttcttttgtcttttttggtaccctaatattatagaaaagggggtagctttatgggaaggcaaaaagaaagtaaacttagaaatactatttttaacggtgtattcgttttttatcttgtttttttgtttgaaaatattttatttaaatatgtacagccctggcagctgttccggtccggaagatactacgcaagatccctgaacctggtcccattcaagcagatcttcgcatcctcggggatcggggatctgaatatctatgggaacatcattttatttgttccgctgggtatttatctaatgttttacatgaaaaagaaaaaggccgtaaaaagccttgccgtcattttcgccctgagtgtgttttttgagtcatttcagtatgcggcagcgatcggggccaccgatcttgatgatgtgatattaaattgtctgggcgggcttgcaggaattctttgctataagatcttggtttttctatgcagagggaacgaacagaccgcaaagacggctgtcacatggatcgccgcagcggcagggatcctcacagcggtacttgtcatattgctggttgcctataattaatggtttacaagagaccggatttattttatactaaagttattattaagagacgaggtggaaggatgattattatttcttgctaaaaatgaatctgcataaacaaggagggagaccttctggttttatgcattctgcaagaaagatcatccagactgctgctatatagagtaatgtcaatgtacgcccggcgtgcctgatatttttgtatgcaaacctgcaggaagattctttcctgcaggtttttttagtccatagaaaagtttcctctatggaataaaaaatgctccgcgagaatcccacaagtgggattcctcattggaaaagaatagaaggaaattaaggaggtgctatatatgtcattgatacaaatttcaaatttgacattttcatacgatacaagttttgattatatttttgagcatgtttcgttccagattgatacaggctggagactggggcttaccgggcggaacggacggggaaagacaacatttctgaagctattaatgggagaatatgaatatcaggggtccattcaatctggtatggaattcgactatttcccgtttcaggtggaggaaccagaacagatgacaattgatgtactggatagaattgatccgcagtatgagctgtggaagatcatgaaggaactgtcgctgctggatatctcagatgaagtgctgtaccggacgtttgggagtctttccaacggggaacagacaaaagtgctgttggcagcattgtttgctaaggaaaatcactttttgctcattgatgagcctaccaatcatctggatgccaatgccaggaggaaggtggcagaatacctgaaatcaaagaagggattcattctcgtgtcacatgaccggacctttttggatgagtgtatagatcatattttatccatcaataaaacaaatattgaggtgcagaaggggaactttacttcctggtatcaaaataagatgctcaacgaccaatttgaaatggcggagaatgaaaaactgaaaaaagagatcggaaggctttcggatgcacagaaaagaacagccgggtggtcacgggaagtggaaaagaccaaacggggaaccagaaattcgggtctgcgccctgaccggggctttatcggccataaagccgcaaaaatgatgaagaggtcaaaagcctctgtaacgagaaaggaggaggcagtcaaagagaaatcaaagctgcttaaaaatattgaaactatggactgcttgaagctgtcaccgctggcccatcatgccagaaggctggcagagtttaaggatgcagcgatctcctacggagacaggacagtggcagagcatctgagtttttctgtggagcagggcgaccggatcgctcttaccggacacaacggatgcggaaaatccagtgttttgaagcttttgatgggggaaaagatttcttatacaggggcattatacgttgcaaaaggactgaaaatatcctatgtcccccagaacacggacggactaagggggaatctgagagattacgcatacgaatatgggattgatgagagcctgtttaaggcgattcttagaaaattagacttttcaaggcttcagtttgagaaaagaatcgaggaattcagcgagggacaaaagaaaaaagtattgatcgccagaagcttgtgcgaggaagcacacctgtatatctgggatgaacctctgaattttattgacgtgttttcacggatgcagattgaagagctgctgctaaacagctgtccgacccttctgtttgtggagcatgaccagactttcagcggcaggattaaaacaaaggaagtgatcatgaggccgctctgaatgaagattccccaatatggaaagaatatctcctgaaaagcaaaaggaggattcttatgaaacactggatcgaaaaacaatttcatttgaagaataatcatacagatatcaagacagaatttttggccgggatcacagtgttcgtcaccatggcttacgcactggcaacaataccaaacatgctggaaataacaggggtagataagcatgtgatgatgacgatcatggtgatgcttattgtggttacaacccttgctatggcgttttacacaaaccggccgtttgctctggctccgggactcagcagcgccgggatcgtggccgctatgatcgcaggagaacaggtacccgtaaagattgcaggcggtgttgtcttctggagtgggatattgtttcttttgattaccttccttggactcagggaggcaatcgtccgtgcgattccagccagtttaaaatatgctgtcagtgcggggatcggtctgtttatcgcagtgatcggagccaaaggagcaggactcattgtggcagaccagtctaagaatagtctttcctttgggaacctcggatcgccggaggttattgtcgcagtgcttgggtttcttgtgcttttggtcttgagagcaagacgggtgccgggggatatgatcctttccattctggctgccacggctgttggcctgcctctgggcgtcacaaaactccctgaaaagatcatttccatgccggcttctataggaggacagctctttaatattaatattctgggagctctgcatgtgctgtatcttccgtttttaattgctttattcgtgccggacttttttgcaacagtaggaacgattctgggagtgggagctagagccggatatttagatgagaacgggaactttgacggtatcgacaaatgtttccaagtggatgctgccgctaccagcttcggggccctgttcgggatgccgggactgaccacatacctggaatcctctgcgggaatcgaggcagggggcaagacaggccttaccgtcgtgtttactagtatcttttttctattggcattgttttttgcaccggcggctctgattataccatctgccgccacagcgcctgtattgatctatattgggatcagcatgttagaggctatgagacacattcactatgatgatataacagaaagtatgccggcatttatgtgtgttgcgttcactgtattagctgggaatatcgccaacggtatctgtacagcgatcctgttttacctggtcatgaaagcggcggctgggaaagtaaaagagatacatgtgttcatgtatctcttgggtgcagtcagtgtgctttacttctatacgcttttataaagatttcagcgctttttataaaactccatataggagaagacaaacggtgcgagcaccatgacagccagtacagagaggaaaacgggtacctggaatggaactggtgctaaggaagcaagggtgatcataaatcctcccaggacccacagctttccggtaaaacgatgtgttctgaaccagttctgttcatctgccagggcccatggggtacggatacctataaagtaattatgttttgtcttaggcagaagattcccgagaaaaatgaacagggaaccgataccgagacaaaagattagatttacgttaatattcatacggaaagcagcggctattgtcataatttggacggcgaagaagaccaggccgatgacaaagctgtagcggttatattccttttggaatttcttgtaattaccagagttaggatctgtctttctcattacttgaaaaagtattgtcagaaaaaagataacagcgggaaacagaaagatcgtaagctttggagcataccggtcgatggtcccatgtgcattccaatgtgcagggatctgttccggcagggaagagaatacaacgaaggaaagcaaaagagagactgctgtcagtaaaatgctaggtttgtattgtttcatttatttttcctccttaaaactttgaaaccagtggatcacttcttcaaatacagataaatttaattcgtaataaatatattttccttgtttctcatcggtgatcagatttgcattctttaaaatgttcagatgatgggacacggttgcgcctgtcatttcaaaatggctgcatatctctcctgccgacaaggaaccttctttcagcaagtctaatatctcacgtcttgtggaatctgacaatgccttaaatgtttcctgaaaactcacagtgcctcctctctgaatcatttagaagtttatctaaatgaattgtatcacagcattagtacaaaggcaagaacatttagagaattatctaaatgtattctgcaatatcatgcaagatttttgagaagagtttgtgttaaacttaaaactatgaaagaaataagagaaattttttatgacaaacaattaaatattgaggcttatggcttttatggcctgaaacagaaatttcccaatcactttcacgaccactatgtgattggatgtattgagagcggtataaggaaggtcacatgccggggagaggaatttctcattgagcctggagatctgttgttttttaattacagggagaaccatgcctgcgagcaggttggagattatcctttaaactgcaggtttattaacatcaagagggaaaggatgagagagatcgcagaagagatcactggaaaaagcggctatccggaatttgtgagacccgtaatccgccagtgtccaaaggcagagctgctccgggaggtctaccggatggtggcagagggaaaggaagaatttgaaaaggaggaacacttttatctgctgatggaacagcttctctcagaatatgcagtatttgaaaagagaggtgtacaggtgccggatacggaaaagctgaacgatgtctgtgattatattaaggagcattacagtgagaacgtctctctggagcagctctgcgggatcgccggtgtgagcaggtacagcctgatccggtattttacaaaatataaaaagataacaccgtaccagtaccttgaatcgatcaggattaatcaggcaaagctttacctggaagaagggatggagccggcggaggctgcagctatgactggattttctgaccagagccacttcaccaacttctttaagcggctgttcggcttgacacctgcccagtaccagcggatttttatccagaaaattgataagactccgctataaaccataaatattttgcagtagagaggaattttattatggaagacaaaaaatacatacagggccatctgtttgctatggccaccatttttctgtggggtaccacatttatatcaacgaagatccttctccgtgagttccagcccatcgagattcttttttttcggtttctgctcggcttcttagtactgattgtcatttacccaaagagattgaagacaagaggatggaaggaagaaaagtattttatcgctgccggcctttgtgggatcactctgtactatttatttgaaaatattgcacttacctacactatggcttccaacgtgggagtcattatttctgtatctccgttctttacggcattgctggcaaggattgtgacaggagagaaggctcttggaaagcgtttctttctaggtttttttcttgccatgtgcgggatctgcctgatcaccttcggcgggaatacagctcttcatctgagccccaaaggagatcttctggcagtcctggcagcgtttgtctgggcggcttattccatgctcacaaaaaagatcggaagctttggccacaatatcatacaggcgacaaggcgctgttttgcctggggccttttgtttatgtcgccggtcctgctctttacagatttttctctggaaacaaaacggttcctggaacctttaaacatggggaaccttctatttctaggcattggagcttccgccatctgttttgtgacatggaatacggcggtgaaacggctgggagcagtgaagacaactgtctatatctatatggtgccggtggtgaccatcatcacctctgtcctgatactcggagaagtgctgacggtaaaagctttagcaggggcgtttctcaccatagccggtctgtttttatctgtagaaaagaagaaaaaaagggcagattgtgacttgctcacagaagtatttccaaaaagcgatataatgggatcagaaagtaaataatgttttgataaaaaggagtgaccattatgtcagtattaaaaataaccagtgcaaattttgagcaggaagttttaaattcaaaggagccggtgctcatcgatttttgggcaacctggtgcggaccgtgccggatgatgtcaccagtcattgacgcaatcgcagaggaagtaaaagggataaaagtaggaaaaatcaatgttgatgaggaacaggaactggcagtgagataccgcgttatgtccatccctacaatcctgatatttaagaacggaagtattgaacagagctttgtgggagccagagataaacaggagatcctcagggcgctgaaattgcagatggcagaataagaccacacaggaatgtgttataataagaaggaaaacagacaagtaaagaaaggggtttccttatgaagatttatgatttgatcattatcggcgcgggaccggcaggtatgtccgcagccatttatgcaaaaagagcgatgcttgaagtactcgtattagaaaaagaagctatgtcaggagggcagatcgtacagacttatgaagttgataattatcctgggcttccaaaaatgaatggaatggatctgggagatcagttcttcaaccatgcttctgatctgggagcagaagtaaagaccggggaagtgctggagatcaaacatgaccagccggtcaaagagatcatattaaaggacggagaagtgttaaagaccaagacggtcatgcttgccacaggagctacccacagaaagctgggaatccctggagaagaagaattgactggcctgggtgtttcctactgtgccacctgtgacggagcgttttttagaaataaaactgtggctgtggtaggcggcggggatgttgcgctggaggatgcactgtttttgagcagaatgtgtgaaaaagtgtatctgatccacagaagagatgagttcaggggcgccaagatccttagagatcaagtgacgaaaaacgacaaaattcaagtaatctggaacactgtcgtgacgaaagtcgacggaaatgagagagtagaatctatttccatcaaagatgtgcataacgatgtggataagtcgctgaaagtcgatggattatttatcgcagtggggacggctccgcagagcacgcttctaaaagatgaactcaaaatggacgaaagaggctacattgtggccggagaagacggagtgacgaatattccaggaatttttgtaggtggggaccagaggaccaaaaatctgcgccaagtggtgactgctgccgcagatggggcaaattgtgtggtatcagtggagaattatctccaaaagttagaattgcctgacaattgaaagagcatactaaaaacttaaaaatcaagaggaaaagtttgttttgtcatatttgtatatgagtcgtattttcaagtattaaatcgagaaatacagaaaaaaaacatcacattttatccacaggctaaaatagcggttcttcgcaataatacagttatacacaaagttatccacattatccacagttgacaaaggtcgaaacagtgcaaagaaattcgacaaaatgaaacatctgttttgtgtagaatttataaaaagatttgtttccaatggaaaagctatatgatataataattaatatcaaatagtaaaggagttggaagccatgaatttcattattagcggtaagaacattgaagtaacagaaggaatcaaggcagcagtagaagagaaattaggcaggcttgacaagtacctgaatgatgacattgacatcatcgttactttaagtgttcaaaaagagagacaaaagattgaagtaacaattcctatgaaggggcacattatacgtgcagaacaagatagtgcggatatgtatgtatccattgatttggtcattgatattctcgaacgtcagatcagaagatataaaacccgtttgatgagtaaaaaatacgaaggcgcaggattaaaacaggagttcatcgacaaggacgaggatgtggatgatgatgagattcgtattatcagaagcaaaaagttcgcgatcaagccgatggatgtggaagaagcctgcatccagatggatcttctgggccacaatttcttcgtattccgtaacgccgacacttttgaagtgaatgtagtatataagagaaaaggcagtacatacggactaatcgaaccagaattttaggaagtatgattttttagggagctgaggctccctttttttattccataggaaagttctccctatggaacaaaaaagccctccgggcatgatgcgcacgatgtgccaaggaaggctgcttttgcagccgcacatcggcgcgcaaagcggaacaagtccctcatgattgagggatttagggagttgaagcggacttgtccgctttgttctttcataggaaagttctccctgtgataaaaagccctgcggccattatgcgagcaaagtgaacttgtctgttttacattttataaggaagaatcctgttatggcggcttgtaagaaaagctgttctaaatacgggaaaaatccacttgtatgctgataattgcgggttctctttgataaaagcttttgttgccaccctattccagaagtgttacaatatcatagattacatgtgaatttgaatatttgggagtgaaactatgagtttgataggaaaaatttttggttcgcacagtgacaaagagctgaagcgtatcagtggaatagttgataaaatcgaggcattggacgaaccaatgcagaaattatccgatgaggaattaagaaacaaaaccgtagaatttaaagagcgcctgggcaaaggagagacattggacgatcttctgccggaggcttacgcggctgtcagagaagccagtgcaaggaccatcggactgaagcattaccgtgttcagctgatcggcggtatcattctccaccagggaagaatcgcagagatgcgtaccggtgaaggtaagaccttggtctccacccttcccgcttacctgaatgccctggaggaaaaaggtgtccacattgtaacggttaatgattatctggcaacccgtgatgccgaatggatgggacaggttcataacttcttaggtgtctccgttggtgttgttaccaatgatatggaaaatgatgaacgcagggctgcctataactgcgacattacgtatatcaccaacaatgaactaggatttgactacttgagagacaacatggtcattgaaaaagaagatctggtgcagagagacctgcactatgccatcgtggatgaggtcgattccgtactgattgatgaggccagaactccattgatcatttccggacagagcgggaagtccacagagctttaccgcgcctgcgatatcctggcaagacagatggaacgcggtacctccaacggagagctttccaagatggacattctcatgaacgaggatatcgaggaagatggggatttccttgtgaacgaaaaggataagcatgtgctcctgactgctcagggtgtaaagaaggtggaggaatttttccacattgataacctggcagatccggaaaatcttgcgatccagcacaacatcattctggcgttgcgcgcccacaatctcatgttcatcgacaaagattatgtggtaaaagatgacgaagtactaatcgtcgatgagtttacaggacgtatcatgcctggaagacggtattcagacggacttcatcaggccattgaggcaaaagagggagtcaaggtaaaaagagagtccaagacactggctacgatcacattccagaacttctttaacaaatacgataaaaaatctggaatgaccggtactgctgagactgaggaacaggagtttcgtgaaatctacggcatggacgttgtcgttatcccgacaaacaagccagtggtgcgagttgaccatgaagacgccatatataagacaaaacatgaaaagatgaatgcggtcgtggaagagattgccgcctcccatgccaagggtcagccggtcctggttggtacgatcaccatcgacatgtccgaggaactgagccgtatgctcaagaaacgcggcatcaagcacaatgtcttgaacgcaaagttccatgaaaaggaagcggagatcatttcccatgcaggtgagattggtgcagttaccatcgctaccaacatggcaggacgtggtactgatattgtcctggctgacggagtatctgatctgggcggccttaagatcatcggtacagagcgtcatgaatccagacgtattgataatcagctgcgcggacgtgcaggccggcagggagacccaggtgagtctaaattctacctgtctctggaagatgacttgatgaggctgttcggatctgagcgtatgatctcagtgtacaacacccttggcataccagaaggagaagagatccagcataaatccatcagcaggaccattgagaaggcccagaagaagatcgagaacaacaactttggaatccgtaagaacctgctggactatgaccgtgtgaacaatgagcagagagagatcatgtacaaagaacgccgccgggtgttggacggtgaaaacatgaaagactctgtcctacacatgatcaaggaaaccatctctgaatatgtgaaccagtgtgccagtgaggacgccgcaccggaagaatgggatatggatacactgaatacagagctccggccaattattccgtttggcaagattgaactgagtcaggaagaaatccaggcaggaaagccggaactgctcgctgagcgtctgcaggatgaagctgtggagatgtacgcccagaaggaaaaagagtttgaggactacgacctgcgtgagatcgagcgcatcattcttttgaaggtcattgaccgcaagtggatggaccatatcgacgatatggaccagcttagggaagggatcggtatgcaggcatatggacaaagggatccggtagtggaataccgcatggccggatttgagatgtttaatgtgatgacaaaggcgatccaggaggagacaaccggtgctctgttccacgtagagattgagcagaaggtggaaaaagaacaggttgcccaggtgacaggtacaaataaagatgacagcggtgtcaagactccgtataagaggaaaggggaaaagatcggaagaaatgatccatgcccttgcggaagcggaaagaaatacaaaaactgctgtggaaaaaattaaggagttttcgagtgattgaattagatcagttaaagtataacttgaattcctaccgggagccgcttgagagattaagcggttctcttggtttggaagaaaaaaaagagcggatcgagcagctggagcttgatatggaggctccggggttctgggaggacttagaagagtcccagaaggtagtaaaagaggttaagggtctgaaggaccaggtggaaggttatgaaggcctaagagaacagtttgaggacatagagaccttaatcgagatggcggctgaggaagaggacgaagaactggcagcggagactcaagaggcttttatggagtttgagacatcctatgaaagtctgcgtatctctacgctgctgagcggggaatacgacaagaataatgccattttaagtcttcatgcgggagccggcggaacagagtcctgcgactgggccagcatgctgtaccggatgtacacccgctgggccgggaaaaagggatttgagacaaaggtcatcgactacctggacggggatgaggcagggatcaaatcggtcactgtcgagatcaaaggcgagaacgcctatggatatctcaggtcagagaggggagtccaccgtctcgtgaggatctcgccgtttaacgcagccggaaagcgtcagacctccttcgcatcctgtgacgtgatgccggagatcgatgaggatctgaacgtggagatcgcagatgaggacatacggatcgacacctacagggccagcggagccggaggtcagcacatcaataagacggattccgccattcggatcacacatctgtccacagggatcgttgtccagtgccagaacgagcggtcgcagcataaaaataaagatcaggctatgaaaatgctgaagacgaagctgtatctcctgaaagaacagcagcacttagagaagctttctgacatccgcggcgatgtgggagacaacggatggggaagccagatccggtcctatgtattgcagccttacactatggtgaaggaccacagaacaggaaaagaaagcggcaatccgtcggcagttctggacggggacctggacagttttatgaacgcatatctagcctggagcaatgattaagaagacgctgcggtatggggccggaacgatagctgttctggcgctgtccgcagtgttattttctttgttttgtttttgtcaggttactgcctcggatgaagtgctgtttatggaagacagagactctatcccgaaagcggatgcggttatcattccgggagcaaaagtaacggacggtattctctccgccccattaaaagatagggtggacacggctgttttgctttacagatggaaaaaggcagataaattttatctctcaggagacagagatgagaccagcgctatgcgaaacactctgatcatgcaagatatacccaaggattctattgtaattgatgagggcggaatgagtacttatgatacgatctgccggattcatgaaaatgcaaagaaggagaagtttcttattgcgacgcaggaacaatatgcgaagaggactgcttttttggccaaaaaacttgggatgaacgcccggtgtgtccgggcggaccggatgttttaccaaaatgttggaaagacgaaactgagagaatatttcgcctgcaccaaagcctggctggaggcggtggtgttaaggccgggaccacatgattcactgaagaaaattcctatgaaagaggtcggagagagatgaaaaaatgggtgctttggttcctttttacggtgacaattttgtcaggatgccaaagagcggtgaaaaagaatccgaataaagaaggatatgacaggaaactggcggtagaatatgccttgaagtactcggaacacagaaatcgaaattaccctaatatgcagttgaattgtacgaattttgtctcccagtgtctggtagcgggagggaaaaagcaggacaaaggagagaatccagagaggggaacgaggattcgttttgacagtgatatcaatcggtggtacagtaagaaaaaggtgtgggacagcaagcgccccgcggatttttatacatctgccgcctttgtgagaacagatgctttttttaagtactggacagaggtaaggggactggagctgaaaaagtacaagaatacatttgcaggaagggaaagcctcataaaggaggctgtgccgggagacgtctttgtgttctacgacggagaaggacaaatcattcattttggtttgatcaccgcaaaagaggacaatgatctgttctattcggcaaatacgaaagacagaaaaaacttcagcatatgtaatattaattcaagttattatcctgtatacggagttttatttgtaaagtagggaaacagccaaaatcagaggagggattttatgaagggaatcaaaaagtatacagtggttttgatgtcagttttgctggtattgatatcatctgtatcagttttcgcaacgagtaaaaaggacaagagcaactgtgattgccagattaatggtttttcagttacggtcgatggggtttcatattcggcggacggcaataaaacttattatattgaggatgcagataagctgaatttggaacagataagcagggcggtcgtgaaagatccacggcatacagacgcacatccaaccgaactgtcttatagttttgatgatcaatcctatcaggtaatccagaaaatcggggaaggagagagttctcctgtctcagtggacatgccgcttgattttaaagggaaaacggatatctattttaaacttgcaatgcagaatcggaatgaaacagccagctatattcacctgaaaacttatccaaaatatcaaattacatatgaccttaacggaggaagtatggaggggaatcctgatatctttacggaggtgtcagatacttttacactgaaaaaccctgtgaggagtggatataaatttttgggatggactggaaccgggctggacgtaatgtctcaggaggttacaattcaaaaaggcagtaccggggaccgcacttatacggcaaattgggagcagattcagacgacagccacggatcaaacctcaacacaggggcagggttccggtacgcaacagacggtggatcctaaaaaggcagggacggacgggaaacagaaggaaaccggcagcagcaaaagcgatgttgccaggaccggggatgatcttaaaggagaaccaatgatctatttcatgattttgaccggaggattgatcactatgggtcttgtcatcaaaaagcgcagagcaaactaaaaacgagtattgcaggacatacagctgcatggattgtatgtcctgcatttttgatttatatggttgcttctttttcaaaaatatgatagtatcgtgtggaaaaacaaatgtgttcagcacacgcacagaggtggactatgttagaagattcaaaatattacgtcattaaaaaaaaggcagtccctgaggttttgttaaaggtcctggaagtccagaagcttctggacgcggagcaggcaaagtccatccaggaggccacggagaccgtggggatcagccggagttcttattataagtacaaagacgatatctttccttttcacgcaagtaaaaaggggcgcaacatcaccttcgtgatcgaagtggaggaccagccgggagtgatggccacggtgctccaggtgtttgccagttataaggccaatatcctgacgatccatcaaagtattccgatcaacggaaaaggagtgctgacggtcagtgtggatattgtcgatatggagaccgatgtgtctgccatgatcgaaagtgtagagaagcttgacaacattacatatgtaaaaataattgcaaaggagtaaaacagatgataaacattgcggtattggggtatggaacgatcggctcaggagttgtggaggttattgagacaaaccatgagagtatcaatcacaaaatcggggaaccggttcatgtaaaatatgtactggacaaaagggatttatccgacacgccggtagcctcaaaggcagtcacagattatgatatcattttaaatgacgatgaggtaagcattgtcgttgaagtgttaggcggggtagagccggcatatacttttgcaacgcaggcattggagcacggaaagagtgtggcaacgtcaaacaaagagctggtggcggaaaagggggcagaacttctggccctggcaaagtccaagaacctgaacttcttatttgaagccagcgtgggaggaggaattccaatcatccgtccgttaaaccaatccctgactgcagatgagatcaatgagatcactggtattttaaatggaacgaccaactatattctgacaaagatggccgacgaaggcacagattttgatgaagttttaaaagatgcgcagaataaaggatatgcagaactccatccggaagcggacgtggagggatatgatgcgtgcaggaagattgccatcctgacttcactggcgtttggaatgcaggtggattacgaggatgtacataccgaaggaatcacaaagatcacagaaaccgatatgaaatatgcaaaagccctgaatatgagcattaaacttcttggaacaagcaaaaaaattggggataatgtatatgctatggtatgcccgatgatgattggaaagaatcatccgctcatcggggtcaacgatgttttcaacggcatttttgtaaatggcaacgtaatcggggatgtgatgttttacggagcgggagcagggaagctgcctacagcaagcgctgttgtagctgacgtcattgatgcggcaaagcataaagagagaaatatcatgcagatctggagtgaaaagaagctgcatcttgcggatatcggtgagtttgagcacaagttctttgtgcgtcttccgaaagacagcgaccgttcaaaggtaaaagaagtttttggcgatgtagaagaagtttcagcagaaggggtgacagatgaatttgcatttgttacactgaaaatgaaagaaaaagactatcaggaaaagatcaaagcgtttgattccgttttgggaatgatccgtattaacgtaaaatagatttggaggactagtttatgaagtatgttgttgtgttgggagacgggatggccgatgagcctatagagcagctcggtgggaagacaccgcttcaggcggccaggacaccggttatggatgccatggcaaaggtatcagagcagggaatcgcctatacagttccggagaaccttccagccggtagcgatgtggcaaatctcgccatgctgggatatgatcctcagaagtattactcagggagatcaccgctggaggctctgtccatcggcgtggatatgaaggatactgatattgctttgcgctgcaacattgtcaccttatcagaggatgaggcatatgaggaaaagaccatcatcgaccacagctccggggagatcactacagaagaagcaaaagtgctgatcgacgcggtgaaaaaggaactggagacagaagaattccattactatcctggggtgagttaccgccatctgacgatctgggatcacggatatgttgcggatctgacacctcctcacgatattctcggcaaacagatcggggaatatcttccggaagaaagcaagctccgtgaaatgatgaaaaagagttttgacatattagatcaccatccggtcaaccagaagcgcaggcagatggggctgaatccggccaacagtatttggttctggggagcgggcacccgcccggcactggatgattttgaggctaagaccggaaagaagggcgctatggtctccgctgtggatctgctgaagggcatcgcggtgggcacgcatatgctcaacttagatgtggagggcgctacaggcggtctcgatacaaactataaaggaaaagccatggctgctgtggactccctgacggaagaaggggcagacgtagtttatatccatgtggaagctcctgacgagatggggcatcagggaagtgtggagaataaggtaaaggccattgaatttttggatgaccaggtcattcgtgtggtggcagaggaacttaaaaaacggggagaagatttccgtatgctcatcggaccagatcacccgacaccgatctctatccgcactcactccaaagatccgatcccgtttatgatctatgacagtacaagagagatagaaggccagaaggagtacagcgaggaagcagccaggagcacagggcttgtgatggagcacggacacgacttgatggaccggcttttacaaaaataagagaaaattttaggaggcaaggatgctaattgttaagaaattcggaggtacatccgtaggaaataaagaaaggatcttaaatgtggcaaaccgctgcattgaggaataccagaaaggaaatgacgtggtcgtggttctgtccgccatgggtaagatgacagacgaactgatcgccatggcaaaagacatcaatccaaatccgccgaagcgggagatggatatgcttttgaccaccggagagcagacatcagttgccatgatggctatggcgatgcactctatgggagttcctgccgtgtccctgaatgcgtttcaggtagcgatgcacaccacccatgcctacagcaatgccaggatcaaacggattgatacggaccgcatttttaacgagctggagcagcgtaagatcgtcatcgtgacaggtttccagggagtagaccgttttgacaactacacgactttaggaaggggaggctccgacactacggcagttgccctggcagcagcactaaatgccgatgcctgtgagatttatacagatgtagacggagtttacacagcagatccaagaaaagtgtctacggccaagaagcttcaggagatcacctacgatgagatgctggagatggccacacttggggctggtgttctccataaccgttccgtggagcttgcgaaaaagcacggagtccagctggtggtacgttccagcctgacaaaggaagagggaacggttgtaaaagaaaggatcatgatgccgcaggcagagatcagcggtgtggcaggagacgatgacgcagcacgtatttctgtgactgggttggaggatgagcctggggttgcatttaagctgtttaatattcttgcaaagagaaatattaatattgatatcattctgcagtctgtagggcagaataaaaaaaaagacatttcttttacagtaaaggaagatgacgctgagttagccgtaaacactatcaaggaacaccttccggtgggaagttatgcagatgtagatgcgaccacggatgtggctaaggtgtccattatcggaagcgggcttatcggccattccggaatggctgcgcgtatgtttgaggcactgtacgaagtgggtgtaaatatccgaatgatctcaacatctgagattcgggtgaccgttatcgtggatcgggatgatatggtgaaagccatgaatgccgcacacgaagcgtttgaactataaaagaaagacaaagagggaacaccgcctgcattccgggcggtgttttctgttccgtagaatggaatagaacaatttagatgcttaggaaaggagagtcgaatgaaaagaacagattatttatcatgggaccagtattttatgggcattgcgcttctgtctgcacagaggagtaaggatgaccatacacaggtgggagcatgccttgtcaatgaccagaataaaatattatccgtgggctataacgggatgcccacaggctgtaacgacgacgatatgccgtgggagagagacggggagcccctggatacaaaatatttttatgtctgccacgcggaactcaacgcgatcctgaactacgggggaggctccctggacggggcgagagtgtatgtcaccttgtttccgtgcaacgaatgtgccaaggcgatcatccagagcggcatgaaggaagttatctatatgcaggacaagtatgctgacgacgatatgaccgttgcatctaagaaaatgtttgatatggccggagtaacataccggcagtttgaaccgaaggaccagacaatcgaattgcacttataaggaattgggaatatggatatcatcaatattttaaaagacgagttgggaatcaaaagaacacaggctgagacggctgtaaagctcatagacgagggcaatactataccgttcatcgcacggtaccggaaggagatgaccggttccttggacgatgagaccctgcggaatctggacgagagactgaaatacttaagaaacctccaggaccggaaggatgctgtgttaaagagcatcgaggagcagggaaagctaaacggggaactgaaaaagcaaatcgaggatgcggtcacattggtggccgtggaggatctgtaccggccgtataagcaaaagaaacggaccagggcgatgatcgccagggaaaaaggattggagcctttagcggatctgctgattctgcaggcgtcccaaagaccggaagaggaagcacaaaagttcattgatgaagggaaaggcgtggaatcggcggatcaggcccttcagggggccagggacattctggccgaaaggatctccgacgacgccaaataccgggagtggattagaaaatcttatcaggaacacgcaaagatcctgtcttctgccaagaagccgggggaaaagtctgtctatgaaatgtattacgattttgaggaaccggtgaaaaaggtcgctggctacagaatactggctatgaaccggggagaaaaggaagggcttctgactgttaagattgagccggaccatgaaaagatcgctgcctatcttgtcagaaatatcataaaaaagcagaatcatccttcagcaaagtatcttctggaagccattgaggacagctataagcgcctgatcgctccgtccattgagcgggagatcaggaacgaactcacggaacaggctcagacggaagcgattaaggtgttcggcaagaacttagaacagcttctcatgcagcctccgatcgcgggacaggtagtgctcggctgggacccagcgttccggacaggctgcaagctggcggtggtggattctaccgggaaggttctggacaccgtggtcatttatcccacagcgccccaaaacaaagtcaaagaagccaagaagactgtgacggacctgatcagaaaatatgggatcacactgatctccatcggaaacgggaccgcatccagagaatcagagcagatcgttgtggagttactgaaggagatcaaagaaccggtccagtatgtgatcacaaatgaggcaggagcttccgtttactctgccagcaaactggctactgaggagttccctaattttgatgtgggacagagaagtgctgcttccatcgcaagaagagtccaggatccgctctctgaactggtaaagatcgaacctaaagccattggtgtggggcagtatcagcatgacatgaaccagaaacagctttcagaagctttggcaggtgtggtggaagcgacggtaaataaggtcggtgtagacttaaacactgcctctgcgtcactgctggaatatgtggcaggagtttcaaaggctgtggcaaagaatattgtcacctacagagaagaaaacggaaagttcgtcagcagaagagagctgttaaaagttgcaaaactcggcccaaaagcctatgagcagtgtgcaggctttttgaggatcgcagggggaaagaaccctctggacgccaccggagtgcatccggaaacctataaagagacggaccagcttttaaagaaccttggttattctgtaaaagagctgtcaagccaggggtttaaggatattggaaagaagatcacggactatcggaagcttgccggtgagctgggcatgggagagatcacgctcagggatattgtgaaggagctggaaaagcccgggcgtgacccaagggaagatatgccaaaaccgatcttaaggacggatgttatggagatggaagacttgaaagaaggcatgaagttaaagggaactgtacgaaatgtcattgatttcggtgcctttgtggacattggagtacaccaggacgggctggtgcatatctcccagatggcggaccgctttatcaagcatccgctggaggtggtcagcgtcggagatgtggtggatgtgactgtactcagtgtagatctggagaaaaagagaatccagctttccatgaaggagtaagggtatcatccccatccgccggaaaatgtgataacctcgccggtcaggtaacggggggctgtacagatatgatagatcatctctgcggcctcccttggttctgcaatccggtctgcggggatctcccgccggatgctctctttttcttcttctgtgaacccggcgttcatatcggtgtcaatcatgccgaacgcaactgcgtttacggtaatgttgctgggcgcaacctcctttgccagggcttttgtaaaggtattgacggcgcccttggcagcggaatacagaacttcacaggatgcgccggcgaaaccccagacagaggagacgtttaagattgtgcctgactttctgcgtatcatataagggagagcgctgcggcaggaggcaaacagagacagcacattggtgtccatcatttccctccagtcgtgttccgatgtatctgtaaagaggccgactctggaaattcctgcattattgaccaggcagtccagactgccaaagtggctgaccgtactttctaccatcttctccacaaaagaaagatctgagatgtccccagtgaaagaaagacagtcacagccaaggcttagaagctcctgcttaagggcctcaagctgctctggatggcggaagccgtggacagccacattccagccgttttgtgcaaagaccagggcggtttccctgccgatccccctggaactaccagtgatgagtacagtattcatagtctctcctcctcgatttaagaaaactttaaggagagtatagcatatagttttgttgaaataaatcgatttatttggtatactgaacggagtttttaacggaaggagcatgaaagatggccagaagagcaagaagaaaagcaggagccggggcgatcatcctgcggatattggtagtcgtggtactatcagcagcggtaggagtcggttcttttgcagggagcaaagcgtttttcctgaatagattaaaaaaagacaagaagtctaagatagcggaggcattaaaggcggagagccaggaacgggttgacgtatccctggtcagagtaaaggacgctttagctatccgtatctatcataataaggataagcagatgatctttgtgccgatcagaaaggatacgatccttaccctggacaatgacggagtcaaagccatgggcggagacaaaaagacggccacagtggaagaactggcggcaaaggtaagtgatatcaaggtcatcaaagcacaggttgaaaagacactgggcatcaccatcggcaattatgagagcttatcccagaagaattttacaaaggccatcaacaatgccggggaagtggaattaaacctggaaagtgaagtagcttacaaagaccagaacaagatgctggtccacattccggaaggcaacaacaccatcaacggaaatcaggcgctggggcttatattggacagcagtcagttcagcgatgaaaatgaccatatcactctggtaggagatctggtcacaaagatcgcgcagagtatcggaaagaaatcactgagtgaatataaaagctttgcgaagacatattacgacagctatgcaaagagcaatgtgtcctacgacagcatcaaagataacttgaacaggatgcacgaaatcagctctaaggactttacctatcagattcttccgggaaccgatgaaggggagaactttaaactgaatacaaagaagacaaaagagatgtttgacgagcttttgtctgaaaatggtgaagtaccggactcggctacgacagcgaagaaaaaggacacttccacaacggcgaagaaaaaggacacggaagtctcttcaaaggggatttccattgagatacagaattccaccaggatcagcggtctcgcaggaagctggagagataagctttccggagacgggttcactgtgggcagcatcaagacaaaccgccagggtgcgctgacagacacgaagatcattgttgccaaaaagggaatgggcgaggatctgaaatcatatttcaagaatcctaccattgaagtgggcagcgttgacagcggcgcacagatctgtatcattctgggaagcaatgacgatatttagcaagacagaataaagggtctaaaaggggccatactaacaataaacaaggtttatgttaggaggcgcccggtgaaacgaaaagaagtaatcagtatcataatcggaacattttgtatggcatcagctaccaacacagtatttcagccattcggaatcgtcacaggcggtttcggagggcttgggatcatttttgataagctgtggggcatcccgctgtggatgacgaacgtcacactgaatgttcctctttttttacttgcattccgctacaagacaaaaaaattcatggcgaggaccatatgcagtgacattatgctgtctgttttcctgggagtactgcctagattctcatttttcccgaaagatttttatgtaaatctgatattaggggccattctcatggggattggacttggaatggtgatgaaggagaggacttccacggggggaacggacttaatggcgtttctcctgcatgtggtattgccgcatatgagcatcccgatgctgctgggaatgctggacggggtcatagtattgtttggtgcctttatctttggggtagagaaaaccagttatgccctgctggtaatctatggaataacgaagatcacagacagtgttgtggaagggttccaggtatccaaactggtttatgtgatcagtggacatcaggagcagatctcagaccagatcctgttccggctgggccggggggccaccaagctgtcttctgtaggggcctataccgggcagagcagcgagactctcatgtgcatcgtctcaaagaaggaagtgccggtgctgaagaagattgtcatggaaacagacccaaaagcttttgtcattatatctgacacaagagagacaattggggaggggtttgtggattatacacaataaaataaaaaagttactatctttctcttttttttttgtacattttgctatatagtagtagaaaaggtcggtaaaaagaaagggcgtgtgaaaatgatttcaaatcaaatcctgcaggagacattagacgggatccacaatatttccaatgtggatttatatgtaatagatttaaatggaaaggttttggcaaagacaaaagaaacagaagcagaggatgaggatacattaaaagggttcatcaattccgtggcggagagccaggtggtgggcggaaaacagtattttaagatcttcgacgacaagcgtctggagtatgtgctgcttgctgacggagagagcgagagcatgtatatggtggccaagatggctgtattccagattgaaaatctgctggtggcttataaggaaaggtttgataaggataactttattaaaaacctcctgctggacaatctgcttctggtggacatttataatcgggccaaaaagctgaatattgacatcgaggcgagaagggttgcctatctgatcgaggccacctacggcaaagagcagaatcttgtggagacagtgaagcagctggaggataccacggatgatgatttcattgccgctgtggatgaaaagagtattgtcctggtgaaggaagtctgtgaaaaggctcagtccaagcaatttgtcaagacggcagagaagctgctgaaaggattaaaaaaggtcgggatcaacgatgctaggatcgccattggcaccatagcaaaggggatcaaggatgtatcccgttcttataaagaggcccagatcgctctggaagtggataagattttctacgagaacaaagaagtggtggcctatgaccagcttggaatcggaaggctgatctatcagctgccgctgccgctctgtaaaatgttcatcaaggaagtgtttggagattattcaccggaggagatcgatgatgaaacactggctacgatctataagttctttgagaataacctgaacgtttccgagacatccaggcagctgtatatacatagaaatactcttgtataccgtctggacaaaatacagaaaagtaccaatctggacctgaggaattttgaggacgccattgcctttaagatcgctcttatggtcgtacagtacatgaagcatatgaatacacttggataaatgtcttagaggggagtcattcgatgattacactgcagaatgtgacgaaggagtaccaaaaaggcagcattggactggataacgtttcactggaggtagataagggggaatttgccttcattgttggaaagagcggatccggtaagacaacgctgatcaagcttttgttaaaagaactggaagccacgtctggggatatcgttgtgaacggttatcattaccagaagatgaagaaacgtcagataccgtatattaggaggcagatcggcgtggtattccaggatttccggctcttaagggaccggagtatctatgagaatgtggcatttgcccagcaggtgatcgaggtgcctaagagggccatgaagcgccaggtgcaaaatgtccttgagatggtggggctgggcaacaggctcagggccctgccggacgaactgtccggcggtgagcagcagagggttgccattgccagggctttagtcaaccatccagcgcttctgctggcggatgaacccaccgggaatttggacccgcagaacgcaaaggagatcatggatcttctggtggagatacagaagcgggggaccacggtcattgttgtgacccataataaggacattgtgaacgagatggggaaacgggtcatcgcgctgaatgagggagccgtccatcacgacgagaaaggcggcacctatgatatttagacgactggcctatggatttaaagaagggctgaaaaatatactaagaaataagatcttttctctggcgacggtgggcacgattatggcttgtatttttctgctgggagtgacattgtctgtgcttctcaatgtgagggccacggtaaagcaggcggaggattctgtgaccatctcagtatttttcgatgaaaagctgccaaaaggacaaaaggatgccataggaaaaggaatcaaaaatcataaggaggtccagtctgtccgctatgtatcagcggaggaagcgtgggccaagtataaaaaagaagtgttcaagaacaatgaggatcttctggaaggctttgagggaaaaaacccgttaaatgaatcagactcctatgaagttatgctaaaggacgtgaagtaccatgaaaagatggtgggagagtttaagtccatggacggtgtgaggaaggtagagtatgcaaaaggtgcggctgaggggatatccaaggccaatctgttgggagcttatgtggcaggagccatcatattaattctgttgtttgtctccgtttttcttgtgagcaataccgtttccataggaattgctgtgagaaaagaagagatcgcgatcatgaggctcatcggcgccactaaccggtttatcagagctccgtttatcgtagagggggcagtcatcggcatgataggctctttgatccctgtgggtgtcatttacataggatataaggtgatcgttaattatatcatggataaattccacgttctgaccaacttcatggagtttgttccggtgcatcagatcatggtatatctcataccggcatcactgctggtcggactgggcatcggatgtctcggaagcagctttaccatcagaaaatatctgagagtgtaggaggtttgctatgaagagaaagtattacaatgtactggcatttcttttgatcggttctctttgttttactgcgctgccggcagttacagtaaaagccaaaagcaaaaccgaggatctgaaggacaagtccaagaaaaaggaagaggaaaacaaacagctggaaaagaaggttgccgacatggaaaagcagatccaggagatggatcaaaagattgagaaagcatccaacaaggcggaccggctggaaaagaaactgaaagatacaaaaaaacaggtggaggttaccaagcagaagcttggtgaggctaaggcttccaaagagaaacagtataagatcatgagcaagaggatcaaatatctgtacgaaaatggaagcgccggttatattgatgtgatcgtacaggcgaagtcttttaatgaattcttaaccaggcttgattatgtctcaaagatctccaactacgacaacaacatgttccgaaagctgaggaagacccaggacagcatagcactggcatccaaaaagctggagaagagttatcaagagataaagactgtcacaaaggaggccaaggaggaagagaacaagatcgtcagtctggccgatggcaaaaaggcaaagcttacgcagttccagcagaagatcgcatccaataaagatttgatgcagaagtatcaggaccgtctgaattcctatgacacagcgtccaacaccccttccggcggcagctcgggaagcaattcctcatccggaagttccgggggcagctcttcgggcagttccggtggctcctcatcgggcagccaccattcagggggaggcagctcgtcatcatcttccctgacctggccggttccttcctgccacaccatcacctcaccctatggcaaccgtactcatccggtgcagggaggaacgaagttccatgagggcatcgatatcggcgctccgaaaggctccaccgtggtggcggcgggaagcggcaccgtggaagtggccggatacagcccatataacggaaactgggtaaagatcgatcacggaaacgggctggagacattatatctgcacaattcgtccctgaacgtttcagcagggcagagagtcagacggggacagaagatcgcatcctcaggatccacaggtatgtccacgggacctcatgttcatttcgccgtaaagaaaaacggcagctatgtaaatcccatgaattatttatgacaggacctatggaatcaggggtatgaaaaaatatcatacccctgttctttttttatctggaagattcatagtataatggatttaacaggataataaaggaaaggagcggagtatgaacttaaaacagctgacttattttgtcgccctggcaaaaaaccagaattttaccacagcggcaaatgaactgtttatatgccagtcggcgctgagcaagaccatcaaagcgatggaggaggatctgaacgtgcagctggtggaccggacggcaaagcatttctgcctgacgccggagggccggatgctctatcaggagggacaggatgcactggagagcatcaacaatcagatggagcatttacgggactgtatcaatgcggagaacggcgaaatctctgtaggaatcccgccggtgatcagtacgatttattttgcgtccatcattcagggattcagaaaagcctatccgggaatccggcttaacatagcggaggagggcgccaacacggtaaaagaaaaggtacagtcaggggagatcgacatcggcgtggtgatccttccctttgcatcagatgattttcatatcctgccagtgtttaagtcggataatgtactgaccgtcagcacggagcatccgctggcatgccgggataaggccgcttttagggaacttcgtaatgaagaatttatctctttggataagacctttatgcttcacagccggacaagggagctgtgtcatatgtccggttttgagcctaatatcgttatggagagctcccagtgggactttgtggctgagatggtatccctaaatcaaggtgtggccatcctgccgcggcctatattatcccgttttaactctgataagattaagatcctgacattgacagagcctgaattcccctgggatatcgcactgatcataagaaaagataagtatgtgtcaaacccaattaaaaattttcaaacgtatgtaaaagaacacgggaatattaaataaagaaaatgcaaagaactaaacttgagaagtaattcaggcttagttcttttttttcatgctgtctatgaattttatacattttactgtgagaatcaaccaattctataatagatttatcaaaagaattatgcaatgtgatggattaacggtaaaagggaaggagtaaagaatgggaaattgttcattgaaagtgggagatgagtgttctttttgtaaacaaatcagcaatgaggatgttctggcatttgcagaagtgacgggggataaaaatcctctgcatctggacgacagttatgcaaagaatacggtatttaaagagaggatcgctcatggaatgatcagcgccggagtcatctccgctgccattgccatgaggcttccggggccgggcaccacatatctggggcagtctctaaagttcaccggacctgtaaagatcggcgatacagtgacagcaacactgagagtgaaagagatgaaagagaagccgaagtttaccatcgccactattgaaactacctgtgtcaatcaggaaggcaaggttgtagttgagggagaagcgactgtcattccaccggaacgtaaggaggatgaagcatgtctaaattaaaaagcgcagaggaagcggtaaaacagatcaaggacggcgacactgtagcaatcaatggctttgggtttgggttcgggttcgcagaggagatcgcaaaagctctgggtgaacgctatgaaacagaggggcatccaaaagatctgaccctgctgtttgcttccggttgcggcgacggcggcgcactggaggaagactttggattggaccacctggcaaaagagggaatggtgaaaaagatcatcgcagggcatgtagggcttgcaaaaaagctgagcaagatgataaacgacaataagatcgccgcgtataatttcccccagggtgtggttgcacatttattccgcgccatcgcaggcgggaaaccgggagtgctgacccaggtaggactaaagacctttgcggatccgcgagtggaaggcgggcgcatgaatgaggcagcccagaaagaaagctttgtggaggttatggaagcaggaggaaaggaatatctgttttatcgctccattcctgtggatgtggctgtcatcaggggaacaataggtgatgaaaaaggaaatatgaccgtggaggaggaaggtgttctgctggaaacccttcacatagcagaggcggcaaaaaactccggtggaattgttatcgggcagatcagagaagaggcaaaggccggaacgctggatccaagagatgtgtatatcccgggaatcatggtggataccttggtgaaatcgaagcctgaaaatcacaaaatgaactgcacactttcatttgatccctcatttacgggagatgtgaaggtaccttctgacagcattgcccccatggagatgggcatacggaaagtcatcgctaagagatgtgccaaggaattaaagctggacaccaccatcaaccttggcatcggagtgccggagggagtggccgctgtagccttagaggcaggaattgcagaccgtctcaccatgaccattgaggcgggagccatcggaggtgttcctcagggaggacacagccttggggcgtccgcaaatgtggaggtgctgatcgggcagccgaatctttttgatttttatgacggaggaggcctggacctgacctgcttaggacttgcgcaggcagatgcccaggggaatatcaatgtcagcaagtttcacggaagaatggtgggctgcggagggtttgtaaatatatcccagaacacgaaaaatgtgatcttctgcgggagttttactgcggggaaatcattgatcgaagtaaaagataaagggcttcagatcgtacaggacggagagttcataaaattcgtggataaagtggagcagatcaccttcagcggggattacggggcagagacggggcagaatgtattgtatgtgacagagcgggctgtattccggctgacaaaggacggcctggagctgaccgagatcgcgccgggcattgaccttgagaagcatattctcgagaagatggaattcaggcctctgatctccaagaatctccgggaaatggatgctgatatatttgaaaacacaccgctgaaaataggaggagaatagcatgattggaattgttttagggcttgcactgctggtatttctggcgtataaaggatattcaattatctgggtggctcccgtgtctgccatggtggtggcgcttactggaggtctgtcactcctgcccgcttatacagacacctacatgcagggacttgtggattttgcgaaatcctggtttccgatgttccttttaggggcgatattcggaaaggccatggaagtcacaggggctgcacattccgtggcgaaaaagctgtcttctatgattggcgcacagagagcaatcctggctgtaatcatcagctgcggtatattggtctatggggggatttccctatttgtggtggtattcgctatctacccaatcgctgtctccttgttccgggaggcagaccttcccagaaggctgataccgggctgtatcgcctgcggagcatttactttttccatgactgcttttccgggaaatccacagcttaataatatcattcccacgaaatattttggcaccaatgcaatgtcaggacctattatgggaatcgcaggagggcttgtaatgcttgtgggcggttatatgtggctgtcttaccggtcaaaaaaaatgactgccgcgggagaacactttgatgaaccggacaatatgaaagagagctcatcagaaaatctgccgaaccctttcgtttctgttgttcctctgttgatcgtggtggtatcattgaatgtcctgcctatgtttatcgcttttccagatgataaaaaatccacctacgctatcattattgcgcttttgctgggcatcgcggcatcagtgttgttgaatttgtctcagttaaaagacattattgctgctgtcagtgaaggtgccagcggatctgtcatggcgattatgaacacatcggctgccgtaggttttggggcagtggtgaaagcggttcctggatttgcggtgctgacaaaggcggtcctgggaatcaaggcaagcccgctgatctccgaggcattagctgtgacactgctggcaggagctaccggatcttcttccggtggtatgggaattgcgctggaggcgttgggaccaaagtatatggagatggcagcggcattaaatattgaccctggagcatttcaccgggtggcttccatcgcttctggaggccttgattcactgccgcactgcggagctgtcatcacactgctggcagtggccggaatgacccataagaaatcctatgcggatattggaatggtaacctgtgtgataccgatattggctactatcgttgtcgttgcaatgggaatgatggggatcgtgtgacatcagtgtttacttcatgatctatacggtcatcaagtcaggtatatgaaaaaaggagcacattccagaggcgttattacaaacagtacgattttgcagatccatgaaagtatcatataacaccagatattccttggaatttacttccacgccctcagttgagggttgtgggagtttttttccggtgttataatggaacacatatttgcagggtgcttttgtatcaacaaaagaatccggacatggaggtcgatatgaagaaacagttctcaaaaattttgatcgcagttctcctggtagtatcccttggagagggattctttttataccgggcctattcggtttcaggagatcagctggaggttgcaaaaaagctggatcgcctggaaaaaaccgtggaccagtattacactggaaagatagaccaggaacagctggagaattacacatacaaaggatatctggcaggtctgggagacccgtattccacttattattcagagagcgaatttaaagagctgatggaatccactgacggtgtatttactggagtggggatttatctttcccaggatacagtgacgggagcgatcaaggtggtcaaagtcataaagggcggaccgagtgacggaagcggtatcaaatctggtgacgttctcgtagaagtagatggaaagtctgtcagtgacaaagatctggataaagttgtgtcggaagtcaaaggggaagagggtacgaaggtcaaactgtcatttctcagaggaaaagaaaaggacacaagagatttcaccattacaagaaaaaaagttgagacccagactgtcgagacaaaaatgcttgacggaggcatcggctacctttccatctcagagtttgatgaggtgacagtgagccagtttaaagaagggatacagaagcttgagaagcagggtatgaaaggcctgatcctggatgtcagggacaatccaggagggcttgtggatgccgttgtagatattgtcgatgaactgcttggaaaaggaaagattgtgtccatcaaggataagcagggaaaagaaaaggtataccgctcagatgctgcccagtcagtgaaggtaccgctttgcgttcttgtgaacggaaacagtgccagtgcgtcagagattctgtccggcgcggtgaaagaccacaagagaggtaccttaattggtgagaagacatttggaaagggaatcgtccagggcttctttaagctgggtgacggctcttatgccaagctcacatatgcatcttactatacaccttccgggcacaatattcacaaaaagggtattaagcccgatgtggcagtgaagaataattccaaatcaaagggagatcaacagctaaagaatgcacagcaggtgcttgtaaaacagctggagaaataaactattagtaagagggataaaaacttatgagaaagaaaaaggatggatttacgttagtggagctcattgtagttctgctgatcctggcaatattaatcgctcttctgatcccatccatgactggatatataagaaaagccaaggagaaggcggccatcgttgaatgccggaattgtgtccaggcggctcaggcaattctttcagagcaatacggggaaactggaactgcagccctgtcttctccctacagccaggtcctggaccaggcggaggaaaagggaaccattcaggagattcgttacaatggtgactataaggtgacctacctaaaatatactacaaagggcaaaattacggttgtctatgaaaatgacacctacaggatcatcagggatgaagcgggcggaggaggagacagcaccgagtctggtaaggatgaggaaacctccggcaaaggcgtgacgatcatagacagcagcggggcaaagcatgaaatcaaagcctcttcaaaggatggatgggaacagaaaaaggatgccataaacaacggatatggggccgggtttggaaatggcgtcctataccaggatcaaacagggctctatgcgtccgtgaacgacccgtattttggtacggaccagaataaggatcttacgctggctgacctgtcagcaaggaatcccaatcagctgatcaaaattgactccggtacaaaactgtatatcaaggatgacgtggaaaatgagtcaggtccgtatttaaagaatgttaagcgcggggatctgtgttatgtggacggcagctattatatcgctcctggtcctgtaagtgaatgggataaaccaggacaaggaaattggatcaagcttcagttttaggatcaacataagagctgcatcttcaaataatcatgagggcttctgggggtgatactcccaagaagcccttgttctattatgggaaaatctttcttcctctctgttgctatcctggtagaattatgctaaaatttattaatatatatatgagcagagtttgagaatataattttaacagatcattacatacggggtgctataaatatggagttagaatccgggatcaataagcttatttttgaatactatgaggccagaatcgtctatggatattatgaatatggagataaacttcctgcaattccaaagatctgtgcggtttttcgtatggctccggccacagtccgcgccggtttagcggccttggagaaacaaggttacatacgtattgacgcaaggaaggcctcaatggtgatctacaaagcggaccgggcaaagagacgaaagctggcagctgaatattttgtgcctagaaaggaagaaattaaggatttgcttgattccagcgacatgctgatcagacctatatgggacttggccataagccgtctgggaatggaagactgggccaggttcaaagaggaattgggacagccgtcggaatttttgggaatgatgccaatccgtttttttctgttcactctgtgtgaactgggcaacagtctgattttaaatctgtattgggaactgatccgctttctgcgttttccttatctggagatcagccggcagacggatccgggtggtcaggaatacagccataaaacgatgctggagttgagaaatcagtatgaggccgagttccgggacggcgtagacagattgtttgattttatagaggaatccgtgaaggaatatgctatggaggatacagaacagatttcatttgaatggaatatttaccgtcagaggcctcagctgtgttatacacttgtctgtcatgtgattcgcgatatcggaaagggaatttatcctgttggaagttttctgccatctctgccgcagatgtctagacactatggtgtatctgtcagtactgtccgtcggtcattgagtattttaaacagcgtagggatcacacagtccttccagggaaaagggacacagatccagatgaacgtccgagagatcaattttgaacgtcctgagatcagagacggcctcaggctttactgtgaaagcctgcagctgctgcatattacgatgcagcatgtattcttatatacatttgaaaatgtctcagaagcggataaagacatatttaagcatcggtttttacaactcctagaagagaaaaacagctatctttgctttgatatcagcctggcatttatagaggaacactgtcctcgttccattattcgggaatgctataagaaggtcagggagctgacagcatggggatatccgttcactttgtaccgtctgaacggtaaaagtatgcacatggaatactcacagatcatagagaaagccgctggttatttaaaaagcggtgatctgtctgcatttaccgactgcctggaagatttgttagaacgagaagaacacaatgtcaacgttgctttttcaaaatactaggctttttcataacacgatgtcaaaccggcgaagaggaggacttccttctgcacgttttggataaagaaaggatttatatgctgtctcagaaaaaggtattggtagtagaggacaatcagataaaccggcagttgctttgccagattttaaattctgattatgatgttctggaagcggaaaacggaaaagaggcattggaggtattaaagcagtatggggaagggatctcactgatactgctggatattgtcatgcctgttatggatgggtatacatttctgtctctgatgaaagcggacaaagcatactcatcgattcctgtcattgtcacaacgcagaatgatgcggagtccgatgagctggcggccttgtcccacggggcgtcagattttgtagccaaaccttacaggccccagatcatcctgcaccgggtggcaagtattatcaacctgcgggagacggctgccgtggtaaaccaagtgaagtttgaccgtttgacaggcctgtacagcaaagagtttttctatcagctcatccgggatgccctcatgcggaacccaacggggcggtacgatatcatttgttctgatatcgagaattttaagctcgtcaatgatgtattcggaatacctgcgggagatcggcttctccaggacatcgcacagatgtatgagagagagatcaatggaagagggatctgcggaaggctgaattcagaccagtttgtatgcatgactgaacataggcggaattataaaagtgagatattccaggaagcaaacgagagagttaatcaaatgatggaagctggaagtattgcaatgaaatgggggatttatacggtggaagaccgggagttgtctgcggaacagatgtgtgaccgggcacttttggctgcgcgcagcatcaaaggacagtatggaaaatattttgccttttatgatgacaaattgagaagcaggctgctgcatgaccaggctatcactgacggcatggagcaggccttggctgaaaaccagttccaggtctatctgcagccaaagtaccggatcgtggacggcagcctggcaggagctgaggcactggtccgatgggagcaccctgagtggggactacagtcaccggcaaattttatccctctgtttgagagcaatgggtttatcacaaagatggaccagtacgtctgggaaaagacatgtgagatgctcagagagtgggaggataaggggtattcagcgatcccggtatcagtcaatgtatccagagcggacatttataatgccgatctttccgatattttgtgcaggattgtaaagaaatacggacttgacccctccaggctgcatctggagatcaccgaaagtgcctacacagagacgcctgcccagatcattgaaacggtttcccatctgagggagctgggttttgttatcgaaatggacgatttcggaagcggctattcatcactgaacatgctgaataatatgcctattgacatccttaaactggatatgaagtttatccagagtgagacggcaaaacctgtcagtcagggaatccttaagtttatcatcagcctggcccggtggatgcatctcagcgtagtggcggaaggagtggagacaaaggaacagctggaacgtctgaaggaaataggctgtgactatgtacagggatattattttgcaaaaccaatgccgtctatggagtttgaccaattgctggcagagaacacagtaagctcgctgttcaatgtggaacgagaaacagttaggccggatgaggaaaaggagattcttttggtagcggaagaagatctctccttacgggaagagatcaagaaggaattaggggaggagtaccagatcatcgagcctgtgggcagaaaaagtcttttggaaacagtgaggggccgtgaaaatgatgtggctgccatcttattaagcctgacttggatgggaccagatacttatcttctgctgaaacagctgaaggaggacagggggtgcaggaatataccggtcattgccactgcaaatcccgatgccaagacagaggaacgggcactccgagcgggagcggatgattttataggacggccgtttttaaaagagagcttggtaaagagaatatgccgggcatctgagattaatgcttaccatttgcgtgaacaggttttgcaggatgaagaattccaagattatcagacaggactgttgaaccggaaagggctgaaggcagctgtgaagtccctcagggaagaagacatgccgctggctgtttatttattcagtttggatgaacccggacatagcagtggtataggagacaatcaggtttatgagttaggcacggttttgcgcactcacacgagaagaagtgatattttggctaggttcagcggaaatgaattcttggcagttatgaagcaggcaggatcaggagagtttatcatccaaaaaggggaagaaatctgcaaagctgtcaaaggggtctggggcggagagagaaatatcatctgttcagccggcgcagccctcctggaagatggagatacgatagccaaagccatagaacgggccgatcaggttctaagctgtacaaaagcagaaggtaagggcggctgccgcctatggagggaagagatatatgggcgaacaaatgaatgcgattgacactgtccgggagttttgcagctgctggtttgagttgcgtgatgcggaaaaaaccgccggatatctatcggaggatatcagttttatcggtacgggggaaaaggagtatgcctgcggaaaagaggagatggtccgatacctgcatcaggatattggagagatcccggagccctttgacatagagtgtcatgtgatctatgagcaggctctggatgagcaggtaaggatggtgtttgaagagatcatcctcaggaattctgtatatgcctggagagtccggggaatctttaatctgacaaagaccggggagcgctggtcaatatccagtctccatttttctgaatcggcagtaagccagggagaagaagaacattatccaaggaccttggtggtggagaatatcacaggacagcgccagaagatcctgaatgattcattggctggagggatgattggaggatatctggaaaagggcttcccattctattttattaacagaaggatgctgcagtatttaggttatgaaagcgaagaagaatttgttttagatatccatggactgcttcccaacagtatccaccaggatgaccgcatggaggctttagccagcgcaaaacgccagatggaagaaagcggcgaatataccctggagtaccggatgcgcagaaaggatggttcctatatatgggtccatgatgttgcccacaaggtggaggctgaagatgggcggcctgccatcatctctgtgtgtattgatatcacagaacagaagaaggcccagaatgaaattctgcatatttataataacatccccggagctgtatttcgatgccggtttgatgaacaattttcggttatagctgccaatgacggactttacgatttcctggggtatacaagggaagagtttgcggctttgggaaaccacatggcagcggtgatctatccggatgatctggtcatcatggcggacaggctgaaggcccagctcaaacagggaaatacaatccgcaatgaaaacagactgatccgtaaagacggcaaaattaaatggatctctattcaggcccaactgtttacagaggaggacggagaacaatatttttactgtgtatttgtggacatcacggaagaaaagcttctccaggagcgggtcaaagagctctatgaaaatgaactggcttattttgctgagttgtcatcggatggaagaagcatccagggacggatgaatgtgactcaagatatggtggaaaactatgtggctgccccggaggtggcggtgacaggtgtcggaaaaagctatcagtatacagtgcagaaactggtggagtcagcagctgaccctgcatacggtaaaaaaatcggggaggctctggcccgggaaaaggttatcagggattttgctgctggaaaggttgactataaattcgattacctgagaaaacgcaaagatggaagcgccttttggagcaatacaaacttcagatcctatttaaatccggagacgggagacattattgtatttttctatacctacgatgagacggaacaaaagatgcagaaaaaactgctctataagatcacagacttggattatgatatgatcgtagatattgacattgtccacgatgcccaccggttgtttaccttgaactcaaaagttatgaatacaattccgattcagggtaaattccagaaggaaatccgtaagatggctgatcggttcatggatgaggaaaccagaaggacgtatctggaaaacttaaattatggttatatgatcaagatgctttcagaaaatgaatcctattcatttatggtgcagatgaaggacccgaacggaattcttcaggtgaagagatgcgaggtattttacattgacaaggaacttgggcgggtatgtctggccaggacggacgtgacagacattgtcaggcaggagcagaggcagaaacaagagctggctgcggcactggctggagcggagcaggcaaatgcggccaaatcagactttttatcccggatgagccatgagatccgtacacctatgaatgccattatcggcatgtgcaccatagcagcccagtccattgggaatgatgccaaagtggaagactgtatctccaagatcggtatctcctccagataccttctggcattgatcaatgatattctggatatgagccggattgagagtggaaaaatgctgctgaaaaatgaaaaaatccccatggaagagttcctcaatgggatcaattctatctgctatgcacaggcagaagcaaagggtgttgattatgaatgtatcgtagatccggtaatcgatgatttttatatcggtgatgctatgaagctgcagcaggtgttgatcaatattattggaaatgcagtgaagtttacagaggagggcggtaagatcaccttctccacccgccgctttaaaaaggccaaaaatgatgtgactctgcgttttatcataaacgacaccggagtgggcatgagtgatgatttcctgccacatttatttgaaaccttctcccaggaaagcagcgggattacgtcagtttacggcggaaccggacttggactgccgatttccaaaagcattgtggatatgatggatggaaggattacggttcgttctatcaaaggcgtgggatcagaattcacagtggatgtgaaactgggcatcacagaggaagaaaagctccgtcacaatcaaaaacagcaccattataatttctcccatctcagtaccctggtggtggatgatgacgtggcagtgtgtgagagtgccattgtgaccctgaaggagatgggcatcaaggcagaatgggtggacagcgggcgcaaggcagtggagcgggtgaagtttttatggggaagcgggaaatattttgatatgatactgatcgactggaagatgccggagatggacgggatcgagacagcccggcgcatccggagcattgtggggccggaagtaacgatcattatcatgactgcttatgactggacctccatcgaacatgaggcaaaactggcaggggtgaacctgctgatgagcaagccgatgtttaaggcttccttagtctcagcctttacgaaggtgttctgccagaaagaggaagagaaggagcagaaagaggaagcagactttgactttaccggaaaaagagtgcttcttgtggaagacaatgccttaaataccgagatcgcaaaaatgctgctggagggaaagggctttctcgtggagacagcggaaaacggactgcgcgccatggagatgtttagcaaatcagagaagggctactacgatgctatcctcatggacatccggatgccgatcatggacgggctgacggctactaccaatatcagaaacttaagcaacgcagatgctgaaaatattccgatcatagccatgacagcaaacgcttttgatgatgatgtggaaaaaagcaaagctgctgggatgaacgcccatttggctaagccaatcgaaccggaacatctgtatcggacactgtatgattttatctatgaaatagtggagtaaaaattaacccagagacggttataatcgtaagaatgcgtacattagtttaagacctaatgtacgcattcttttataatgccatgttcgattgaaattaccttagtctctttcttaagattagaatgaagactgcggaagccagcagcacaggctgccataacccaggattcttagtgtcacctgccttcaccggttttgaatgtctgcctgccccagtgttttggtgttcgttgtttattgtcttggtttttcctttctgagaccattttgcatagagggtaaaggaatcctgcaccttcgttgtaaaatcgtatgcttccttaccttctttatctaagtaccagcctataaatgtagatccttttttaactggatttttaggctttgtgatggaggttccgtacttgacagtttgtggggacacttttgttcctccgttgctgtcaaatgtaatctcaacattttccgaggtgagaaccgcataagtggagaaactctttgcatagaattcaatacttccatttttacggtttactttttcagccgtaaggacctctgccctcctattatggacatgggcaattctcacagctttttcctggatccatgaaggctctacatggagttgaaacagcagaggagtttccagcatggaaaggtttatattttctatctgcaggaccgttccgtccggcgattcaacacggatagagattgccacagaaagatcaaaatacgcagcggcctgttcatctgcccgcatgacggaggcaaattcatgccgttcatcttcagaagcctgttcttttctttctgcctgcagggaaaggacggtaatgacggaatcatcttttccagctgaatccaacagagttttaatcttttttgcgtctccggaactcattcccgcaggtacttttcctgcagctatttcatttattatgtttctggcctgccgggctgattcagtgaccgtcgcgtctgagacggatacacctgtaccgtccggagataattcaggcacctctatctggatatttggatcagaggcaagaggtatcaggttccatttggccgtataaaccgttgtgcctgcagggaatttctcgggcagcagtatcgctttcctgcctttttggtcaaaccatccggcaaaactgtaacctttgcgggcagaaaccactggcatggtcctgtcatggatgacttcatctgttcttccgatcttatcagggattgtgaaatcatctgtttttgttttaaatacgatcctggattcttttggggaataaacagctgtgtatgttttatctccttcagaatgtccagcaaccgttacttctttttgaggggaactgatgccgcttcctgtccatccaacaaaatcgtacccttccttttgtggatttaccagagtaaaggcactgtcaaaatacgtgtacccgatgggattcttcttgcctccaggcagttttccgccggcgtaatcataggtcagtgaataagtacgcggaacaactctatagaggttgtcctgatctttttccttttggcactcaaaatgatttgcgcagtaggcgtctgagagaatgcttgaaaaacggccgccggagatagccatcgcatcatttccggcaaggttgtcaaaaatgactgcagctttctgggtcccggaaatgacccttaagtctttgtcttctgcctggtaaatctgtattgtttttatcaatgtttcctggctgttgacgctgtattcacggatggctgtatgcttaagactttttagaataccgcctgtaatggatacatccaaactcttcgcggcgccatactcgcctcctctggataaaacagacagagcagcaccgtctaaaactgaaccagtacccgggtcagcagcagatatggtgtcagctgttgcggtgatcataccgccggtgacagacagactgcctgctccgcagaactggatcccatttttaccttctatggttcctccgttgacagtcaggtaaccgtcctgcggttgataaattgctgtcccactattgcccaacgccttgactgtccctccgttgactgtgacactggtcgcgtcactagtaccgtttccggcaattccaaaagaaccgccctctaccagaccaccgttgatcacaagttctggccgcctgtcatctttcgtatcactgatgatattgattccggatgtggtgcctttgactgaggtattctgcccacggactgtaacctgcggcacagacccctcagtcggagtggcgttcttttcgattctgatacctgcaccggagatatcagccgccgggcgggcttccagctttacattgtccaggattacatttccgcagcttcgaatataaagcggcatgcatatactcatggagtcatagtcgctgctacagctgctgtaaattgctccatccctgatggttacggtgataccggctgtattgtatttattgacaagaatcgtataattttttaagccgtctatactatgtccattcaaatttagagtgatggatttatcaatcgtataatatcccactgcggccggaatatcttttaatacaatgatctcctcaccatccgaagctttgctcagtgcggtacgaagattagtatagaacagttcatttccgtcacggatgattttagctacattgttgtcctcatctgcgtatggagacggagctttggcagcacgggaaacggctgcagtggttttgtccggtgtcttgttttcttttgcaggttttgcagtcttttgaagatctgagttggtcccggctgtgctggtctgttcttctgtcttgggctcctcggtctctttaacagtactggccggcagttctgttgaaactgccgattttgtttgattatctggctcttctgcattttttgcatatagcacaaaaccattcatggacaatgctatagtaaataatagaaccagcaaacgttttctaaagtgcttgttttttgtcattttctaccccctttatcctaaccccttttatatagaaaaaaccaaaacaaaatatagttaattttagtttatacttccagttcatgtactgtcaagtactatcggaaaaccccattttacttgactcagcaggtactgaaagatagaataaaattataaagaaatttgtcatacagagaggggatgtgcgctgatgaaaaagattttagatgaatcgctggtctacgaaattctctctgtagtggaagaaattccggagggaaatgtcgccacctatggacagatcgcaaggctgatcggcagagacaaaaactccagattagtcggcacagtactgcgcagggccggtctctacggagaatatccgtgccatcgggttgtcaatcacgctggccggattgtccccggatggacggaacaaaggtatttattagagcaagagggagtttccatgaaaaacgacacccatgttgatctgaagcggtttcaatgggattgttaaagggataaaaaggagaaggatcatgatttatacggtacattatgactctccggcaggacggatcctgctggcggcaaaggaagatgcattagccgggctatggatcgaacgccaaaaatattttctcggatctgtgaaggaagagaagaaggagcaggaggatcatcctgttttagtgcaggctaaggcgtggctggaccggtatttcgcgggggaaaagcctgagattacagagctaaagctttcacctgaggggagtgaatttcgtcaggcagtatgggagattctctgtcagatcccgtatggagaagtgacaacctacggagaaatatccaaagagattgccttaaaatttggaagaaagcagatgtcagcgcaggctgtgggcggcgcagtcagccataatcccatctccatcattattccctgccacagggtggtgggtttcaacgggagcctgaccggttacgcaggaggaatcgataaaaagatacagctgctcacccatgaaggggcagatatggagcggctgtatgtaccaaaaaagagaacagcgaaataatcgaaagagggaatagccaaggactattctcttttctttttattagagatatggttgcattcccggaaggattctgctaaaatggaaggaacatatgttcttggcgctggagataaaaagtacggatccaaataaattaccaataatgtgaacatactaatcagtcttttcttgtgttatactaggtcaatatatatggaattgtaagaaactgttttaaagaaacggatttagttgaacatatcattgcaaaggaggctttgagctatggatcattttgaattagtatctgaatttgaacccaccggagaccagccggaggcaatcaaacagctggtcggcgggtttaagcagggcaaccagtttgagacgcttctgggtgtcacaggttcaggcaagacatttaccatggcaaatgtcatcaaagaattaaataaaccaaccctgatcatcgcacacaacaaaacgctggctgcgcagctttacagtgagttcaaagcgttttttcctcataatgcagtggaatattttgtcagttattatgattattaccagccggaagcctatgtgccctccactgacacttttatcgagaaggactcttcagtcaatgacgagatcgataagatgaggcacagtgccacagccgcccttattgagaggaaggacgtgatcgtagtgtccagtgtgtcgtgtatctacggcatcggtaacaaagaaagctacacggagatgatgatctccctgagaccgggcatggagaaggaccgggaccaggtgattgacgagctgattaacatccaatatgtccgtaatgagctggatttcaagaggggaaccttccgggtaaaaggcgatgtgcttgagatccttccggtatccaccttcgaggaggctgtccgggtggaattcttcggggatgagattgaacgtattgtggagttcgatgtgttgaccggggaagttaagagaagcattaactttctggccatttttccggcatcccactatgtagtgccgcaggaacagatcgagcgtgccatcgtagacattaaaaaggagatggcagagagggttaagtatttccaggaaaatgaccagctcatcgaagcccagaggatcgccgagaggaccaactttgacattgagatgatgagagagactggattctgctcgggcattgagaactattccaggcatctcaccggtggaaagccgggagaaccgccaaatactctcatcgatttctttggggatgattttctgatcatcgtggacgagtcccacattacgataccgcagattggcggtatgtattctggagaccagtccaggaagtccacattggtagacttcggattccggctgccgtcggcaaaagacaaccgcccgctggagttcagcgagtttgagagtaagattgaccagatgatgtttgtttctgcgactccgagtaagtacgaggccgggcatgagcttctgagggcagaacagatcatacgccctaccggtcttctggatccaccgattgatgtgcgcccggtgaaggggcagatcgatgaccttctgtctgaggtccataaggagacagaacaggggcataaggttctcgtgacaaccctcacgaagaggatggcggaggagctgactgattacatgagggaagtaggaatccgcgtaaagtacctgcattcagacattgatactctggagcggacagagattgtcagagatctgaggatggatgtgtttgacgtgttggtgggaatcaacctgctgagagaaggtctggatattccggagattacgctggttgccatcctggacgcagataaggaaggatttttaagatcagagacatccctggtacagacggtcggccgtgcggccagaaacagtgaaggacatgttatcatgtatgcggacaatataactgattccatggaggctgccatcagtgagaccaaccggagaagggctatccaggatcagtataataaggagcatggcatcacaccgcagacgatcaagaaagatgtccgtgacctgatcaagatttctgatgaggaggaagcggtacagtccaacgaaaaagacgttgagtccatgaataagaaagaacttaaagaaaacattgaacggctcaccaagaagatgaacaaagcggcggcagagctgaactttgaagaggctgcagcacttcgcgatgaactgaaggaatataagattgcttacagagattatgataagtaaggagatactatgaagaaggatgttatccgaatcaaaggggcgaaagagcacaatctaaagaatgtagatttagaaataccaaggaatgagtttgttgtcctgaccggactgagcggctcagggaagtcctctttggcattcgacacgatttacgcggagggacagaggcggtatatggagtctctttcctcctatgcaaggcagttccttgggcagatggaaaaacctgatgttgacagcattgaagggctgtcccctgcgatttccattgaccagaagtcgacaaaccgaaatcccagatccacagttggaaccgtgacggagatctacgattacttccgtctgctgtacgccaggatcggtatcccgcactgtcctaagtgcggaaaaccgatcagcaagcagaccgtggatcagatggttgaccggatcatggagatggaagaggggacaaagtttcagcttctggcaccgattgtccggggacggaagggcaggcacgagaagatcttctccaatgccaagagaagcggctatgtccgtgtgagagtggatggaaatatctatgacctggaggaagagatcacactggacaagaataagaagcataatatagagattgttgtggaccgcctggttgtcaagaaggggattgataagagactttctgattctatcgagacaacgttagacctggcggacggtctgatgaccgtggatatcatcggcggagagccgatgaacttcagccagagcttttcctgcccggactgtgatatcagcatcgatgagattgaaccgaggagtttttctttcaacaatccgttcggggcgtgcccggtctgtcatggacttgggtataagatggaatttgacgtggatctgatgatcccggaccagaaactgagtattgccgaaggagccatccaggtgatgggatggcagtcctgtacggataaaaaaagttataccagagctattctggacgcccttgccaaagagtttaagtttgacctgaacacaccgtttaaggattatccaaagaagatcaaggatattcttctctatggaaccaacggaaaagaagtcaaggtttactataccggacagagggggcagggtgtttatgatgtagcttttgaaggactgatcaggaacgtgggccgcaggtatagagaatcctctgagtctatgaaggccgaatatgaaaactacatgacggtgacgccgtgtgaagaatgccatggacagagactgaaagcggagtctctggcagttaccgtagcagggaaaaatattgccgagatgtgtgagatgtctgtgggagagatcttaaccttcctggatgagatggaactgacggaacggcagcagtttatcggaagccagatcctcaaggagattaaggccagagttggctttcttaataatgtaggactggaatacctgacactttccagagccacaggtacactgtctggaggagaggcccagagaatccgtctggcaacacagatcggctcaggtctagtgggagtagcatatattctggatgagccaagcatcggactccatcagagagacaacgataagctcatcaataccttaaagaacctaaaagatctggggaataccctgctggtggtagagcacgacgaggatacgatgctggcggcagaccacattgtggatgtgggacccggagctggggaaaacggtggagagatcatagcccagggtaccgcccagcagatcatgaagaacaaaaaatctgtcacaggcgcatatctaagcggaaggattaagattccggttccaaaagaacgcagaaagccggcaggctggatgaaggtgattggagccagggagaataacctaaagaacattgatgtggatatccctctcggggtattcacctgtgtgaccggcgtgtccggctcaggaaagagttctctgatcaaccagatcgtatacaaaaggctggcgaaggagttaaaccgtgccaagataaaagcgggaaagcataccgacatagaagggtttgaccagctggacaagattattgacattgatcagtctccgatcgggcggacaccaaggtccaatccggcaacttatacgggtgtctttgaccagattcgggatttgtttgctatgacaaaggacgcaagaagccgtggatacaataaagggagattcagctttaataaaaagggcggaaggtgtgaggcatgtgccggagacggtatcattaagatcgagatgcatttccttccggacgtgtatgttccatgtgaggtatgccagggaaaaaggtataacagggagacactggaagtcctttataaaggcaagagtatttatgatgttctggatatgacggttgaggaagcgtgtgagttttttgccagcattccgagcatcagccggaagatggagactctcagggatgtggggctttcttacatccgtctcgggcagccgtcaacccagctttctgggggagaagcacagaggatcaaattggcaacggagctgagcaaaagaagtacaggaaaaaccatctatatattagatgagcctaccactggacttcattttgccgatgtgcacaagcttgtagatattctgggtaagctcacggaaggcggtaatacggtgattgtgatcgagcataacctggaagtcattaaaacagcagattatattattgatatcggccctgaaggcggcaataaaggaggaacagttgtagctcagggaaccccagaagaaatatgtaaggtggaacagtcgtatacaggaaaatacctgaataaatatctaagatcataaagaactgccggacatgcattgcatgccggcagttttttgtacggcgtatcagcttttgctaatcttccatttgttttccaaggaaagaagctccgatttttgcgatggtcaaatcctgatcggttattttagaatcattggaaagaatacagacaaggccgatggcgtccccttcagcgatgatggtggccgccgcctggcttataaattcatctgggaaatctgagatgatcggcacaaacttctgatctcctttgtttgcgctgaattgtccgcggtcaatgatgatctgttctgcctgttcgtgcaaaagttttccggacaatttcttgccgtttggtcctgcggcagcgatgacagaatcctgatcgcagatgcagatcgtgtgaggaagggtggcagctatggactcagcatattgttttgccacctgccccatctctccgattggagaatatttttttagtatgatgcttccgtcatgctctgtaaatatctccaaaggatcgctttctctgatatgcattgtctttcggatctcttttggaatcacgatccttcccaagtcatcgatacgtcgtactattcctgttgctctcatgtgtttacgtctcctctcacatacatatattttcccatgtggatattgtttgcatcgagagaaaaaatataccaaaactcttttcactatgatataattaaaaactagagcaagtccaaaacaaaggattttattatcctgaagatgaaggagcagagcaatgatattaaaaattaagttatcggtaaaagatttatttcgattttctatgattcattcataccagggacagacagggatttttactgccttttgtattttggttggaattatgatgatattccggggcatcgctcagagcagtgcttattacggatttatgggtgttttgatcatggtactttttgtacttgtgacaccgcttacattatatatgaaggcaaagaagcaggcggcaacaaaccctatgtataagacagagtctgtttatgacatgcaggatgacgggatccatgtgaccatcgatgaccagaacggaaatattccgtgggatcagattgtcaagatcagatataaccggggtatgtatattttatatacaggaaagcagagcgcttttattttcaccgatgaggctctcggcagcagaaaagacgagatcatgaattatatttaccagcatgtaccggccagcacaaaacttcctaagaatgcaaaaagggcttagtgcgatggagagtttcagcagcagggatacatttcaggcaggctttttgcttgcacagcaggcaggccctggagacgtttactgtctggagggagacttgggagtcggcaaaaccgtattcacccagggtttcgcaaagggcctgggaatcgaggagcctgtgcagagccccacattcaccatcgtgcaggagtatgaggacggacggctccctttctaccattttgatgtgtaccgtatcggtgatgtggaggagatggatgaaataggatatgaacattatatttacgggcagggagtatctttgatcgagtgggccaatctcattcaggagatccttcctgatcattatacaaagattacgatttctaaaaacctggaacgtgggtttgattaccgggagatcaagattgaggagatatagatgaagattttagcattggatagttcgggtcttgtggcatcggctgcttaccttgtggacggcgcgatgattgctgagtatacggtcaacgacaaattgacccattcacagacgctgctccctatgctggatgtcataagaggacaggtaggaattgagctgactgaactggatgccatcgcggctgccatgggaccgggatcctttacaggattgaggattggagcagctacagtcaaggggctggggctggctcttgacaaaccagtcataccggtgccgtctgtggacgggctggcatatcagctatacggagcacagggcatcatctgtcctgttatggatgccaggagaaatcaggtttatactggattctacaggtttgaacacggacagttcagagtcatgaaagagcagtgtgcccaaagtatcagcgatactttggatcagttgaaggaatacaaggaaactgtgacgtttcttggggatggagttccagtccataaggaagtcatatcagagcatatgggagaacacgcactgtttgcccctgggtttgcggcaaggcagagagcgggtgcagtaggagctctggccgaattatattatcagcaggggaaagcagtttctgctgatgactttgaacctgaatatttacggaaatcccaggcagaaagggaaagagaagaacgactgagaaatgaaaaaaccaatatttgaggtaagagaaaaagatctgccgatgatcgcggagttggagaagcagtgtttttctgatccatggtcacttcgtgtgatcgaagatgccttcaaaaacaatgactattttatttatgtatggcgtgacatgaaacgcgtcagcggttatgtcataggcagaatagcagcggacgaaggtgaactgttgagagtaggcgtgcttccgttcatccgtaatttcgggattggtgcacggctggtatgtgtccttcaggaagaacttgcaaaaagacgggtgtctgcggtttatcttgaggtgagggaatccaacatccaggccatccatatgtataaaaagagaggatttatcgtccagggacgaaggcccaaatattaccgaaatccaatggaagacgctgttttaatgcgttgggacgtaccggcccaatcattaccagtagtatccgaagaagaaccttcttataatgagacccataaggaggagaatgagatgatgtgcaacttatgtggtcgaactataaaagagaaggaagattattttaagggagaaaagcagtggggatatttttcggacaaagatctggaatgccacgaattttttctttgtgaacattgttatgacgagctggtgaagaagtttaagatcccagtctcagtcaaggaaaaaagtgaagttttgacttagaaaaaaggataaaaaatgttagatgtatgtttattaggcaccggaggcatgatgcctcttccatatcggaaactgacggcatgtatgacacggtttaacggacatgacgtgctgattgactgcggtgagggaactcaggtggccatcaaggaacgggggtggagtgtaaaacctctggatgccatttgttttacccattttcacgcggatcatatcagcggcctgccgggccttctgttgactctcggaaatgcggagaggacggagccccttttgatcattggaccaaaaggagtagagcgggtcgttcagtcattgaggattatcgcccccgatcttccatttgaaattgaatttctcgaactctccggaaaaacccaggtgatcccgatggatggatatcagattgaggcattccgggttcagcataatattgtatgctacggatataatattgtgataccgagggccggaaagtttgaccctgataaggccagacaaaatgaaattccgatgaaatactggagccggctgcaaaagggggagaccctggaggctgacggccgtgtgctgaccagcgatatgatccttggggaagccagaaaagggattaagctgacctactgtacggacaccaggcctatccctgccatagccgagcatgctaatggagcggatctgtttatctgtgagggtatgtacggggaagagggaaaagagaagaaggcaaaagaatataagcatatgacattttatgaagccgcaaggcttgcaaaacaggcagatgtgggtcagctttggctgactcactacagcccgtctttagtgagaccggaagaatttatggggaaagtcagagagatctttccaaggactaaggcggggaaggacgggaagaccattactttagatttcagtgaggaataaggagcggacaatggataagattattaagatactggcaattgaatcttcctgtgatgaaacagctgcggcggtggtggaaaacggaagaaatgtcaagtccaacgttatttcatcacagattgaattacataagctgtacggtggtgtcgtaccggagattgcatccagaaagcacatcgagaagattaactacgtgatcagagaagccctcagtgaagcgggagagactctggattcgatcgacgctgtagcagttacttacggcccggggctggtaggcgcattgctggttggagtggcagaggcaaaggccatcgcttttgcaaaaaataagccgttggtgggagtgcaccacattgagggccatatctgcgcaaactatattgagcatccggaactggagccgccttttctatgtctcgttgtatcgggaggtcacacacatctggtggatgtgaaagattacggtatttatgaaattatcgggcgcaccagggatgacgcagccggagaagcatttgacaaagtggccagatccattggactggggtatccgggaggtcctaagattgaagctctggccagagagggcaataaggaagcgattaagtttccgagggcaaaagtggatgatgcacccaacgacttcagcttcagcgggctgaagtcttctgtgctgaattatttgaataagtgcgagatgaaaggggaagaagtaaaccgggcggacgtggctgcttctttccaggaggccgtagtagatgtgctgagcacccacggtgtggaagcggcaaagaatcttgggtatgaaaagctggccattgcggggggcgtggcatccaacggcgctttcagggtaaaaatccagaacaggtgtagggaggcagggctcacgttttaccacccgtctccgattttttgtacggacaatgcggctatgatcggagcggcagggtactacgagtatataaatggagccaggagcggctgggatctgaatgcggtccctggattaaagatcggtcagagataaacaattaggagatgccatgaaagaaaaaatcgttgccattgtacttggcgcgggagaagggaaacgcatggggagcggaattcccaagcagtatatgattattaaatccaggcctttgatttattatgccctgaaagcatttgagcacagtccggtagatgaggttattttagtgaccggtgaagatgagattgattactgccagaaatatatcgtggacaagtaccagtttgagaaagtgagcaagatcgtggccgggggtggagagcgctatgaatctgtctatctgggacttaaaagtatcggtgacgcggactatgttttgatccacgacggagccaggcctatgctcaatgctgatatcataagaaagtgtatcatcaacgtgcgcagatataaggcctgtgtcgttggcatgccgtccaaagatacgatcaaggtggtagacaatgatacctatgcggtatcgacacctcccagaagaaagctttggcaggtgcagactccgcagtgttttgaatttcagatgatctatgaagcttatcaaaaactgattgacagcggggacaccatggctacagatgacggtatggtccttgagaattatggggattctaccactcaggtgaagctcattgaaggcagctacgacaatattaaagtgacgactccggaagatatgaggattgcgggaagtttaatgaaggcccggaagctgtttcgttttctgcacaatgtccacgacaagatcatttattttcagatgaaaatactccagaaacggttttttaccaagagatagcaggcttataccatacgtaaaaccgacataaatcggtaagatcacaaaaaaataaattaattttaaaaaacttgttgacaagtgtaggagcgtttggtattatatacaagcgtcaccgagagaggcgcacaaaaaacaaataaaacaagtacctggagaggtatcgaagtggtcataacgaggcggtcttgaaaaccgtttgtccgcaagggcgcgtgggttcgaatcccaccctctccgttactttgaagatcagtattaactgacagcaaagtacttagggacgcttggagaagtacccaagtggctgaaggggctcgcctggaaagtgagtaggtcgttaatagcggcgcgagggttcaaatccctccttctccgttggaactttaacaagaggttccgatcaaatcgtttgagcattgcaacacgcaatactgcaaacacgaacattgacaactaaacaataagacaaccttgaaaattctaagagattttcagtatctttttgaaaaagatacaacggacgttcttttatatagaacagtaagaacaaggataagaaagctagcgctttttagatccaagattgaacatgagagtttgatcctggctcaggatgaacgctggcggcgtgcttaacacatgcaagtcgaacga

SEQ ID NO: 8 - DNA, 132145 bp, Anaerostipes rhamnosivorans
tatccaccactagaaccaatagcttcttaaattaattcctaaaatcaatacttcaaaaagttgccatttcttgacagcttaaatcagtgcgccactttttggctgtcctctactttctttcacactaaactcctaatatcggtaaccgttatttttcttttcctcaggccagtaacactctttttttgccttgcagttcatacagtccctggaaagtttatctgccctgtaaaaaagacaggaaagtctgtcactgtccggtcttctgtgtgattctaagagggaaaggatggttttcctctcctctggctcatagggagagtcaaaaagaatatccgatgcgatcagcactcccgccttcacatgaggcgttccttccgtatactgctttcctctcccgatatcatgtagaaaacctgcggcataaatcacatcttttggtatatccaggtgctgttccaaaacaaaaatataggcgatcctggataccgcaagaaagtgttctgtattatgcgggcagaagatccgccccttctctgagtcctgaatctgccggtacgctttttgatattcaggatgattgataatatatgaaagcctctccaccgattcaacctctcagttcctttaaaaatgataatgtcccgaatacaacaatgacgtcatcctgtccacagtgattcctgactttctgatagcattctctaaggcttcctcccgctgtcacgcagttgtaaaatggccttgctgcctcagccagttctttagcaggcagagcacggtcactttcaggagtcactgtatagatctcatttgacatcggagacatgatctttagcatctttaaataatccttatccgacaatactcccattatatagattatttttttatttgtaaaattcttttcaagaaattgtaaaaggctttgtgctccgtccgggttgtgcgctccatcgcaaaaaaccgcaggaaccgctgaaatacgctgtaatctcccatcccacacagcattcctgagtccatcccttatggaatcctgcagaaaaagataagaattttttaagatttgaagcacctccagagcggtcacggcattataaatctggtgcctccccagcagtccgattaccatattccggtactctgtcccgtctgtacagacataagaaaactcagcgccgtcaagagattctgaaaaaatcacaagtcgttccggatcagtgaacgtgacgggtgaatgtttctgctttgctttttctgtgatcatcccattggcctctgcattattaaaataagatataacagggcagccttccttgatgatccctgccttctccccagcaatctcttttatcgtgcttcccagatactgggtatggtcaaacccgatggatgcgatgacggtacagagaggttttgtgatcacattggttgcgtccagccggcctccgagccccgtctccaaaagcaccacatccacttttttatcgagaaaataaagaaaagaaagagcggtctccatttcaaagacggtaggatgttcttttccatccctgaccatctcctccgaggctttttttattttctccatataaaagcacaggtcatcctttgaaatgatctggtcgttgatacggaacctttcttcatagcagaaagaagcaggagagacgtatcgtcctgcttcataaccctgctctttgaatactgacgcaagaaacgccaggatggaaccctttccgttggtgcccgcaatgtgaacgatcttcaatcggtcctgtgggttgttaagccgtcttaaaagctctctgatattatcaagccctaacacactcccaaatttattagcccgtccgataaattccattgtctcctgatagttcattaaggtttccctcctgcgtcttatctttttgtctattcagatagaagagcttcttttatgacgtcctcaatcttcttcacagatatgatttctatgttatctgtgatctctttgtcaaattctttgacatccttttcattggccttcggaaccagtacctttgtcatgccagcacgttttgcggccagcattttttctttcagtcctccaatagccagcacctgtcccctgatggtcacttcaccggtcatggctgttgttcccctgacctttcttcccgtgatggctgagagcagggcgactgtcatggtaattcctgcagacggcccgtctttcggaaccgctccttccgggatatggatgtggatatcatgggtgtcaaagaaatcatccttgatcttgtattttgtgctttggctccgaatataactcaccgcagcctgtgcggactccttcatcacatctcccaaagatcctgtaacaatgaatttgccttttccagacatcgtgttcacttccacattcagcataacacctccgacgctggtccatgccaggccgtggacaataccagtctcatccttaaggctttccttctccaactcataaggtgcattgccaagataatctctgactgctttctttgtcacggtcacctttttcttcttgccctggtaaatatcctttgtgaccttgcgggatacattgccgatggccctctcaaggcttcttactcccgcctctctagtatagctgtcgatcagcagtctcagggcgtcatctttccagacgatctctttcggcgtcagaccattggcttccatctgctttttcaccaagtagttctttgcgatatggaacttctcattctcagaatagctggaaacttcaatgatctccatccggtccaagagcggcttcggaatcgtagacaggtcattggcagtggcaatgaatagtacatcgcttaaatctaaaggcacttccagatagtggtcgcggaaatgttcgttctgttctccgtccagaacttctaaaagtgcggaagccgtatcccctctttggtcctttccgaccttatccacttcatcaaggagcatcagcgggttgcgtaccttggcctggcggatggccgccacgatccttccaggcatagctcccacataggtctttctgtggcctctgatctcagactcatcccggacaccgcccagggaaagcctcacatactctttgtgggtagcccttgcaatggatcttgcgatggatgtctttccggttcccggaggacccacgaggcagagaatggccgcgtcctttttctggctcatggctctggccgccagatattccagtacacgttccttaaccttcttcaggccgtagtggtcttcatctaaaattgtttctgcttcctcaagatccatggaatcctcggaaagcttttcccacggaacatccagcatgatctcaatataagtcctgagtacagcgctctccgccgcgctgtttcccatcgcctgaaaacgtgagatctcttttttaatcttatcctttacttcatcatccgcttccatctcagagagctggcttaagaattcatccgcctcatctgcgatattggtctctccaagctcttcccggattactttaagctgttctctgagcatatactcccgctggttgtcatcgatgctttccttcaccttttcctggatatccagtctcagataagccagccttagctcctgttccagcagcaccagcataaggctgcaacgctgtttcagatccatctcctccagaagcttctgcttattctgcagggaaaacggcagatgggttgccaagtggtctacaaacacttctagatccgtctgcattaaaatatagctgtatacattggggtccatctgattccacacccctgtatatttctcaaaactttccttcagagcacggaataccgcctctttttcgtcctcttcaaatacttgctgctctgtatgctgataggcaacttctacccggaagattggctcttcttcacagatctctgtaatctcagcacggaacattccctctgcgaaaacccttatgatattctggggcaattttacgacctgccggatcttcgccaaagtaccgatctgataaagatcataagatttcgggtcttccatagccggatcaatctgattattcaggaaaatcatctgatcgttctgcatggcttcctcaatcgcacggactgacttgctccgtgagacatcaaaatgaatcaccgaatttgggtatatgtatttgcctctcagcgcaagcatcggtaatactttcttcatctgcttctccttcgttaataatatagtcatttatgccaaaaaaactgcctcaatagcaagaaattcttgtattaaagcagtttttgacttttggtcgaatgattatgctatctcgccattgctcttcttcgtcctctttttaacgcctgacggcttttttgccctatctacggaacgctcgatctccggttctgccccggattccactgtttcccttgtaatcacacatttggacacttcttcgtcagaaggaacctgatacattaactccatgataacatcttccatgatcgcccttaagcccctggcaccagtctttctttccatggccttttctgcgatcgcttccagagcctcgtccttaaactccaactccactccatccagctcaaacagcttctgatattgttttaccagtgcgctcttcggctctttgaggatacggacaagtgcttccctgtccagaggatttaaagatacattcacaggaacccttcctatgaactcagggatcaacccgaattttacgaagtcctccggcagcacctgctggagaaggcctccgatatcttctttccttccattcccgatctcagcgttgaatccgatggatttctgtccgatcctggactctatgattttctccagaccgtcaaaagctcctccgcagataaacaagatattagtcgtgtcaatctggataaactcctggtgaggatgctttcttccaccctgaggcggaacagatgcaaccgttccctcaatgatcttcaacaaagcctgctgtacgccttccccagagacatctctggtaatggaagtattttctgattttcttgtaatcttatcgatctcgtcaatatagataatgccgcactgagcacgttcaatgtcataatccgcagcctgaatgatcttcagcaggatattctcaacatcctctccaacgtaaccagcttcagtcaatgctgttgcgtctgcgatggcaaacggaacattcagcattttagctaacgtctgagccagcaatgtctttcctgaacctgtaggccccagcatgatgatattgctcttctggagatcaatatcagaggagtctcctagcaggattctcttataatggttatagacagctaccgacagtactttttttgcttcatcctgcccgatcacatagtcatccaaaaacgctttgatctctttcggtttatttaaatggatctccgtgtcatcaatatactgttcaaactcttcggcaatgatatccgcgcagacttcaatacattcatcacaaatatagacgccttttgcttttggcccggcgatgagttttctcacctggtcctgcgtcttattacaaaaagagcaacggagctgctttttgtcatcactgtgatttaccatagaattacctcgctctttctaattatgattccctcttcttgtcaaagacagcatcaatcagaccatactctacagcttcctctgcggacagccagttgtcacggtccgtatcccgttcgatgacttctattggttttccagtattctcacttaaaatgcggtttaagcgctttttcgtcttttgcatatgctctgcggcaatctggatttctgttgcctggccctgggctccgcccatcggctgatgaatcatgatctctgcattcgggagcgccatacgcttcccttttgctcctcctgagaggaggaacgaccccatgcttgctgccattcccatacagatcgtggaaacgtcacatttgataaagttcatggtgtcatagatcgctaaccctgctgatacagatccccctggactgttgatatacaggctgatatccttttccggatcttccgcttccagaaaaagaagctgggagacaatcaggcttgctgaaacatcagtaacttcttctcccaggaagatgattctttcttttaataagcgggaataaatatcgtaagaacgctctccacgacttgtttgttcaatgacataaggtactaaactcatcttaaatccctcccggttttcaatctgtcaattattttgcctggctggaactgatcaggaaatcaactgccttctgaacagcaatgtcatccatcatctgttccttctggcttccctgtaccattttttctaactgctctgtttccatctggtacataccagccatcttttctaattctttcttgaagtcttcttcgctggcttcaataccttctgctgcaacgatcgcctctaatacgagacgagtctgaattctctttaatgcctgaggttttaattcatctgcaaacttctgggcatcacttcctgtatactgaagatactgttccatgttaaggccctggtagctgagtctctgtgcaaactcatctgccatctgctgtacctgctcttcgatcatggcatctgggatgtccatagatgcattttctactgcctggtccactaaagcgttttctttttctgtcttggcagcttcctctttctgtgctctgatgttctttttgatctcttttttgtaatcttccaaggtctcaaattcagacacctcggatgcaaactcatcgtctaattccggaagttctttctctttgattcctttaatcttcacctcgaaaacagccggttttcctgctaattcaggcgcatggtactgttccgggaaagtcacattgatctctgcttcatcaccgatgctcttgccgatcagctgttcttcaaaaccttcgataaaagttcctgatccaataaccagagtctggtcttctgcagttcctccctcgaatttttcaccgtcaacagaacctgagtagtcgatcaaggtaatgtcgccgtctttgatcggacggtcttctactgtgatctctctggcatttgcttcctgttcctttttgagctgttcctcaatctcttcttttgttacgcggatcttcttgtcttccacttccaatcctttataatctcccagagttacttctggtttgatcgcgatcactgcagtaaagatgaaaggttttcctttttccagctgaaccacatcgatatccggtctggaaacgatatctaagtcagaatctttcattgattcactgtatgcttccggaatcaggatattcgctgcgtcttcataaaaaatttctactccataagctttttcaatgaagttttgaggtacctttccttttctgaatcccggcacgctgaactctgatttcttcttattataagcttttttaatcgctgcatctaatttatcaggttctacttcgattgtcactttcaccatattattgtctaacttttcaacttgtaatcccattcttacaaatcctcctaaatatcattatctttgttgtagttttatacaaacattaagtcattataccatgacgtttccggcctgtcgactggaaatacagattttacgccatttctgtcaaataaagccttcttattgtttcagaccctgatagacatattcgttggatgtctgcaggactctcggtgccttgctcacgatcttcaccgtaaaggtatcacccttcttcaaatctttcttggatacttccagcaggtgatcattgtggaatgttgtattgatcttcgcatccgctgcatagacttggcagaagttcgtgaagttgtttccttctataaatgtgctgtcttctgtctcgtatgcctttgtcacattgacctttttaattccaaacataatgtctgaggctgtaaacggattcttctggtcccagacatactgcttgccatacagcatatcatactgaagcgttttcatatctttctgataattctttgtacctttgcgtgtctggtggaaactgttcatgactccgtttttgatgttgagttttccaaggatctctgatcccagctgataagcctgaaccacaccgtcctttttctttaatccaatgttatcccaaatgaagtagctcgtctcatatttgttgccataagtcagatccttgtcatccacatccagactcggaaggtgatctccatacattacaagaactgtatcctcaccgcgcttttttagtgcattgaccagatctcccacaaattggtccatctgataaacctgattggcgtagtaagtatatttattctttaatgcttcatcctttacaccgctgacaactttgatcttcggattctctatgatctctgtttttggataatctccatgtccctgcacagaaattgtatagatatagtcctgtccctttgttgaatccaaagcattcaagatacatccggtaagaatgctgtcttttgcccatccgttttctgtccacttcttaatattcatgcattcttttgaagtaaacgtgtcaaatcccagctgtgaaaatactaaatccctgtcataaaaagcggcactgttgttatggatagcatgtgccgtgtagccgtcctcttttaacagggtagccatgctctccgttgtggtggactgcaacactgtcttgtaaggatattccgccgcaccgaagtgatcgaggttcattcctgtgatcgcctcaaattctgaattagcagttccggcgccgtaagacggcatactaagctgccctgaagaatatcctttcatatacttgtggaagttcggaaggggatcctggttgaacttgacccctttcacctgggtgatatcaaagtgggactccagctgcacaaaaataatattcggcttttttactttgccctttttctttgcctgtgcctcctcggtcctttcctcgatctgatcgaccttttcttttgaataattggaaggtttatctatcccgttctttaatgcggtgatagagaaacagtaaggtgttccgtaatccccgtaggcaatccggatattgccgatcctgtccgtgagcatattgctcctgaatccatagacagtggcgcctccgaacccggcaaatataatagcgactgcgagaatgttccttttatattgaagattctgctttttaggaagatataaaaatccaaccacaagcaggactaatacaattaaaatcagtgcccccataaaaacgatcgctgccggcgaatagtaattggtcattaccggaagaactgacttcatcagagttacatccacataggtgaatggggtgtttctcgcactgagcatcaggaaattgacaataccgatcacagaccaaagcagcgtcactataatgtaagtaaacagccttcttttcacgatcagtaccacagaataagttacaaaaatgataaacgcactgtacaaaaacattttggtcctgtcgttgacaaacccgaaaactccctggtcaaaggtctggcgcccgagaacctccaataaaaaagccatgccgaaagccagcacgatattacacaggaccggtaccttctctatccaccttccgatctgttttactatattctttaccaaagatttcatgatactctccttactttgattctatcttccaaaaagtcatacagtgtattataacattgtcattccaaagtatctactctttaattatgaaaaaattcttaaatacctgcacctgattgacagaactctgtatccatgatacgatgcccaaggaaacttttcttatggttttttgtaaagtttctagtcttgaaaaagaaaggagttatagatattttaagcgccatgcaccttctggaacggaaccctgtttatcaaagataaggaggattagaaggttaacgaggtggaaagtgatcgaaaattcggcggatgctttcccgtggctttggacacgtgatgtacagaaaaaaactgtgagtaatcgcagaacaaaggctgtacagccaaagatataaaaaccacacaaaacctaataaatgaaaggacacatggccgctttttctgaatttaaagcgacgttttatttgtgtccgcataaaattaaataaaaaggagatttcaacatgtgtggaattattggatttacagggaaactcgaagcagcagatatcttagtagggggccttacacagctggaataccgcggatacgacagcgccgggatcgcagttaatgaaggtgggtctacaaagattatcaaaacagcgggaaaggtttctaacctccgtgaaaaggtggattcttctgatgatcgcagcggaacatgcgggatcggccatacacgctgggctacccacggaggtgttacaactaccaatgcccatccccatgtagcaggaaatatcactttgattcacaatgggatcatcgaaaattacaaagaactcgctgctgccctcaaggctcagggacgcactccggtttctgagactgacactgaggtagccgctttatatctggactctgtatatgatggagacccatttgcagcaatgaagaaagcaaatgaaatccttgacggagcttacggtttctgcatcatgttcaaagaccatccaggagagatctactgcatgcgcaattccagcccattggtagctacctccacagatgacggtgcttttatcgcttctgatatggtagcgttgcttcagtattctaaagactactttgttgtgccggaagaacacattgtcgtgatgaaagaagacggcattacactttatgatatggatcagaatgtcgtatcacctaaaatgcttcacgttgactgggatactaccgctgcacagaagggcggatatgattactttatgcagaaagaaatctacgaccagccggaagcactgacaaacactgttatgccgagacttcacaacggtcttgcagatttcagcgctgacggtatttctgatgacctgtttaaaggcatcaaccgtgtcatcgtgaccgcatgtggtaccgcaatgcacgcaggattagtgggccgccacttgattgaatctatggtgcgcattcctgtcactgtggaactttcttctgagttccgttacatggatccaatcctggatgaacatacgttggttgtgatcgtttcccagtccggagaaacagccgattcccttgctgccctgcgtcttgccaatgaacgcggtgcaaaaaccctctccatcgtcaatgtcaaaggatccagcattgcaagagaaagcgatcaggtattatatacacacgcaggaccggaaattgctgttgccagcacaaaagcattctccgtacagtgcgcaggattctatctgattgcactgaaactggcagaactgagtggtaaatttacggaggtagaattatcagaatattgcaaaaaatttgaagaggccatcgccactgtgtcagaagtcctggaaatggacagctacatcaaagatatcgcagaaaagatcaaagacaccttctccgcgttcttcctgggccgcagcctggattatgccatcgcaagcgagggatccctgaaattaaaagagatctcttacgttaactccgaggcatataatgcaggagaattaaaacacggaaccatctctcttgtaaccgagggcgttccaattatcgcgattgcaacacaggatcatgtgctgccaaagatcatggcaaatgtggaagaagtcaaagcccgcggagcccatgtcatcatggtaaccgacaaagatatgtcagactacgaaggcgtatacgatgacctgatccaggtacctgccgtagatgatagattcggaaccttcggagttaccgtggcactacagcttctcgcataccacgtgaccgtattcagaggaaacgacgtagatcagccacgaaacctcgccaaatccgtaacagtagaatagacattggcattggcattgagcacttaatgaaaccgagccaaaggcgaaggttgaatttagtgcgaaagccgttaccgagactcaatgagaccgagccgcaggcgaaagtcgaatgcttagtcgagtgtaacttcctttgctcacttaatgaaaccgagccaaaggcgaaggttgaatttagtgcgaaagccgttaccgagactcaataaaactgaactaaaaaaaccaccagcatacttggctggtggtttttgctgtccgtacggattagaattatacgggaaagaagggtcaatcagaagtattacttcacttctttaagacatctaatttcttcactatggctgatgatgacgtccttcatcactgagagcatcctcgtattttgttctacctgctcactcaatctacgaaactccgcatgtggtatcctatcttcatagagagcatttaactgagggatcaactcattttctacgcggaaacatgttttcttaaccgaggtaagatcctcctccattgaggtctgtctatcttctactcctgtcaatctatcctctacccctgtcagcctaacttctacccctgtctgtctatcctctacccctgtcagcctgacttctacctctgtcagtctatcctctacccctgtctgtctatcctctacccctgtcagtctgtcttctacccctgtcagtctatcatagatcggctgaagtttaaggtctagtttctcatccagtttttggtccattatttcttcaatctttataagtaatgtattgtcgtccattctccgacctccttcttttgtgttaagtctattatatctcttatgcgcaaaggaaacaacatatttttccattttagttatattcagaaaatttctaagattcaaacttcttctgcaaaaggaatggacggtgccgctcccttacgggataccgcaatggaggatgctttcgcacacctttttaaattatccgccggacacataccgtcaatgatacccgcaatgaaataaccggtaaacgtatctcctgccgcagtggtatctaccacatctgtcggcacacaggcctgtttaatcctctctgttcctttctgatacacagcgccttcctcccccagcgtcaatacgatctctgctgctggaaactgttctgccatcacattcagtattttatccggctctctctttcctgtcatctggaaaccttcaacttcattaagcataaaaatagagattttagaaaagtcacaacagtccagcgcgttattataaggtgagggattacacacaattcgcagcccccgttcaaaagctctatcaataagataatccaacagattgatctcattctgaatcaatagaaaatcttctggtctaaactgctccagcgccttatccatttctgtcttagactgcctcatatttgctcccccaaagagcagtattccgttttgcgcattccggtccacttgtatgactgcatgtccggtctctccgtcaaccgtgcgcacaaaagcagtatccaccccgtattcattcagcacatcgaggagcatctgcccgtcacttccaaccgtaccgccctgaaagaccttcaccccggcttttgcaagtgcaatggactggttcagccccttgccgccgcaaaacgtctcccttttgtctgacgcctgtgtctctccaggctccgtgatgtggtccacctgatatacaaaatcatagtttaaagagccataatttaacaccttcataaagctacctcccagacccgtttttatcttattataacatctgtcaacataggaagaaatgagtttttcttctttattacggtgtgtgaaataccagatacgccgcgccaatcagaccacagtcttccccaagctgcgctggtacaacatgaatatgatctctcaatgctgtgtataccttttcctctgccctactctgaatttcttcaataaatccaggaatctttaaggcaacgcttccgccaagtataaacaaatcgggatccagaaccccatataagataccaataaaatttgaaaggaattcatatgcatcctccataatctcctttgccgctgtgttccctttttctgcaagctgataaacctcaccggcatgctttacagaaagtccggcttcctttgctctcttgacaatggcagtcccactggagatggattccacagatccttttttcagatctccctggaacggaccgttcctccacaaaacggaattggccacctcctgcgcaaatcccctggaaccatgatagatcttccggtctatacaaaatcctgccccaattccggtagagaccgtcaagaactgaacatatctgctatccttacccgcacctgctgccgcttccgccaagcacgccagatttgcgtcattttccaggtataccggaactcccagagcttcttgaagtctcttttctatgggcaaattatgccagcccggaagattgggcggggtcaatacaatacctgccatcaagtccaatggccccgggcaggagatgctgatgccctccacttttacctgaaagccacgaatgatgttctttattccgcaaatcgtttccccagcctcctctttgtccgtcagaaattgttctctctgtataatatgaaagtgttcatcgatcaaagccacccttgtattcgttccacccacatcaatgccaactgcatatctcatatctctccgcctttcttagatttgttaaataacaagttttctgtgaaatgaagaaaagagcagccgaagccgcccctttcctcaaacgatcgttttacccataataatattttactttatccctggaatcaaaaagtactattttatccgccaccactgccttgcaggctttgatcggctctggataaatctccaatggttccctgtattctggatgctcctttaagacctcccggcattttgcataaaaggctgctttgatgtcactggaaatgttgatcttagagattccgatcttcactgcttttgcaatctcttcatccttattgctggatcccccatgcagcacgagagggatatctaatgaatcctttaatgtctgcaaaatatccagccggagttccggtttcctatcactcggataaattccatgagccgttccgattgccaccgccagggtatcaatgcccgtctgcttcacaaaatcatttgcctgttcaggatccgtatagatgacaccggtggtgccgccctcaattgaattccctgtggttccgatggttcctaattcgctctccacagaaactcccaccagatgagccacctcacataccttttttgtaaccgcaacgttctcttcatatggaagcgttgatgcgtcgatcataacagaagtgaaccctgcccgaatggcctgcatgactgtctcaaatgtgtctccatggtccaggtgaataaccaccggcacatcagttttagatgcttcgtagatcatactttgaaccagactgtcctccacaaaatgaaactcatcgggagacatttccaggatcacgggactccttaactcttttacttcctgcatgaccgcttttaacagctggtcgcttccgatattaaatgcaggcactgcaaaccctttttcatctgctaccttcagcaaatctttcatattcatcaacattgtacgattctccttatcttctttttataatgattttccttcagactttgacaatttaatgtacttttttacaagctcacgactgtccttttctgcctggtgcatcatgacccaataattaatatccggatctttgtccagctgtcttttgatgctttccacattggcattcataaaatcacatcccacgtttattttattgatcccatattccacgcatttacggatattatcatccccggatccgcttcctccgtgaagaacaagaggcatttttgtcttttctttaatgttcttcagtatttcaaaatcaaatgcgggtacaaatccttccggataattcccatgggagctcccgaaagagattgccagtgcgtcgattccggtctctctggcaaaacgcagcgcttcgtccggatctgtcttcatatcatcatctgtataatggtctccttcactgactcccatacagccgatctccccttccacgctggcgtcaaattggcttgcaaagtccacgatctctttggtcatcttgatgttgccttccaggtcataggcagaagcatctaccatcacactggaataaccgtcaaccagagctttctttaataaaccagggtcctcaccatggtcgaaattcaacgccacctccacgctggctctctgggccagtttttttactataggagcgatcagactgctgtcgcagtgttttaccatatgctcctgaacaatattcacaatgacaggggcccttaaagactgggctgcctcaatgactgctctggctgtttctatattaaagcaattgatcgccatgactgcatagttttcttcattggcacggctcagcattcccttcatggatacatacattttcttctactccttatgaaattttaatatctgagaaatcaatatcttcctcttcctccgtgtcggcctggttttccacaggtttctttttcagtatgaacagaaggattcccgtgattacggaaccgatagccagcgccagacagaactgcagcggcttattcatggccggaacaataaacatgcctccggatggcaccggtgattccacaccccacatcatagataggccaccgccgatggcagctcccactgtacaggagaataccacacgtaccaaatcgttcatggcgattgggatgaccccttccgtgatcatacagatgcccatcgggaatgcgatcttaatattatcttcttcctctttattatacttctgcttcttcataaattttgacgccgcatatgagagagtcactccgaatgggggcaccatagatgccaggatcttcactgcctccggcccctggacaccttccagcagcaagccgtccgcaaacagcgaggcaactttgttgacggggcctccaaagtcaaaggccgccattcctcccatgatggcaccaaatacaaatttggcgctgccctgcatacttgtcaggaattctgtcaatgcgttggtcagccatacgatcggcactccaatgacaaaaaacattaagagcccaaccacaatcgacgcaatggtcggaacgatcatcatcggcatcaggccctccgcccatttcgggactttcagcttatccttcagccagagtacaaagaatccaacaatatagcctcccagcatgcctcctaaaaatccggccccgatttctttggcgatacagccgatcagcagacctggggcaattcccggcctgtccgcaatcgagtaagcaatcgccgcagaaatcaccggcgcaagcagccccatccccagcactccgaggctggttaaggcggacggcacagaaaatgattttgcataatcttcaatgacagaaccgccggtgagatttccaatggcgatcagcagaccagaagccacaaccaacggcagcatgtaagaaatggcggtcatggcatgtttttttaactgtaatttttttagcatcgttgtcctcccttttcttctctaatttttcataacttttccctggatggtcagcaacagtttcttcggggctttgatcactgcctctgtcggaacctccacgataggcaggcccttgaagcgttcttttccgccgactttgatgtccgccgcgatcagcgccacatcagcttccctgatctgttccagtgtcacctcatcttccgtccctatggtcccctgtgtttcaatatgcgcctcaaatccaagttcctgcgctgcccttacaattttttcttttgcaatatatgtatgggcgattcctgatgtacaagctgcaattcctacaatcttcattttctgtatcctcctttccttctggctgatgaactttatcctgtgaataaatcatactatagtttgtgtccctgtgttcattaactccgggctttttaatgcggaacttcttttccctttcccaaagaaaacggacagttttaacactttattccggtaatattttataagcaatattaagaaaaaaacagctccaggaaaaccggaactgtctgttctttcatcaacttttatgaaaatactttctttaaatcttccacactttctgcctcaagcagtgtgttcacagcctcatcgttccccagagtcctggcaacttccgccagaagtcttaaatgggtcttggcgttctcattgtcatttcccaccgcaaacaaaaaaatgagttttaccccttttccgtctaaagtctcccactggatctcctggtccagctttccgatggcaatccccacctgcgtgaccgaactactttttccatgaggaatggctacaaagtttccgatcccggtctgtccttgagcttccctcacataaatatccgccacatactcatccacatctgcgatatatcccgccgactttagtttttctgccagatataagattgcctcttttttatcccctgcgttcatatgcaggtcaatgactctctcatccaacacacttttaatatccatccttgtcctccttttcctttcactactgaataagatatttatacacttcaatcgttgatttcatgttccttaacattttaatcttctcctctgtatcgatcagggacacatattccttgtaaaacaactggatacggtgaatctcatctcttgtattcattttaaaaccgagcagaaatacaatctggatctgttccccatcccatataaccggtttctctaaaaaagcgatcgccacctttgattcattcacagcggtaggggatccatggggaaggctgattccattcccgatggtcgttgttgtcttgctttcacgttccatcacagtgtcataaaagtcattttttacgacaccctttttttgcatggcttcacacatgatttttaaacactcttccttggtctgaacgtttagacctgtgaagatcagttccggtgaaaacagcaggcagcattcgggagagaatgggttttcattctcgatcagctgggagttcatatcatccagatgattccttagcctgatgattccgttttcacttaaaatgttcgggatcacagcaacccttttatcctttgtcttcatgatctttgaggaaatgatcagatcatagtcccaataatcctctgtcttataatcgtgggtgctgacaaataccaattttccaatctccggtacaaactttcttatccgttctttgatcagctgggcatggcccatgttggaatccgtgatcactaatgcgttatactgatgctttttcctttccatggctgcctggatatacaacacgatgtacccgatctcatcttctgtgatctgcaggttataactctcctcaaataaaatgctgatgacccagctggcccggaatacgtttttatactcctctttaataaaatcaatcagagcattatcctgaggtgttccgtatcttaatctgaatattgtgggacgcagatgcacgatcagactttccttcaccttctgatcagcggtcaggtccacttccagcacatccccgatcatttttaacatcctgtctacaaattccaccagcttattatcatacttttttacctgctccaaagtaacttccacttcagagataccgataaattttgaacacaagatctgaatagacaaaaacagaatatcctcagacagaaaatgtacatggaacacctcctccaatttttcaaaaatagccactgtaaaagcatattccgtatatttttttaggatcttaagctcctcctgatagtaatcgctcaccaggggaatttccaactcctttcgtttgtacgctaaacagcaataaattaaaatttcataataagaatcatccgtaaaccgatatttccactcattttcggtctggataatgcacttttcaactgcccgcacatcaatgttcggaaagaaataactgatgttcgcccggatatcctccacatccgatttatccatgatcagattctttaatgccaccctgtattcattttcctggcttttgagccggtatcccttacctctttcattcactaatatgatatggtattggttcagccattcttcacattctttcagcaccttcagcatagtgggaacgctcaaatacagtttttccgataatttctgtgttgtcagtgtctgccatggacgaaggttaaaaaataacttcaaggtttcagtcatccgctcttcaggatcgtaatttcccacctgatatttttccctcctgccaaggattgcttggatctgccctttctgctcattggttgcctccagccatatcccaacccttggcttgcgccggatctctcccagattgttctgtaatagaaactcattcattccatctagcttgttccttacagatttttcagaaaggcctacttcccgagcaatttttcccgctgaaacaatctttccatccataaggcagtcaaaaatctgtttcttatagaatttatcttttgaacgtctcatcccttccaggctcctctcaataaaaatgaaatcttttttacacctccttttttgttatttcaagtatagcatagaaaaatttgcccaaattatcgagtccggacattttaatgcggtagaattttcctagtaacaaaaaagagacctccgaagaagtccctttttcatgaagctaatatgatgattctctatacaaaagcttttacgctcttatagataccctcgctgtccagtccgaattctttaatcagggcaactgccggtcctgaatgtccgaatacgtcctgtacgccaagtttcagtaccggagtcggtgctttttcactcagtacatcacataccgcgcttccaagtccgccgatcacagaatgttcttccactgtgaccacttttccggtctcttttgccgctgcgatcaccagctcgtcatcaagcggcttcacggttgccatgttgataacctttgcgttgattccgtctgcagcaagcttctcggcagcttcaaggctttcacctacgcagagtccgtttgcgatgatggtcacatcggtaccttctcttaacacggtaccttttccgatctcaaatttgtagtctgctgtgtcattgatcacaggcacagccagacgtccgaatctcatgtagacaggtccgtcaagttctgccgctgcctttacaactgcctttgcttctacatcgtctgaaggaacaatgactgtcattccagggatcgtgcgcattaaagccacatcttcacagcactgatgggtagcaccgtcttctccgacagagataccgccgtgggtagcgccgatctttacgttcaggtgaggatatcccacaccatttcttacctgctcatatgcacggcctgcagcaaacattgcaaatgtactgacaaacggaatcattccgctggcagcaagtcccgctcccactccaaccatattgcactccgcaataccgcagtcaatgtggcgttccgggaattctttcttaaatacaccagtctttgtagcggcagccagatcggcatctaacactactacgtttggattttcttttcctaattcaaccagggcgtttccatagctttctctggttgcgattttctttacatctgccatcttaacatcccaccttctctaattcattcaatgcctgttcacactgttcatcattcggagcagaaccatgccatccaacctgattttccatgaaggatacgccttttcctttgactgtcttcatgatgatggcggtcggttttcctttgcactcttttgcttttttgagtgcatcagcgatttcatcaaagttatgtccgtcgatattgattacattgaagttaaacgcttcaaactttgcgtcgatcgggtacggagagcagacatcatcaatctttccgtcgatctgaaggccgttgttatcaacaatgacaaccaggttgtcaagctttctgtatcctgcgctcatggcagcttcccatacttgtccttcctggatctcaccgtctccgagaagtgtgtaagtgcggtagtcttttccttttaattttgcagctaaagccattcccactgctgcagagattccctgtcccaaagatccgctggacatatcaacaccagggattttcttcatgtcaggatgtccctgtaagtaagaatcaatgtggcgcagtgtcagtaaatcttctttcgggaaaaatcctctctctgcaagagtggagtaaagtccaggtgcaacgtgtccttttgataacacgaaacggtccctgtcttccatcttaggattttcaggatcaatgttcatctcttcaaaatataaatatgcaaacatatctgctgaggataaagatccccccggatgtccggattttgcagcgtgtgtcgctttaatgatcccttttcggatctcattggctgttttttgtaattctgccactgtcattttttctcccaacctttcttattctccaaatactgctttgtaatctgcctggaattttgcgattccctggtctgtcaaaggatgattcatcatctgctcaatgacattgtaagggatggtagcaatatcagcgcccatcttagcacattcgatgacatggatcggattgcggacacttgcacagatgatctgagtgtcgattccgcctgcctcaaaaatctctacgatatcagcgatcaggtctaaaccgttctgggaaatgtcatccagtcttcctaagaatggagaaacatatgtagctcctgcccttgctgcaagcagtgcctgtgtcgggttgaatacgagagtcaggtttgtctttactccctcagaagataatacttttgtagcctttaatccttccactgttgtagggatcttaactaccatgttcggatgaattttagcgatttctcttccttctttgatcatgccttctgcatccgttgttgtcgcttttacttcaccgctgatagctccgtctacaatagaagtgatttctttgatgacatcctcaaactgtcttcctgattttgcgatcagagacgggtttgttgtaacaccgcagatcactcccatgtcattggcttttttgatatcttctacatttgctgtgtctaaaaagaatctcatattatcttcctcctaaaaatgaattgctacacttttgctctggtatcatttaaccatggattcctttcatttgtcaaacgccaaaaccctagtgtttatgcgatttcaaaggaaattattaataattttcatctttattaataacctctggtttttgattattgtataccagattgatgttctcaaaaaaacctcgattttatctgttttttcttttctgtttatgatatgatttttttaaagactaataaataccgttttattattaatattttcattttttattaatgaatattaattaattaatattttttttgattaggaggatttatggcttcgaaaaagaagatcaccacaaaagatattgcaaactatgcaaatgtttcccaatccgcagtttccatgatcctgaaccagaagagcaatgtgtccttttcagaggagaccagaaagaaggtgttaaatgcagcaaaggaactgggttatgaaaagaagaaaaaaaaggatacccagctgatcgggctttctaaggtcattgtcatcatgtgcccgtttctatccaaccactattattctattttagtgcactctatcacagagcgcgcccatgactacggatatgtgacatttgtggccccaaccttaagaaatcccaacactgagcagttctacctgaatatgataaaggactttgacgcgtcgggcattgtctatctctaccccacttcctggctggacgatgtaaaccagctgtccaaacagatccctgtgatcaacatcggtgacaaaaatgacgacatcatgtttgactctattcatgtaagcagcaccaaaccggcttatctggtagcagagcatctgttgtccctgggccaccggaagatcacctatgtgtccacacccatgagcaccatcgagcgttcccgctccaagcgttttgaggggctaaaaaaagccttttacgaacacggttttgatcccgggaatgtgacctgccgttctgtctccaccggggaatacaatactctttcccccaacatgctggagtattcctgcggctttaacctgaccaaagaaatcctcacggaagggacagactccactgcctttgtggcctacaatgatatggtggcattgggtatcttagacgccttgtttgatatgaagtataaagtcccaaatgatttttcagtgtgcggttttgacaacatccctatggcggacatgcgccggatctccctgacttccgtggaacactctattgaggccaagggaagggaggctgtggacatcatcgtaaggcacagggaatcccagtccaagaacaaacccagaagctttgtgacaaagcttgagtttgaaccatttatcgtgaaacgcaagagtaccggaaaggccaggaatacctaacctctccggtacacagtcctgccctccttcaccgtctcttccaccttgatctctctcagcttctggggaggggttttcaatggattttgagataggatcaccagatccgcaagctttccttccgttatacttcctttttggtcttcctcgaaataggcataggctccgttgatcgtcactgcctttaacgcctggtaaatgctcactctttcttcttccccaagcacggtcccttctctggtggtacggttcactgcgcaccagaccgtgtgcagcatgtccggagggattaccggtgagtcttggtggaaattcacacagaggccctgctcaaacgccgatctcgccggacttatgacttctgccctctcttttcccaggttctttagatggatatctccccagaagtaaacatggtccacgaacatggacgggatcattccgatcttcttcatctgggagagctgttcctttctcaccgtctgacagtggatcatcaccggccttaaatcctcattttctgccgttttcgtctgcttcatggcagctttccagccttcgatccattgctcggaagctgcatccccattgcagtgggccaggatctgcatcccgctgtttatagcatcggcggcatatcctttcacttcgctgtcctccatggctggatatccccggtactctgtttccccctcatacggtttggaaagccaagcagtcctgccctggggcgaaccgtccaggatcactttccggcctcccagcttcatatggttccaataccgtttcttaaggtccggatacttctgttccacctgttctggattctctcccaccagaatataagagaccacatccaccagcaggctgccatccccagccgcctcgtataagctctccacatcctgggcggacgcggcgccatcctgtactgttgtgatcccatgggacaggtaaagctcctgggctttgtgtatctgcgctttcggatccctgggcaccttgctgtacacctggtcaagaagcagcttcagagcttttgtctcttccgcatagccatccggctccatggaacccggcacccgcccgaacctggaaccctccacatcttttgttgtggcatcgatgcccgcggtctttaaaagcgcggagtttgcaactcccatgtgcccggaagcgtgcaggataaaaactggtacccgcccggatacctggtccagtacggtcttgtcaggatgcctcttttcctccagaaaattatgatcataacccacaccgatgatcactccgtcttccccggttttctgctccttttgatatgccagcagacgccctttgatatcctgaaaatctgtacttcctgacagatctgcaaattgggaaaattgggccacaagggaaatatggctgtggcagtcaatgaacgccggcatcaatgactttcctttcagatcgttcatctctgctcccggagaaaggcgttctgcctccttgaggcttcccacaaacgttatgactgttcccgatacgaggaccgcttccggctcttgtctgtcttcttccattgtcaggatgtctccgttaaaatatatcttgtccatctattctcttcctttctgtaaaccgttctccctgataggatttacagactgaggccattttactccatgatcagcccaaaagctctaatccgcgggtattgaccgatatggtcacatgactggactgtcccggcacttccccatccatatgataatactggggctcatccatataaaactccgctttgcggcagcgcaggctgtatactccaggacacccttcatgttttcccgccggcactttcgtaaggagaggtatcatctttctttttgatatccccgccacgatacacaggttcagaaagccatcgtccggaaccgcgccaggagaaaatttcagtcctccgccctcatagggcagattatgtatggacacaaacaggacatcagaaaacagctgttccctggcgccgtccaggatcaaacgcatggaaaacagctttgccgaaagaagccctcggagtccgatttccagataggtgagcttgccaagatgcagtcggtttaaaaacttcttactctttgcatgattgaccatgtgacagaccctggcatcatatccaatgccagaactgacaagaaaactcccagatccctctttgctttggagatctcctacatccagaggccgtacactgcagcttgagacgatggaccgaaccctttctataggatcgattgaataccctattcccctggcaaagtcatttccggagcctgcaggaacaaatgccagtttggcttctgctcctttctccattcccgaggcggcttcgtgcagggttccgtcgccgcccaccactgtgatcacatccggacaatgtctcctggtgatccgcctgacatatctctcggcatccccctgtcctctggtcagcatctcacgaaagtcaatgccctcctccataagatatttcttgatctcctcccagaaacgcatccccttacgggagcctgcgtttggattgacaataaaataatacatattcctcaaaccttcctatggaacaaagaaaagcccctttaaaaaggagcttttcgtcatatataaattataccgtgatctctgccgtcaaaccgagcaggtctttattttcctccaggatcggctggatgacttcttttacgaattcttctgtctgctgcggtgcacgtcctacgaaattcttaggttccatgatcgcttccagctgctcaatggtcattccgaaagaaggatccgctgcgatcctttctaacaggtcgttttcttttccttcttctttgacgacctttcctgcggccatagaatgtacgcggatcttttcatgaagttcctgacggtccccccctgcctttactgcgtccatcatgatgttttccgttgccataaacggaagctctttcatgagacggctctcaataaccttcgggtaaaccacaaggccgtccactacgtttaagtacaggtccaggatgccgtcgatggcaaggaacccttccggaacggaaagacgcttgttggcggagtcatccagggtcctctcaaaccactgggtggatgcaaccagggcaggattcatggcatcagccatcacataatcagccagggatgccatacgttcgcttctcataggatttctcttgtatgccatagcggaggaaccgatctggtttttctcaaacggttcttctacttctttcaaatgctggagaaggcggatatcgttggagaacttatgggcagactgtgcaataccgctcagcacattgagcactctggaatcgatcttccttgaatacgtctgtccggataccggctggcacttgtcaaatcccattttttctgcgatcatgccgtcaatctttttgatggtctcatggtctccctcaaacagttctaaaaagctggcctgggttccggttgttcccttggagccaaggagacgcatattgtcgatcacatggtcaaggtcttcaaggtcatatacaagatccatcagccagagacttgcacgtttgcccactgtggtcggctgggccggctgaaagtgggtaaagccaagagttggaagatctttgtattccaaagcgaattttgaaagctcatcgatgacatttacaagctttttcttcacgagctttaacgcctctgtcatgatgatgatatctgtgttatctcccacataacatgacgtcgctcccagatggatgattcctttggcatttggacactgctgtccgtaggcatagacatgggacataacatcatggcgcaccagcttttcgcgctccttggcaacgtcatagttgatgtcctccacatgttcctttaactcgttgatctgttcttccgtgatagaaagacccagttccttctccacctctgccagggcgatccacagttttctccatgtcttgaacttcatatccggagaaaagacatactgcatttctttactggcatagcgttcggataacgggctctgatatttatcgttcatgaattaaaatctccttatttatcataatctccgcggatattttccttcggcggctcaatcggatatgttcctgtaaaacatcctctgcagatcggaagtccttctgagagctcgtcaagtctctcggtcctcaggtaaccaaggctgtctgccccgattatatcacagatctcatcgatgctgcggttataggcgatcagctgttctctggccgggacatccgtaccaaaataacaaggccacaaaaacggcggggaactgatccttacgtggacttccgaagctcctgcatctctgagcatggatacgatccggtcactggtagtgccccggacaatggaatcatcaatcatgatgactctttttccttttaccgactcctttaatacattcagcttcacctggacactggattcccggctgctctgcttcggcttaatgaacgtccgtccaacgtaagtgttcttcacaaaggcggtcccgtacggtatgccggattccagggaataacccaaagctgcggcgttaccggactcaggcacgcccaccaccacgtcggcttctaccggtgagtccactgccagatacttgccggccttgagcctggactcgtagacactgactccatcaatgcagctgtccggccttgcaaaataaatatactcaaatacacatctggctgcttctccctttggtaggcacatgctgcagtccgactggataccgtcctttgtgatagtcacaatctcacccggctccacgtcgcggacaaattctgctcccacggtgtccagcgcacaggtctcagaagctagaatataggcattgtctctttttccgatacagagcggcttaaaaccatatgggtcccttgccccgatcagctttctcggagacataacaaccagggaatatgcccctttgacctttcggatcgcttttgccaccgcgtcctccacactgtgggtattcaccctttcccgtgcgatgtggtaggcgatcacttccgagtcaatggtcgtctgaaaaatcgccccggaatattcaagttcatgccttaactccagagcattgatcaggttgccattgtgggccagacccaaagttcctttgacataatttaataccaggggctgcgcgttctcagggcagctttgtcccgcggtggaatatcttacatggccgacaccgatgtcacccttcagttctcccaaagactcctgggtgaagacctcgttgcaaagccccatccccttcttggaagccacctgtcccttcggaccattggtatcggaaactgcgatgccacagctttcctgtccccggtgctgcagtgcaaataaaccgtaataaattgtagaagctacgtcgttgccgtcaaaatcatagactccgaagacaccgcactcctctcctaacttgtcaaaacgttctctgtccattatcaagcctctctattaaatattataaaccaagtcttctgtatacttcctcgtatgcttcttctacgtcacctaaatctctgcggaaacggtccttgtccagcttctggtttgtctctaaatcccacagacggcatgtatccggagagatctcatctgctaagatcacttcatccttatagcggccgaactcaatcttaaaatcaaccagtttgatgccgatcttcttaaattcttcgatcagtgcttcattgactttaaatgcatattctttgatctgttctacttctttgcggttggagataccgattgcataagcaaaatattcgttgatcaacggatccccgagatcatcgtctttataactgaattcaaaggtaggctctaataattcaaaaccttcttcaattccgagtctcttggaaaaacttcctgctgccacattacggatgatgacttcaagcggcacgatctcaacctttttcacaacagtctcacggtcactgagttcctgcacatagtgagtaggcacacctttttcttccagcatcttgaacatatagttggacatacggttatttacaacaccttttccgacaatcgttccctttttttcaccgttgaatgctgtcgcatcatctttatagtcgacaattaataagtccggatcttccgtcgtaaaaacttttttggcttttccttcatataataattcctgtttttccatgttttatctcctttattcttctgcttctgctgcactgcctccaagccggaggctcctcacaaatagtatcacatataaaaaaccagtgcaatatcttctattgcactgatttttatttttcgaaatacaaaaaaattattgattatcctctagaagcttggtatccggggggatcacacctctcttaagcttcgtataaatgatccgtctcacggccttatccactacggactccttgattctgccgttcttcaccgcgcttttgactgccttatatgcctgtcccagatcctcaggcatgacaacgatgttcactcctgctttcactgccttcacagcagcttccccggagctgtagttgtcggtgatagaattcatattcatggcgtcggtgaggatcagtccgtcatactccatctcatcccttaaaatgtcagagataaccctctcgcttaaactgcagggctccttttcatctgtcacattggtaagaatcaggtgagacaccatgaccgcatccgagtccgcgtccataccgctttcaaatggaagaaactcttttttcctcaactcctggatcgtctgctttgtctctaccgctccacggtgggtatcccccaaagcgtcaccacttccgggaaaatgcttcagcgtggctgagatctgctgcttctgcatactctttaccagtgtctttacaatggatgccacttccttcgcatcggaaccaaaggaccggtttccaatctccgtattgtcctcattggacagaacatctgccaccggagccagattcatattgacccccaggtctttgagctgcttgctctgttcctttcccatcttggcgatctgctggtccgtataggtctccccgatctccctggcctgaggaaactgggtaactgaatccgggagtttagaagcaatccttgataccgtccctccctcctcatctgccgctataaaaagcggtacgtgggaagcattctggagatcctgcgtaagtttcttaagctgcttttcggattccacattcttagaaaacaaaagaatgcctcccacgggatacttcttcatagtctttttcattgcagttgtaaccttagtctgtgacttgctcccggaactgtctaatgaatagacggataccataaaaagctgtccgatcttttgctttaacgacatgtcctttgtgatatccttggccattccctgcagagtagcttcgtccagatcctctgtttttgtataatccttttttccgtcaatgttgcagccgcacaataaaagacagagggccagcatcatgcatataatacgtcttctcatcataaaaattcctttcataatgaaatcattatagcatgaatcggcacctctgtcattgtccgtaatgtttaaaactttgtgtcctacggaagcgtcgggaacaggatcatggctttgaactggtcaccgtcaatctcgatcttaaattctcccccgcagttggctgtaaagctgtctgcgatggaaagtcccagtccgtttccttcactggtcctagatttctcacctctgtagaaacgctccataatctcttcctctgtaaaatccatctcataggcagaggtattctgaaccgtcagacatactttttgacctacatttgaaatagtgacaaaaattcttgttcctttcagagaatacttcagcgcattttccagtacattctgcaccacacggtacatgcggtttacgtcgcccttgaattttgtgtgatccgcctcacactggaaccgcaccttaaaacctgcctcctcaatctggtcactcatatcctctaaggtctgctccatcagcttctttagatccattggttctaatgtgaccttggcttccccgctggtggactttgcaagctcgaacagatcagcgatggtatttttcagcctctctgttttctggtttaagatcatcacatagtctcttgcttccggagacaacgtttcatctcttttgagcaggtccacgtagctgatgatggatgtgagaggtgtttttaagtcatgggatacattggtgatcaagtcgatcttcatgcgttcccctttcatctggtcttggagagatttatccagtccgcttccgatgttgctcagctgtttggatgcattataatagagggattctctcgggatgtccgcttctgctttcaaatctccctcagaaatgctctcgatctgccggatgagtctgcctaaatctttctgctgctttgccagctcatcaaaatgctctcccagatacttcatccccaggacgctgatgcagatggcgatcactgccagcagcggggacccccctatgataaacagtcccgcaaaaaagatcgcaagcatcaggtattttcccttccggtagatagaaagacgctccaccgccagacggtccgcaaactccagtgcctgtttctctgcttctcttctctgtctgtttctccggtaccatctccgaatcgtgcccacacagaatgtatgctctaagaatgtaccgtcctttaaccgccacaccgtagtctgcagacagatggagagtatgattccgatcaccagcagcacgatccccgcaaatgtcataatcgggatcagttcttcctgctgcagggccccgatggacgcagccgcaacggttcctgtccccatgaaaatcccaaatcctatgatacagaggatcacttcataccagatgcggtccagattttcaaagaaccgggcacggcttttctgaagtgcgaacaacacggacagagcaagaagtcccagaacctccgctccgagcaaaatagacatcctgaccatcagggctttcctcaaatcaggaaatgtcttgtaatgctggtccagagccttataaaatccgtcatagaatccaacctcgatcactgcggattccagtctctgctgcttggcatcatcaatataaaatgtctgaggcagagagagacttcccccgttcatgctgctcccgctgatattaaaaaaatcagacggggacatgagattttcttcgtactcatcatagctgttattggtttcggcattgctggaatacttggctttgatacttttgttggaattgagcccgtatccaagagtatcatttctgttgatcacgatcttttttataaactttggtttcctcttttcgtcttcctcaattccaaacgtttttgtcctggcttttttaccgtaaggctgaattgtcagcttcgccttgacaaagatctctttttccaggctggacggaagctctgaatcgaccccgtcataattactgtccgagagattgttttgtaccacccatctgtttaaaatacgctgtacggcctgcacatagtaatcggaatcttccatccgctcaccctttttgatcgttgcaaagtccagtccgtcattataattatccatggaatgcatctgataaataccaaacagcactccgcctaccatggctatgatcaccgcagcgatcagcccgctgttaatccatcttttccatcttgtatccaattccccataccacctttaaatattttgggttcttcggatcgatctcgatcttttcacggatcctccgaatatgaaccatcactgtgttttctgttgcataagctgcttcctcccagactctctcatagatttcctctgctgaaaagactctgccgggatgcttcatcaaaagattcaggatcttaaactctgtagctgtcaccttcacaggttccccatccacgtagatacatttgccgtccaggtccagtaccagtcctcccagcgtgagttggttcttgttctgctccgatgccgctgccttgcttcccagctgtaagtatctgcgtagctgggatttcaccctggccactaactcatccgggcggaacggtttgctgatataatcatcggctcccattgagagccccaggatcttgtcgctttcctccgtcttagcggataaaatgatgatcgggatgtttttgctctccctgatcttcatggtagctgaaagtccgtccatacccggcatcatgatgtcgatgatcaaaagatggatctcctgctccataagcacatccagcgcttccagaccattgtaggcaggtactacttcataaccttccagttccaggcgttttttgatcgcccctacaatctctctgtcatcgtctactactaaaatcctgggttgtttcataatcttcctcctctttccttcatgatcacagtgtatcatccaattctgagttttcctttaatacaattctgaaaaaaatcttacaatcgttttttcatttctttttcttcggggcataatccttcatctctgggattgcccctcctgccacagcccaaaggtaaagactggccacagtgccacagggactgtatctccttgcgtatttttgaaataatttcggtgtgatggccctgtggtggtagagcattctcattcccctctggatcgccagatcagaataacttacgatgtccggccgctgcatggaaaatgtcatcagcatctccgccgtccagactcccaccccgggaagctttgtaagctcctgtttgacctgttcatcttctgcttctgaaaggccccgaagatccaggcttccgtttaaaacacgttccgccgcggtttttatatatgccgcttttctgaaagaaattccgaagctctgcagctcttctttcgtacactgtcctaccttctggggtgtgacttctaaaagcccctctttcatccggttccagaccgtaacctgagccttggtagagatctgctgtcccacaatagaattcaccagtgcagcaaacaattcagtgtgaacttcccttttgatcatgccgatccggtcaatggcctgtcccagcaccggatccctggcttttaaatggttgatttccttttctccgtatataaaatatgccatgattctttctcctttatacttctttctattataacagaacctgatgtctggatgaaacaaaaaggaactgcatattctaaagccatacccgcctgctaaatagctttgtattccaatataaaaactaatagtgactagaaaggagcttttatgccaaacagtaaccctaacaaattaatccatgaaaaatccccttacctgcttcagcacgcccataatccggtgcactggtacccatggggagctgaagcttttgataaagccaggtcggaagacaagccagtctttttgagtatcggatatgcatcctgtcactggtgtcacgtgatggaggaggaatcttttgaagacccgcaggtggcagaccttctgaacaaagattttatctccatcaaggtggaccgggaagaacgcccggacattgacgcagtctacatgtctgtatgccaggccatgaccgggtccggcggctggcctatgtccgtctttctcactccggaccagaaaccattttttgcagcgacctatcttccgaaaacatccagataccatctgaccggccttatagaactgctgcctcagatctctgctctgtggaaacaggaccggttccgtctgcttcagatcggaaacgagatcacggaacatctgaatactgctggaacaccttacgggactgtatcccttacagaaaaggagatctcaaaggctctggatgccctgaaagactcctatgacaagtacttcggaggttttggaaccgctcctaagttccccacaccttcaattctgctctttctgcttcagcaataccgccagaccggggatcaggacagtctcctgatggcagaacacactctgaaacggatgttccagggaggcatctttgaccatatcggcggcggtttttcccgttattccaccgatgcacagtggctggtgccccattttgaaaagatgctctatgataatgcattgctcacccagacgtataccgaagcttatctatcctgtaaagatcctatcttcccagagaccgtagcatccactatctcctatgtccaaaaagagctctcccatccggagggcggtttctactgcagccaggacgcggacagcgaaggggaagaggggaaatattataccttttccgtggaagagatcctggaggttttaggtgcagagaaaggaaaagcctactgccgccggtacgatatcacggactatggtaactttgaggcaaaaaacatccctaatctgctgaaagaatcggacgttttcatcagcccggaagaattaaagcagatgaaacaattcctttatgagtaccggagaaaccggaccagcctttttacagacaaaaagatcctgacttcttggaactgcctgatgatctctgccctctcagaggcggcatctgtgttcggccggagtgattatctaaaaacagccaggaaagcggaagcgtttcttgaccgctatttgaaaaaggaaaacggccttttatttcttcggtggtgtgacggggaggcggcctatgacggacagttggatgattacgccttttactgcctggccatgctttccctgtaccgcgttacattttcggatgattacctgaaaaaagcgatacaggcggccggtcatatgatctccctgttttacgatgcccaacacggcggattttttttgtattccaagaaaagcgaaaaactcatcgcccgcccaaaagagctttacgacggtgctctgccatccggaaattctgccgcccttcaagcgctctccatgttgtaccacatgaccggagacagaagataccgggactgcatggatcaaacctttgcctgcttttccgctgatctttccgcaaatccctctgcttactgcagcgctttgatggtactgtccacggagttccttacttccaggcagctggtcatcacatcaaaaaaagagagccttcccgaagaattccagaaactgctctcaaagtaccatccgcttgaccttgcggttttggtcaaaacggaacagaacaaagactatcttgcctccatcgcgccatttacagaagagtaccctgtacaatcggataaggtatcctgttatctctgccagaatcagacctgcagtgccccggtctatgatgcccggagtcttcatgacctgttacaggcggcggattaagtctgccgcctgttccggtgtcatatgatggcatagttccccgttgacctttatgttcggtccttttgcacacctgcgggtacatctccctttgacaatcttgacagagatcccttctttccgttctttttgtgcgctctcctgctccaaagcccgcagaatctttaaagcatcttttgacccgcaggacgggccggtgcatacatgaatctcatgtacggctgaaacctccttgaatccaggatatttctttataaatgccgaaagaaaagacggcttgaccccaagccgctttgccgtttcttcctgcacttctttaggaatgcagcccaggacctgctggagctcctggagcgcccctaagatctcctcctgtccggcaggttttccctgccgttcataaaactttaagatctcttctgcctgctgattcatggcatctcctttttgctctgctcaaagcttccccggtctgtgaccatatccagcaccttcagtttctggtcccagaaggtatagcgcaccttgcagcagagactttccttgatcttgcggtccatggctccctgctccggtgcatatagttcccggcccgtcccggacaaaagctgagcccgtagcttataatccccttgtttgatgacaatcctggattcccagtccgtcttcaccctggctcccagataagtggccagcttatactcttttccgtacagatcaagggctgccagcactccgttaaaatgaagccccaaagccggtatcttggccgctgccagcataaggctgttttttccgctgtcgggaaacaagctctgggaccacacatatgcatccggaaaggagccgccccagtctttttcaatatatcctgtcccctggtcaaaattcatcctgtccccgtttaaggtaagacttccatacagtttatgccgcatactgagaatgccatgccggcactgcatgctgggcataaaccgaaacggtcccatgatgtctgaggataaatgatggatatttttataaatgatccttccctccaggtccagcccatcctcatgaatgttcagataaatccccttttcagaaaaaatgctcgccgactggtcctcttttcccgtattcagtgttacatgaaatttcttatctgatccgtaaaatgcatccgccggataagaaaaataccaagactgctccttcgtgatgatctgcagggaggaatatgccctgccttccctgtcaatatgataggccggtatgacggaaagcatctgactgcctttttgatgttttaaataccagccctcaaagtatcccttctttttctttgtcccctgaaatgcatgcgggttgttcatgtgttaaatcctcctttgccggattatcgattaaatttcctttatagtcaaatctggagccgtgacacggacagtcccaggttaattcctctggattccactggagcacacaccccaggtgaggacaggtgagagataccacaaatacctctccgttctcatctttgtatgctcctgctttcttcccctcgtattcgatcaggccgccctctccttttttgagctggtccgcttcctccttagggatcttaaacctctccagtataaatccccgggcagtctgggcgctctcctttgtcagagcctttgctgaagctttcacatgaagtctctgaggcgaaaatacatgagagaaggcattgtttctttctattatatagtcggtgatcagaagagccgatgccatggacgaactcatgccccattttttaaatcccgtggccacaaaccatcccggcctggaataggaatagtatccgatatacgggattgaatcgatggtcatgcagtcctgggcggaccattctgtatccacccggcagtgctcccaatactgtctggcagtaagcttaagcatttcatactgtcctcccagcgggttttctccagttctgtgacctccgcctcccagcagaaggtacggtccgtaagaacggaaggacaggctgtcaccagcatcaatccccagatacatatgctccatctgttctgtccccgtaagcgccaccacatagctccgttcctggtgcatcctgagaaaataatagccaggtctgttcataatcggataatgtgtggcgaagacgatattctcagcttccaccgtaccgtgttccgtgataatgcggtttccctcaacctcattcaccatcgtgtgctcatagatctccagtccttttgccgccgcttttaagaatttcagcggatgaaatctggcctgtccggcatacctgaccgccccggctacagaaaacggcagttctgtctggtccgcaaagacagcgggaagtccaagggactgggccgcatgcacctcctccttcagcgcctcatcccggaacctggaatacagaaaggaatcacactctttaaaatcacagtcaatctgaagatcgtttatcagctctttatactttctcaccgcagtctgattcatgagggcatactgcctagcctgatccttcccaacctcccggatcagtttttcgtaaatcagaccgtgggataccgtgatcttggctgttgtccctttggtctgtccgctgccgatcctgtcggcctccagcaccaatacttcccggccttccctggccagaaaatacgctgtcaggatcccggccatccctccgccgatgactgcggtttcaaccttttttgtcccttttagaggaggataagacggcatatccacagtcttttcccagatcgtatccataaaaatccctcctttcattgatttttctttttaggatggctaaaatgctgccgtactattcattccgatattgttagcactctttatgattgagtgctaattttctcttgactttccccttctatggctctacaatattatgcagaacggcagattcttgtcctgccgcagaacataaagaaaacaacgatcaatagaaataaaatgcaaaggagtgtgtatatcatggcacaaaaacatggtaacctttcaattaacagtgagaacatttttccaatcattaaaaaatggctgtattctgaccacgacatcttcgtccgggagctgatctccaacggatgcgatgccatcacaaagcttcggaagctgtcctccatgggtgaatttgaattgccggaggattataaagaaaagatcgaagtcgttgtggatgccaatgaaaaaacaatgaaatttatcgacaccggtctgggtatgactgccgatgagattgaggagtacattacacaaatcgcattttctggcgctactgaatttttagaaaaatacaaagacaaaacagaccaggatcagatcatcggtcacttcggtctgggcttctattctgcttttatggtagccgacaaggtaaccatcgacagcctctcttataaagaaggagctctgccggtacactgggaatgtgacggcggaacagaatatgacattgaggacggtaccagagaacagatcggtacacagatcactctgtttttaaatgaagacagcctgatgttcgccaatgaatccaaggtagaggaagtcatacagaaatactgctctttcatgccggtggagatcttcttaaccgatgccaacaaggaacaggaatttgagaccatcgacgaatcagagctgactgaggaagatgtggttgttgagcatatccatgaggatgccaagacggaagagaaagaaaacgaaaacggcgagaaggaaactgtggaggtctcccctgcaaaggatcttgtaaagatcaacaaacgcccggtttcattaagtgatacccatcctctctggatgaagcatccaaacgactgcacagacgaagaatacagagcattttaccacaaggtattctctgactttaaggagcctctgttctggatccacctgaacatggactatccgtttaatctgaaaggaatcctatacttccctcagattaattcagaatatgattctatcgagggaaccatcaagctgtataacagccaggtattcatcgccgacaatatcaaagaagtgattccggaattcctcatgctcctaaaaggtgtcattgactgtccggaccttcctctgaatgtttccagaagtgcgcttcagaatgacggattcgtcaagaagatctccgactatatctctaaaaaggtagcggataaactgaccggcatgtgcaagactgaccgggagacctatgaaaaatactgggatgatatcagcccgtttattaagtttggctacatcaaggatcagaagttcggagaaaagatcaaggattatattctgttcaagaacatggaccagaaatacctaaccttaagtgacctggctccagtgcctgctgacgaaaaagaaaagacgaccatctactatattacggatgaagtacagcagagccagtatatcaacatgttcaaggagcagggactggacgccgtgatcctgaaacacaacattgattccgcgtttatctcccagttggagcagcagagccagaacctggcctttaagcggatcgatgcggatgtggaaggtgcgctgaaagaggattccgatgaggatctgacggatatcacaacagccctgacagaattattcagaaaaactctgggcaaagaaaacctggacgtccatgtggataagctgaaaaatgaggatgtatccgcagtcatcaccctgtccgaggaaagccgacggatgcaggatatgatgaagatgtacggaatggctggcatggatccgtccatgttcggaggggcagaatccctgaccttaaacgccaacaaccagctggttcagtatctgtttgaacacggagatgcagaaaacacaccgatcatctgcgaacagctgtatgacctggcagttcttagcaacaaacagctccctgctgaccagatgaccaaatttattgcccggagcaataagatcatgcagatgctgacaaaataagagaagttttttagataacagaggatggcagatgaattctgtcatccttttttactgcccttttttagttttatatcgaatgccagagctctctcaatctatccttccggtgcaaaaaatgagaggacatccatctttataaatgataatatggaaccactgaattatagacaaggagggatgaaaagaattgaactgggaagaaaaactgcagaagatcatcgatcacattgagcaccatctgcagcggaaggaagagcctgtcgacactgaaaagatctcagagattgccggatgctcctttagcttttttcaaaaggtcttttcctacatgaacgggatcagtctctctgagtatatccgtttcagaaagatgaccctggccggctatgacttaaaaagtacggatatgaaagtattggagatcagctgcaaatacggatatgaatctcccacatcctttacaagggcatttcagcagttccacgggattacaccgacagaggcaaaaaataagaatgcccgactgcaggtctatcctaaaatgcagacttcctcaaagcactctttttgctggagatctgagaaaaaaagtgctttccgcctcattggaaaaagtgtccgggtatcaggttcccctgagaaagcgattccggaattttggagccagtgtcagagagacggtgtatattcccggctggtctcaatggattcagggaatccaaaaggaacgttcggcctgtgcagaatttgtgatgacctttccggtctgatggattattccatcatggtcacctccgaacagcctcttcctccagggtttcatgaacttgtcattcctgagaccgaatgggccgtctttgactgtataggtcctgtgcccggggcagtccaggccggctggaggtatctaaacgacgaatggctggatgcatatcctttccgccatgccgggtgtccggagcttgaatggtacagcagcgggaatccctatgacactcattacctgagccagatctggataccgatcataaccgaatcataaaaggagaaacacatatggatgaaaaatttcagtcattcctcgaaaccgtagatgaaaataacagggactttgtaacaaagctgcatgatattctgctggagcatcactgcaagtgcgagatcaaaactgccaaaagcggctatctggtttcctacattctacctgaacccaagcggacactggccagctttgtattccgcaaggcaggcatcaagctgcgtatttatccggagcatataaaagagtatgagagttttcttgaccttcttcctgaaaagatgaaaaaggatatacgcaaagcatccgtctgtaagagaatggtcaacccggaggactgcaacccaaaatgtattatgggataccgcttctcgatggatggagaaccctatgaaaaatgccgttatatggctttcatgccctttctgaatgaagaaaacaatccatttatcagacagtttctggaacatgaactgcagatgaattctagaaatcattctaaataacacaaaaaagaaggtatcacaccttttcttgtgataccttctgcaggcccatggttttcctgcgccatagggccttttatccgtcatgtcatattttctaagcctgttataattgtccctgttcttccctctttgccaggtctcccatgatcgtatcataccgtttgtccagcttataaagaaacagcacaatgatgacagtcacccacacaaggacagggccgaacttatatatgttcaaaatcatggccagagcagaacccggctgggcagtgcttccagcggctgagcttatgtagcctgaaatacccaacaggctcgtcatcgtggctgccgcaagcccgtttccgatctttgtccccacggaaccgcaggcaaagatcaggctttcctggcgcacatgatgcttccactgtccgaattccaccacatcacccagcattccaaagataatggaatttaacggtgccagacagagcgcccggatcacacagctgaacaacagccagacaaaactttcagggtttaaaaagaataccagctgtcctgccagggcacagactgccccaaaaagagacatattcctctttccaaatttccttaacagcaggggacagatgcacgtagcccccatgagtaccagtgtctctgtaaaatacagcacgctgtacatccagctgtcattataaagtatatatttacaatagtacggaaggatcgttcctgtcaggctgtaaatgacattctgcatcatccacaggaccagtactgcccagaagtactggtttgtgagtaaatacttcatagacttcagtataggctgcttctccttttttgtctccgccgccggtatatggacattttctttgcagttgataaagcagaccagcagcaggatcagcgcgatcaccgcccagatcgtgatcgtcttgacccaggcagcctggtcattgcccaggatctttacaagcggaagcgaacaacccaccgccatgatccgcccgaacggggacatccccatcctcacaatgctcagcatatcacgctctgtagaatttctggtcatcatggcagacagacttccatagggcaggctcagcatagtgaaacatacggtattacacaggttgtaagtgataaaaatgtagaccagctgcagaagatctgtggtcatgggcactgtgaacaaaagtaccacagaaatggagtacggcagcgccatccacaaaacccacggccttgattttccccattttgagttggtccgctccacaacaaagcccataatgatgtcagagcatccgtcaaaaagccttgagaccagcattaccacaccgatggccgccacggagacacccacataatctgtataaaatatcgtgagcaggcttccgatcatcccgtaaaccacattgatcgccacatcgccggagccgtaggcaaagcgcaccctccaggggatacttttaaaactattgtcagtttccgtcgtctgtttctccatatctttcctccataaacagttgttttccggcgatggcttattcgttggcaaacggatccaggatcacttccaatgcttctcctttctgcattgcctttaaccctgtctcaaaatcttccaagggcagcttgtgggtaatcatctttgtaaagtctactctattgctggacaagagatttgccacatttttcagggtgtaattgccgataaagttgccataaaccgtgagaccccttgctgtgatatcgttctggcagatttcctgtctggcgacgccgttctgtccgaagagcagaatgcttcctccgcttttgactgccatgagagcgtcgttgatcagcactcccactgcatcgatgacgatatctgccccgtttccatctgtctcattcaacacttctgtctttaagtcctctttggcaggattgatcacccggtctgctccctgggctttcgcatactccgtacggaaatccgatacctcagaaacaagaacttttccggctccgcaggctttcatcaatgtggtaaagtataatccgatcggtccgcctccaagtaccagggcggtatctccaggcataactttcagctttttcactgcgcccatgacacaatttaacggctctgcaaaaatggcctgatcaattggaatctcctttggaatccgcaccatctgtttttcaggagccaccgcatactgggcgaatactccgtctttatggacacccatggagcccatgtgcttacacaggttgctgtttccggtctggcacggtgtgcagactccgcacggcacattgttatccaggatgatgtggtctcccactttcagatccatcacgtcactgcctatttctgtgacctcacccacacactcgtgtccaaggatgattcccttgtttgcctcgatcccaggcgggttgcgcaggatatgtacatctgtgccgcagatgcttgcggccaggatcttgatctgtacatcgtctccgtggcagacctttggaacaggcctcttagtatattcaaattctcctaaatctttaaatacgattgcattcattttatcactcatctttttctccttccagatctccgtttatttttcatccaaatatgcctgatgcagtttctgacagaacttaaggctcatcgtgccgtcatgggctgtcgtctccgggctgcgtccgttctctatgcagtccacaaaattctccagttcattataaaacgcgtctccccagcggttcataaagtcctcctggcattcctccacatatcctttctctgtaaaagaagacacataatttttcctcggcacgctgtttacacggatggtgccttttgttcccacgatctctgattccacatggctgcatgtggcagttcttcccacctggatgtatgcagttgccccattgtccatcttggtcagggaaaatccgttgtcatagtcgtcatattcctccaaccctttgcacacataagcgcctccaaaagcatggcagtcctcgggatccccttccaggaaccaccgtgcaaggtctgtgtcatggctgcccatctcgataaaccacggtacatagattccgtttttcacaccttctaagtgggcgtccagcacagtggacggatccagactgacccctttaaacaggatcggtgtaccgatctcaccgtttttgatcttttcctttgcctctgcataagaaggatcaaatcttctcataaatcccacagtgaagcacttatctgaattttctcttactgcctcttcaatggccaggcagtcctccacctttttcgccagcggcttttcacagaagatatgcttttttgccttgcaggcagcaaccacctgatccttgtgggcgtctgcccctgtggcgatcaaaaccgcgtcgatctctggattttgaagcatctcaccgcagtccgtatagccgtaaggaatgccgaattcttcctggactgctttgacctgggcctccctcatatcacatacggcgatgacttctgactgcgggatacggcagtgaaggttccggatacgcatgcgtcccatatttcctgttcctataattccaaatctgatctttcccatagctttttgtcctccttacagaccggttttttctctgatatagtttcttgccatgactgcgtattcaaatggattagcctttgccggatcctgttccgcctccacgatgaaccagccctcatagccagccttgtcaagctccgcaaaaacaccgtcataatccacacatccgtctcccggaatcgtaaagcatccttccagcactgcttttctgaatttaaagccttcttcatatgcctgattcattttatccctgcggatatctttcagatgcacatgtccgattctgtcaccgaacagtctggctgcttccaccgggtcctcatctgaaaacgtaaaatgaccagtatcatagcagagaaatacatatcgtggatctgtatggtccatcagccgttttgtctccgcagtggtctgtaccaccgtagccatatgatggtgaaagcacagtttaaacccacggtctgcggcgatctttcccaacttgtcaagtcctttgcacagcagctcccactcctggtctgttgcctttggcttgttgtctccaaacatagaggtctcctctgcaaacagacatcttgtcagttcacagacattgatgcgggatgcccccactgcctccagaaagtccagctgtttgataaacgccttttcattgtcttcgtacggttcggagcagagaaaggaagaaaaccactggctggcgatttccatatttctcagttttaaagccttattcagtactttgggatcggttgggaactttcctcccacctcagtgccctggaatcctgccagggaagcctcggagaccatctgctcaaaggacaggtctccccccaactgaggcatatcgtcatttgtccacccgatgggtgcgattcctaatttaacattttgaaacttcatggttctcctcctttagcataattcccactgtctgctctttacagatttcagaacagcgctgataactccgtccacttttgcgcccatagaaaaacttccctcatagctgccgccattcatggcctgcatcagctcatgtgcctgcagtgtcttcatatcgtcaaaggcaatggcgatgcctcctgccggctgaaagtatttgaatccgttgtgctccggatttaaaagaactgtgcggaaaccgcagtcccgtccgttgtccttatctgcatctgccttgaaataaacctgtacctcacacattctctccagatcataaaccacggtaccctcggttccctggatctcataatagaagtaattctttctgcctgtggcaacccgggatgctgagatatctccgatggctccgtttttgtattttacaaggaaggtgatcagatcatcattctctactgttcccatctcgtttttgcctggaagcggacgttctggtatgacaatagaatccacggcgttcacctcttgtatgtcccccaggatcatctgggatacagagagcagatgacttgccagatctcccaaggcaccggaaccggcaaatttatttacatgtctccatgtgatcggctgcttcggatccagcagcatatcctggtcgtaggttgcatggattctcatgatcttacccagttttccgctctgcactaaatcctttacatattggttagcagggttcatgagatttgaaaatccacagtaattgaccacgttcttttctgccgccaggtccgcaaggatctgtgactgttctccagacagggacagcggtttctcgcagaagacatgttttccgttttctaaagccgccttcaccatctcaaagtgcatgctgttgggagtggccacatccaccagatctatgtccgggtcttttacaatgtcggtccagtccgttgtataacggttgtagcctaaggactgagccatgttctttacttgttcctcgttcacatcagagatcatctcaaacactggcacgtcatccccgaatatcatttttgcgttgtggaatgcggttgtatgtgccttccccatccatcctgctccgattaaaccaatacgaattcctttcattttccgatcctcctatacaagattgtgttttcatccataataatatattgttattttccgcaagagaccagcgcactgcagcaacggctgtaccgctttctgatcatgataaaatatgccggcaaaatcatgtttgactctttacatgttgtattgtacaataatccatacaacaaatcactatacaggattgtcaggaaataataaaaaattgcttttcaaaggagaaatgtatgattggagagaccggagtattaaaagactcagagcgctactattatgaacctgatccgtttaccgctgagcatctgttttattctccccacggaggggcctaccactgtgacaaagactactctttaagcagaaattctctggatgtaaaccagatcattctggttgattcaggaaccctcacagtagagtacgaaggggagacaaaaacagcccattcgggcatgatcgtgcttttagactgcagaaaaccccacagatattattccggcggagatgatctgcgcatgagatggtttcattttaccggcaacacaagccatgcctatacggatctgctgctggaccagcagggatttgtcatcagttccgccgacctgatccctgagatcgagcactgctgcgagcggattctcatgctgtatggcaatgcggaaccgtctccacatgtggcctcagtctatcttcacagactgctggccttactggccatcacctccaaagaaaaaaagaaaagcgaactggagctttccattgaaaaaacagcagaatatatgaaagggcacctggaagagaaagatatctctctggaagttcttgcggaaatggcaggtctcagccattattactatttgagaaagtttaaagaaatctacggactgacgcctcacaaatatctcttaacccagaggctcagaagctcaaaagaattgctgaccacaacctccctgagcattgaggagatcgggcttacatgcggcttttccaatccatcgcattttattatggctttccggaaaaataccgatatgacgccgtttcagtacagaaacttttggcgttaaaaattcgagtgccaaatgcgattagcgcagtcaaatgattaccttacgcattctgtgtgcatccccgcggagcgtttttttgttccatagggagaactttcctatggaataataaaaagccccctctgtgggggctctaaactttacagaaccggaatgtgatttcaaatccaccggcattctgttccgggatcccgatctggattccaaggctgtctgccgtctgttttgccagataaagccccatcccggtggagttctttttcttttcaccagtatctcccgtaaagcctttatcaaagagaaacggcaggtcatacggcttgactcccataccattatcccggaccgccaaaatgatgtcccccgtctctttataatactttgtatatagatggatgctggccgtccccgcttcatgcactgcatatttgatggagttgctaactgcctggcggatcaagaaagaaagaccctttctgtctgacagcacactgacatcttccacatcatttataatggatattttcttctctttcagcagattttcataaccttccagcacttccccgcagatctgaggcagtggcagccgctcaaatatataatctgtacatgccgtccgaagtcttgcatagtacagcattctctcaacgttctcttccatatcggtccttgcatattccatcctctgatagacaacgggcgacatctcatccttccggttgtccagaacaaaggtcatcagtgccagcggcgttttgatttcatgagcccatgactcgatgtattcttcatattcctggatgtccgcctcctggtccctgatctgccgttccattttttcaaacagggtccccatcagtttcagcgcctctttttcctggccattcatctgttgaaatatcatccggtcctttaagatgcctggatcttctataagtcgcaaaaaggcctgttcttttttccggtctcttctgtccagccaaactcccagacatccatataaaataatggtggccaggatcacggaaggcaaaatggcataaaaacctgccgcatcctgcagccacaaaaatatacagaatatgagatccagggccaatgtaagcaccagccattctttatatttcacgacaatacggatcagtctgtcagtcatccttttctccaatctgggcaaggcagtatcctatgcctcttttggtctctattttgcagggcaaatgcagcttgttcattgttttctttaatcttgtcatatttacctgcaatgcattctcatcgatgtactccgtagtcccccaaagtgtctcaaaaagcatggattttgtcaccgtttcatccggatgcgccaaaagaagttccaggatcttcccctggttttcgggcaggatcgcagactgtccgtccatatacaccgtgtaggtctgccggtccagcctgatcccttttaactctgcgaaccggtccctgtcctcagatctgcgtagcagatttaagatccgggcagtcagcctttccttatggcagggctttgtcagatattcgtccgcaccaagtccaagggcgtgcagctcatcctttaactggtccctgctggtcagcacaaggattggtaccgtacttctctgcctgatggatttgcagatctcaaaaccagtgataccgggaagattcagatccaggagcaccagatccggggacccatccaggatctctctggcagcatccacaaaggatacgagacactctgtctcatatccttccttctccaaaatcgacacaagctcttccctcataaaaagttcatcttccgcgatcacaatccttttcatctcatccgcctttcagccgtcgtctctctttagctctgcctgccttaaaatctgtcggtcactctttttcataacagccagtatatagcctaattctaccacacacaaaataagaatcataggcacggctgccgctgtcaaaagccccccttttccctgcaggtcagcaaaggcaaagcctgtggccagtgatctgaccccgaacaggctgcctgaggcagcaacagatactggaagcaggaagaaccatttgatctgtcttctcgctgattcacacagatatttgatgtggcatccaaggtgcaggactgtccggtatctctttgccgtctgctgctgatgcatcaaaaactgtactcccagcactgtattggcgatcagcagaaagaccgtacccaaaaagatggtcgtatagctggctgccaccgtgtaaaacagctgtctccccatactgttcaggtagctttcgtacttcagggaagtcttatcaagcttctcattgatgtccataatcgtctgcataagccctttctcccttaccacatccctcttcagtactgcgttccagtaagagtcataggttccgcctgtcagctgctcaaatacctggtccggcacaatgagtccatagcttatggtgatcagacggtccgttacaatattctcctggcagagtgtatccgacagctggtacctgtcatgattcatttctacactgggacgttttttcagggcacgctttatgactctgtctgaatcctggtttgtatattcccggctgttatacagggctgcctgacggttgttcagacgtatcggcggttctttcttcagttttagaatacggttatacccggtaagcgaaatcagataaggctcgttaaaatactgcaggttgtttaagagcacggtcctgccctcggaatcctcctgtgttctcacagcttcccgcagttcgtctccagaaaaagttccctcttccctactccctttgaataaccctgttttcacttggaatgattcctgcatataggaatccacttttatccgggccagttcttttttgatctgtccgggctccccctcaaaggtataatcgatgactcgctggtttttcaggccggaatttaagctgacagaagatccatatccaaaacagcagagtgcagccagcaaaagcagtgaggagaccgctatggaatccggccggagcacaatcgtctcctggatctggcggaacgtgaaaactgtcagccccttctcgcttcgcctccgcctcagaaacagatcaaataggattccgatgccgcggaaaagaaggaaagtccctgtgatccccagagccatggtaatgcccatctgacctgccgacttccatgcgtttcctttcacagccttggcataggcggctgccagcataaggagactcactgccagctgtatggctgtcatataccttttatgcaccttatgccgtttatcctgggattctgacagcagctgggtgatctccttcgccgcgatgctgccgctttgaataagcagcgctgccagccggatgacaaggtatccggccacggtccagatggctgcctggaaagaaaacgtaaaacggtgccccacgatacccagtcctaccgcttttgcggtaatcaagctgatcagttccgaaagcagcactgcaatgggaattcccgctgccaatgacagaagactgttccatatatcctcggccaaaagcatggaaaacagtcttttgcgtcccattccaaacatcaggtacatgccaaactcatggctcctctgctccagctggtatttccctgaaaaatatacgaggaaaaacagaaagaacagagagaccatatagagtacagggatcagcagaaacagtctgtcaacggcatcgctctccatttttttcaggaacagcatcacatcctggttctctaaagacagaatcacatagaacgcaacgatggatattacaagggatataaacagcagtccgttatccttccggttccgcctgctgttttttctcacgatctcaaagaacattggcacttccccctcccagctgggccagcacggctatgatcctctcatagaactccggcttggattcccccggagtctttttcctaagctgatgaaaaatgactccgtcctggataaaaagaatcctggaacaatagctggctacattggcatcgtgtgtcaccataagaatggtggatttctgctccttgttcaaatcagacagtttttgcatcagaagcttggcatttttagagtccagtgcccccgtaggttcatctgcgagcagaatctccggattcaacaagagcgctcttgccgctgccacccgctgcttttgacctccggacagctccgatggaaacttgcccagaatgtcactgatctccagacaggctgccagctcatgcatacgctgcttcctgcctcctgcattatggatcgctgccggcagcatgatattttcttcggctgtcagattgtcgatcagctcaaagttctgaaacagatatcccatctgtctccctctataaacatccaattcttttctggtaagcctgctgatctcctgtccgtttaagaagatcttaccgccggtgggacgcgaggccgtggaaatgcagtttagaagagtggtctttccagacccgctgcttcccataattccgatgaactccccgtccacaacctgaaaactgattccgtccaaagcctttgtaacattttctttttttccataatactttctaagagactttatctctaattttttcccggtcattttctatcctttctcacagtcagaaacctctgttattcgtctgaccctattatacaaaataataccgtgagaaaacacttacacttcctgtaaggttttgatggaaggatttttggcaaaacaaagctgcacactgaaaacagcaggcgggatcgtgttttcctgcctgctgtctgtctttattttgttctcacggtcttcaccttcgtataggcgctgtaaaccttctttccttttacaatccgataagaacgcagcttataataatacttatggtttgcggtaatgccgatacttgtatagcctgggatataggctctggaatccttgagcatcttatatttcccgtctttgctcctggcacggtagatccggtaaccgtggccgccatctactttcttccagaccaccctgatgcttcttctgccgggctttaacgtaaacttgggcgcttttgtcctcggcactgctttcacttttttagagaagcttccatagacggtctttttgccctctttcttataagcgcgcaccttgtagtaataagtctttcctgtggtcagctttttgttggtccaggagccggctttggtcgtcttcacctttttatactttccgttcttttttgatgcccggtagatctgataacctttgactcctttcactctcttccaggaaagcttcactgtcttataggtcgtggaggatttcacatttggtgctcccggcacaagcttcggaagtttctccattttcatagcgtgaccgcagattttacaggaatacgtcttcacacctgtctgggtataggttggtttttttgttacgacacccttgtttttctgatggggtgcatagccgttcatattcctcttatccttcaccggacaggccgctgctttgcatttgtgccaatgatgcgtatcgtcgctgctccagtttgacagccagttatggacatgatccattgttacagtgatcttcgccgctttgctggtgctgacggcagttttcgctccggttgcctggttattttcattggtcacaatgcagtaatagtacctggtaccgacggtatcggtcggcggagtatacgatgctttgtcctctccagtcagcttcgtcccgcctgccgtcacattacgctcgctttggtaccattgatactccaacgccccgctatcgcccacccgggccttaatctcgagtgccgctgcccgggttcctctgttgtagaggatttcctgtgtactcaggtcagaggtgatttcaggttccagtgcatccgtcttctgataactcggttcactgcctgaaggatagttaatcgcagccagtctgggaaaatatccaatccgctcaccggctgccgcattaagatcacggtcttccgtaaagatccagacgcccggatcgaatcccttcatcttctcactcgcccggcccggaccggttccggtcatttcctggcgggtcagggacattccgtccttgtttatttttgtagtctccgtgagaactttgtctccccgtaggcccgccatcttcgcatcactgtttcggtagctgttccttatctcaccatcagacgaattcgttcccaataggcccccatataggctcatacaactatccgtagtataattattatcaggatcatcaacaaaagacgcggcatagacatcacctcttccatagcagctttctatagccgcccgaagattagacccagccagacctcccgcataggcctttacttcttgattgttagcgccatcctgcgttagcggtttcgagttgtaagcataagcagcagccttgccacttccatagctgttttttatactttttgttcgatcttccttaaaagccgtatcactctcattatacccaaccaagcctcccgcataggcctgaacgcttatcttacctgaatttaaacttgtactataggcatcgccgcttccaaagctgttttctatatcaaaactattccatccagcaagacctcccgcatggcttattgcacctcccaccccatcaatagcaacataggcatcgacgtttccatagctgtcttttatttcacacggtaggggttcagtctgttccccctgaatccctcttatactgcttccaaccaggcctcccgcatcacccccagtacctatatcttttctattaagcttagaggaaacacagactgcgccgccgcttccatagcagttttctatgtgaactccctccctcatagttccaaccagggaccctgcagcaacatagttttgcccattcgtaaccttcaccattacataagcgttttcaattcccagattccggatggttccagcctccacacggccaaagaggcccacaaatgtatcatccttcgggtcgtttagtttctcataaacaaccatcccctttattgtatgtttatctccgtcaaagctccccctaaaaggtgttttgttcgacccgatcggcgcccacgtattggaaactttctctgaaccatccgacgtcttgattgtagccttaaatgtttcgtaacgtatatctgggtctggggctcccgtcgtctctttctcaatcttcaggggcgttccttccagatcaatatcgctcgttaatttgacgaatttacccttgaagtcacacttcggctcattcctcactaccgcggaaaaggctgcaagttgcccggcgttattgatttgcagaggctcctccttcgtgtaggaagtgttatactcatttttgattttattataaaaattagtatcataccgatccctataagaagtccctgtctctgcatctacagttatgctctccaaatacctccccatcgagctgtccgccccatagatatcctccggaaagctgagtaaaaccgttgtcaccgtcaggcaaaccgccatcatgatacacaaaactttgtttcctcttttctttttcatcgcccgcatctctcctttcttttccttgttgccgcattccacattgtattccagtttttcccagcaatcctcgcaacgaactttcccgtaaggtgtctgctttccaagaaataaaatggagcgtctgaaaagggtccggttccaaaatccgtcaactcccatgactttggaaatccgcccccttttcaggcgctccagtcttctcttttttcatctcaaaacggtgccttatcctgctcagcagcatatccctctccttcttttcctgtcaattcttttttctattacctgaaaaaaagacttctgttcttaatcattatacaataaaaaaagggatttttctatcagccggtatgaggttttggataaaaatttttctgcattcaatctggcagtatgaggtttttcatgagcactgcgctaagatggattccaaagccgcctcactgctgctgtgggaccgcacgatttttgccttactccttttcgcctcgcagagggcacatttcaccatcttgtgggaaactgtattggtgaatagaacaactaagtcaggactgcctacctgtttccccagtttcgcgctcatctgggtaaacacctttgctttgcagttatactctttacagatccttttatactgacagaccatccggtcatgtcctccaatgatcacaacactcataagaaacctcctctgtttgaaaaggagccggcaaaaccggctccggaatatcatctcttcttttactctgccgccgcagccaatgcttttccgagacttacacagtctgcttttgcatcgtcgtccggagtctcatgggcgatcaggccttccccgtcgatcaccttcgcaccggcccctgtcatgcggtcagtccagtcacgcatccattctccgtctccccatccataagagccgaaaagcgcaatctgctttcctgaagcaaaggcttccacttcctcaacaaaaggttccattgctgattcctccagctgctccacacccatggacgggcatcccagcgcgaatgcctttgtctcttttaatatgtccgcagaagctgattccacatccaaaaattcgggagttcctcctgcagctgtaactcctttagcgattgcctccgccatgatacctgtatttcctgtgccgctccaaaatgcgatgaatacttttgccatgatagctccttcctatgccgcaacggtcatctttaagatacccctgccctgctgatacaatttccagtagacttctttacatttcttatattttttaaacagttcaagtgcttcgcattgatcgcagtaaaccttccacattccgcaaagcctgcagttcatccctctgttctcaataaatcccagaacatcccccagcggataatctaagaacacaccgatctcatgaggaaaatcatcttccagaagcctgcttttcaaatggcgcagacattctcctggctctgttccgggatagccgaaatcagcgagcagctccgcaatgccttcctccctgagtctttgatccaggtcctttttccgatacacataaaccagaacggatccttctctccaatcaagcgcctccagaaacagcccaaaaggattcagcctttcattccagtcacatatctcctgcctggcatctgcacttttctgatgatgataattaaataaactgccgcatttcatgcccgctaatgtaggggcacattgctctacaattaaatctgataaggttttctctctcatgcttcacctgcttcatttttacaccgcgcgatggttagttctaactaactgtaaacatcatatcacgtcgtcgaaaaaaagcaagggaatatatgagagtcattctcatttattcccttgcttataaattctaaacccgctgttattaaaaattaatatgatcgctgtccttgtatgacccctcgcagttggtgatggcatcaatggctctcatatcctcatcactgatcgtaaagtctagatgtaaattatcctggatcctttctctggtcacgctttttacaagaggcaccgttttatgctgcatcgcatacttcacacagagctgtgccacactcacgccgtttctctccgccacttctctgatctcctggcactgaaagacttttccatttgccagcggactgtaagcctctacaacaatgtctttttctttacagtatgtccggatctcctcctgaagacagctcggatgaaactcaatctgattgaccatcggcgggatctcacatacttccaggatctcatcgatgtgatggggtttaaaattactgacaccgatagcccccaccttccccgctttgtacaactcttcaaaagccttccaggtttcccggttcttctctatataattgtcatgaaactttaccggcacgggccaatggatcaggtacagatccaggtaatccacacccaggtccgtgaccgtgttctcaaatgcggccagagtggactcatatccatgatcatcgttccagagtttgctagtcaaaaataagtcttcccgcttgatcccgctctcccggatgcctttgcccacccagacctcattgtggtaggctgccgccgcatcgatatgggtataaccacattcgatggctgtcttcaccgcatttaccgtgatctcatcgctgggcgccttccatgtgccgaagccgatggccggcatctgttttccgtttgaaagtgtcactgtctccataaaagcaaaaccacctttcctgtatcagactgcattgacgtttatctttattatagcagactttccacaggttttgtttaatgaaaatctgtcccctttacgccagttccctccttaccatatggcctacgccgtattcgtcataaacagtctcatatctggttcttttattttcatctctgcagtcagattcgtcaaaagcacagctgccctccgggtaaagattgcagaaccgctccatattcctccttgcaggcacatacgtggggtccaaggcccaggctgcccggaaatgtttcatggcttttatgtggtttccgttcttctccagcagaatccccatcaggttgtgcggctgcggtgcatggggatactccttcatagcctccgttattttctcttcacagacgccgtattctttattttcaatgagatgtctgacctcctcacataacattgtcaagctgtctttttctttcttacgatttaacatcatcatcaaactcctttcctttctttctacctttattataaaaagaatactgtgagccggatgtgaggaaatgaaaaaagatgtgagattcttgtgaggaatccaacatgataaaaaacaggaacggtaaagactttctttcccaatgttgaaatctgtatttcctttgttataatggttcataatctttaacgaaaggaaggaatcttatgaaacctcatagagtaaatattgatgctgacaaatgcattggctgtggattatgcgcaaagacatgtccagaacataatatcgccataaaaaacaaaaaagcggtggtcttattaaaagactgtctcatgtgcggacattgttcctctgtatgtccgaaagaggccatctcaatcaccggctacaacacaaaacaacagacgaaaaaaaatactgcccgtctaaatcctgatgaagtcttagatgtgattcgtttccgtcggaccgtcagacagtttaaagacaaaaaaataccggattccgtgattgcccagattctggaggcgggaaggctcacccatactgcaaaaaatatgcaggatgtatcttttattgtccttgacaaagaaaagaacaaagtagaacagatggcagtccgcctattcagaaaagtcaaacctatcgcagacttgtttagtcccatggcaagaaataataaaatccatgatcattttttcttttttcaggcacccactgttattgtaattcttgcaaaagacaagacaaacgggctgcttgccgcacaaaatatggaattcgttgcggaagccaacgggctcggactgctatacagcggtttctttacatccgccgcgaatatttccagaaagataaagagaacattaaaagttcccagagggaaatgtgttgcaatgactctggttttaggataccccaatgtaagatttctgcgctctgcccagcgtgagaaattagatgtgagatatatgtagaggacggaatcatggaacaagattgtaaaaaaagattaagccagatcatacaaggtttcacagagtgcaaagatgccttcaccgccatcggtgatgagacaagacagctgatcttattcgtacttttagaaagtgacctgtctgggatccgtgtaggggagatcgcccggaaaacgcatctcaccagaccatctgtctctcatcacataaaaattttaaaagaggcgggaatcgttgccgtgagaaaagaggggacaaagaattattattatataagctcagatgaaacccgctggaaacagattgccgggcttatcaaccttatatatgagagcgttaaaaataacagccatgatatttccaggtagtcaataggaggaaaccttatgatcttatatttttcaggaacaggtaacagtgaatatacagcaaagcggcttgcccaggagttacaagatgaagcagtcaatctgtttcagaaaatccgcagccgcgattacggcggtttgtcttcagagaaaccctgggttattgtcactcccacttatggatggagaattccccggattgtacaggagtggatgtctaatacaaaactcagcggggccagggatatttactttgttatgacgtgcgggggaagtatcggaaatgcggcttcctatataaagaagttatgctcaggcaaaggattaagctttcagggatgtatccctgtcatcatgccggaaaattatattgctctttttcaagcgccggcacaagaggaggcactggaaatcattaacagagcggaaccagtcatagctgagacagcgcacctgataaaaaacagggagacatatatacagcctgccatcactctgaaggacagattaagcagtggtatcataaatgacatttattaccctgtctttatccatgcaaaaaagttttattccacagaaaaatgcatctcctgtggattgtgtgaaaaggtctgtccgctaaataatatctctgttacagatggaaaggctgtatggggaaaccattgtacccactgtatggcatgtatctgccgctgtcctgccggggcagtagaatatggcagccacaccaggaacctgatccggtaccgctgccccaaacatagttaggtctttttcactcatctaccagccggtagcccactccgatctccgttatgatatacctcggtttggccggtgtcttttctatttttctcctgagggccgccatcagggccctcagggcctgagtgtcccttccataaccttcaccccatatctcccggatgatataggtggtagtgagcacccgacccatatttttaaagagcaggaccagaagctgatattccattggtgtcagatgcagaatcttcccatccagggaaacggcccgtttctggatatccagccgcagtccgcccacttgaaaggacgtctgttcctttgcttttgttcccttatagtaatggcggaatgccacccggatcctcgccagcagttccgtggcagagaatggtttggtcaggtaatcatcggcacctgcatccagggccgcagccttttccctgtcctggtcccttgccgatacgatgatcaccggcatctccgaccaatccctgacgttctttaaaacatccataccgtccattttcggaaggcccaaatccagaagcatcatatccacaggctctgagacaagcgcattcagggcactctcgccggagtttgccgtgatacattcaaagccctcacgcttcagggcataactgataaaattgcggatctggggatcatcctccacaataagaatgcgttcatgataatgctccattgtttctttcctccttgttccatggaaccgtaaaagtgaaaacagcacctttgccgtccgggcggtttcctgcttttatcgttcctccatgtgcttttatgatcgtatcacagatagcaaggccgaggccgatcccctgtttggaatctgtttctcttgtactggaagtataaaaggtctcaaagatcttcggaagatcctcttctgagattccttctccccggtccgccactgtgatcgttaccatgccttcgtgttccggggcttttacagagacagtgaccggctcctccggtcttgaatgctttaccgcattgtccagaagatttacaaacacctgctccatgagcctggcatccatgggaatcaaaagaaattcctccggcatttctacctggatctcatgctcgggagccctttttccaatgaccgcaatggctcccccaatgacttcctccaaagcttccggctcttttttaatattcagccgtccgtcctggagccttgtgaggcttaaaatattttctaccagggaatgcagccagtccgcatccttgtgaattcccgcagccatctcatggcacgggtcgtctttgtctgtcataccgatgagcatttcagaagtacccatgatgcctgacaatggggttctcagatcatgggagatggcccgcagaagattcccccggtacctctcctgctctatctccgcctccttctcctgcgctctcaccgcgtcctccttcactctggttgtcagggcgctggtaaagatggcggtaatggtcatgatcacaaatgtgatcagataccccggattatagacggcaaaagagtagtatggccttgtgaacagccagttaaatagaaacgtggcgatgacggaggccgtaagcccaaacacgtaaccctttgtgaatctggatgtcatcagcacggacagcatgtaaacgatcacaatgttggattcctgaaacttcatttccctgaaaatgatccccacggcggaagccagcaggaggaaccctgccatgaccaagaactgccaaagcattggctccttgtcttcttttgtctgcataatgtccctccttaacctatcttcagcatccggtagccgatccccacatgggtctgaatatatttgggatgggaggtatccgcctcgatctttttccttaggtttgccatatagaccctgagcgatgtcacatcactgtccagggcgcttttccacacatggtttaaaatataattatgagtcagaaccttgcccacgtttcttgccaaaaggcagagaagcttgtattcaatgggcgtcaggtggagctcatttccgtccagggaaacgcagccagaactatagtcaatcacaaggccgccgttgagaaacacagcctcctcctgggagttttccgtaaaatctttcattcttctcaggctgactctaagccttgccagcagctcctccacgttaaacggttttgtcagataatcgtcggcccctgcgttgagggcgtcgatcttgtcaccgtcatcgcttctggcactgacgacaatgatcggcatcttagaccagctcctcaccttcctgatgatctccatgccgtccatgtccggaagacccaggtccaggagcatgagatccggtgtctgggaaaccgcctccacaagggcctcctgaccccgggatgcggtgtggtagcggtatccctcaatatccagtgtggtggtgatcagattctttactgctttgtcgtcctccacaacgaggatcaatggtttatccatgtacaattacctcctcagcctgcagctcaaatgaaaatacggtacctttcggcttattatccctgacacttattgtgcctccgtgagcctggatgatggatctgcacagggcaagacccatgcccatactccgccggctgtccgctgcgatcttatttcccgtataaaacatatcaaacagcttggcttttgcctcatcggaaataccctccccgtcatcagacacctcaatgaccaccttccggcccttcttcactgctgaaatatcaatgttggagccttcttttgtatacttgatggcattgtctaccaggttgatgatcacctggatcatcaatctggcatccatatctgccatcatcatatcgtcatccatatgaatctggacatgatgttcactctttcttctgtcgatatgtttcatcgcttccaagatcacttcctccacgatctccggctccttttcaatcttcatggttccattttctattctggtgacggacagcagattctccaccagattgatcagccacatggcatcatcatagatgtccgtgtataactcctgcttcttttcttcagacaggtggtccgaattctgccttaggacgcctgcgtttcccgagatgcttgtgagcggtgtcctcaggtcgtgggagatggaacggagcaggttggccctgaactcttccctctgggcctttaattccgcctccttttgttttgcagcgatctggtctttctccagagccagcccgatctcatccagcatggagatcataagctctttctcaaaggtctcaagcttagtcttctcaaggcagatcccgatgaccccgtgtacgttctcgtcactcctcactgccagatataggccgttggaacctggaagagtgtccgtggtggcccctgcatgcttattatttttctgcacccattctgccacagccttctcctcatgggtcagatatttgctcaggtccgtcccagcatcatccccaaaggctcttggctccagaagtttaccgtcctcagcctcgtaaaaaataatagcacggtctaaaagtcttgtcatctgtctggaagaaagctcaatgatcgcctcccggtcatctgcattttgaagcctgcggtttgtctccagcagaatgcccgtgcggtaggcctggatggatgcggctctggcctgctgctttacccttgtcataagatttcctgtgatcagggcggacaaaagcatgatagcaaaggtcaccggatagccgctgccgtaggcgttgaacgtaaacaccggctggatgaacagaaaattaaagactaaaacactgcacacagaaaatataaggctgtaaaatctgtactccgttacaagtgcagtgatgagagttcccagaatatagatggtgatcgtgttggactcgctgaagccgatgctctgaaaccacaagcccaggaaggtgaccgccagaaatatgcctgtcgtcttcagcacatcctgtgtggtcaccctgaccttctctttcttccagattaccttttttgctgagtcaggtgcggcctgttggtccggtatgatataaatatccagattcggcgccaatgctgagagcctgtctgcaaagttatgtctggctgaaaaaaccctccgattcatagaccgcccgatgacgatcttggagacccctgacgcctttgcataacctgcgatctgttccgggatatcctccccgaaaatggtagtgatcttggcccccagctgttcggcaaggcgcacattttccaccagcctcttttcatcttccggagaaatcttatccgcagcctctgtctttacaaagaccgccgtgaactttccgtgaaatgccctgctcattcttgacgcagtgcggatcacacgctggttggaaggggacggtgacaagcagatgagaatatgttcatccgtataatatccctcttttccctcctgctccttctgctgttcggaaatatggttcaccctatccgctgtcctcctgagcgcgatctctctcagcgccacaaggttgctctctataaaaaagttctccatggcctttccggcctgggtttcacggtagatctttccggccttcagacgctttaagaggtcctccggctctatatccgccagttccacagaatccgcgttgtcaaacacactgtcaggaatcctctctctcacgatcactcctgtgatggacgccacaatgtcgttcaggctttcgatgtgctggacattgactgtggtatacacatcaatccctgccttcaagatctcttccacatcctggtatctctttttatgccggcatcccacgccgttcgtgtgagccagctcatccaccagcaccagctgcggatgccttttgatgacaccgtccagatccagctcccgaagcttcatgccgttatattcaatctcccttaccggtatgacttcaagacccttaagcagagccattgtctcaggtctggtatgaggttcgatatatcctgccacggtatcagtcccctgtgccaatgtctcatgggctgcctttaacatagcgtaagtcttccccaccccagcggcataaccaaaaaatattttaagcttgccccgctctcttttctgttcctgttcttcctggcggatctgtttcaaaatccgatccggatcccggcgtgtttcttctttcatttcatttcctccctaaacacatagaaccttaccatggattatactccatggtaaggctttattctatccatcaaagacagattctctatgattttaaaattccttccagagccagattgactttcagaacattgacattttcttccccaaaaattccaagaaatttgtgagtggtatatttgtcgacgatcttctgaatttccttctctgattttcctgtggtcctggcaagacgtggaatctgatacttggctgctgccacagagatcccaggatccagtccgctgccggaacaggtaaccaggtccaccggcaccttcttgccggcctgctctggatttgcctttttgatcatagcaacacggtcagccaccagctctttcatccgtttttcatcggtctttttccctttggtttcccctgcaggtgtcaggtttgacggcgatgcatacatgaccggcctgccgtccttgtctgtgaatgtctctgtatccacgttcatgatccttccccacatatgcttttcatcgttgaactgctgggccagaagctcacacccatatttctttccgttgacttccacgatgcttccgttggccttatctggaaacaaaagctgtgcgatgccggtgatggctaatgtataaaacagtccgcatatgatggaaaagatcaataaaatcaacgccgccttgggcagataatccttcactatattcttcataactcaataacatcctttctttagaccagacccatcgcaacaatgataatgtcgatgatcttgatggagataaatggtgcgatgaccccgccgagaccatagatcagcaggttccttgaaagcagggctcccgcagacacctctctgtatttgaccccctttaatgccagagggatcagcgcaatgataatcagcgcattataaatggtagcggagagtatggcgctcataggactgtgcaggttcataaggttcaatgcctgcagtcctggatataatcccacaaacatcgccggaataatagcaaagtattttgctacgtcattggcaatactgaacgtggtcaggcttcctcttgtcataaggagctgttttccaatcctgacaatatcgatcagtttcgtgggtgaggaatccaggtccaccatatttcccgcctcttttgcggcctgggtccctgtgttcatggccactgccacatcagcctgcgccagggccggggcatcgttggtcccgtcaccagtcatggccaccagatggccttttgtctgcagttccctgatcatatcaagtttgccttccggagttgcctctgcaaggaaatcatcgactcctgcctctgccgcgatagccgccgcagtcagcgggttgtctccggtgatcatcactgtcttgattcccatttttctaagatccgcaaacttttctttgactccttgtttgatgatgtcctttaagtaaatgactccaaggatccgctcattttttgccacaaccagaggtgttcccccttttctggcgatcccgtccacgacttcctggcactgggggctgaagatccctcctgcttttgtcacatactctttgatggcatcggctgcaccttttcggatctggatgccgtcatagtccaccccgctcatccttgtttttgccgagaatggtacaaacttcatgtgaagttcgtttaagtttctccctctcaagccaaactgttcttttgccagcactacaatgctccggccctccggcgtctcgtccggaagggaagccagctgggccgcgtctgcaagttcttcggtactgtttgtgtctacggggataaattcactggcctggcggtttccgagagtgatcgtgccggtcttgtcaagcatcagggtatcgacatctccggccgcctcaatggcgcgtccgctcatggccagcacattggcctggttcagccggctcatccccgcaatgccgatagctgagagcagcgctccgatggtggtcggtgccaggcacaccagcagtgccaccagagaggtaacggaggtcggatttgggacccctgcctgctttgctgaaaacacggagtaggaatacagggacacggttaccaggataaagataatggacaatgccacaaggaaaatctgcagtgcgatctcgtttggggtcttctttctggaagccccctccaccatggcgatcatcttatccataaagcttttgcccggttcactggtcacttttactacgatccagtcggagattactgtcgttcctccggtcactgcgctccggtctccgccgctctcacggatgaccggggcggattcgccggtgatggcgctctcgtccacggaggctgctccgtccaccacatctccatcggcagggatttgttctcccgccttgatcagcacgaagtctcctttgtttaactgggtggaagggaccactgtcacttgatccttcctatcggcagatgggatcttattggctgacacatcctttttggacgcgcgcagggcgtctgcctgtgcttttcccctgccctcggctatggcctccgcaaagtttgcaaaaatcacggtgaaccacagaatgacagcaatagccagggtaaacccggaaggagcgtcctttatgcctgccagcgagataaagaagagaacggtcgtcatcactgcggatacatagaccagcatcatgaccggattctttacctgtgtctttggggcaagctttgcaaatgaatcttttacggctcttgaaagcatacttttgtctgccagagcacttttcttttttgtttccatcatattaaccacctattctaaattctacatctgaagaaattctgcaatcggtcctagagacagtgccggaaagaaactcagcgctcccacgatcaatacgaccaggatcagtaaaaatacaaacatggcattggttgtggaaagtgtgccggctgtctgtgcaactttctttttcttgaccaggcttcccgcgatggcaagaaccgcaaagatcggaagaaaccttacaaacagcatgaccagtcccaggctcacgtttaagaatacggtatctgctccgaatcccgcgaatgccgaaccattatttcctcccgcagatgaataggcatacaggacttctgaaaaaccatgggctcccggattgtttaagctgtctgccacctgtgggagcaaagttgcgatgccgcttccgacaaggatcgccaccggggtggcaaggcagaccaaaactgccattttcatctcgtacggttcaatctttttgcccagaaattccggcgtccgccctaccatgagtcccgcgatgaagactgccagaatcgcaaagccaagcattccgtaaagtccgcatccggtgcctccgaagaccacttctcccagctgcatcaaaagcatcgggaccataccaccaatcggcgtataactgtcatgcatggagttgactgacccattggaggccgctgtggtaaatgccgcccatgtggccgacgaagcaattccaaatctggactcttttccttccatatttccgcccggctgatcgttggtgccaagatccactgtctgttcattggccagctggggtgtgcccatctgttcgttgtagccgatcacacccagcgatacagcaagcatcaggaacatggccataaagatggcaaatccctgcttcttattttttacctgtctaccgaatgtaaagcacagggctgccgggatcagcaggagagaaagcatctctaccatattggccagcgccgttggattttccagcggatgtgcggaattgacaccgaagaaaccacctccattggtccctgcctgcttgatggcaatctggctggccgccggaccctggggtacgatctgctgtgtcacctctgtgccgtcctctaatgtaatgggctctaccagatccaccgtctcataggaatgaaaattctgtaccactccctgggagacaaggatcagggaagatacgatacataacgggatcagtatgtaaagtgtgattctcgtaagatcgacccagaaacttcccaggcctttagccttgactttgatgaatccccggatcagcgcaaacaaaactgcgatccccactgcggcggataaaaagttctgaacagtgagtcccattgcctgggtgaaataactcaatgtggattcaccgctgtatgcctgccagttggtattggttataaagctcaccgcattgttaaatgccagatcccatgaaattcccttctgtccctggggattccatggaagaaatccctggaacatgtgcatcagcatcaacacggccaatgccaggatactgaacataaacacgcttcccgcgtaccgcttccatcccatctcttcatcttcttttacatgcaagatcttataaatgccacgctccactgggcgcaggatctttgataaaaataccgtttctccatccatgatcttaccgatatattttccaagcggaatcgccagcgcgaccaggataacgagataaagcacgtattgtaatatagcttccatcacatattatctcctttcaacaagactatgactaaatagacaagcagtgccagtgctgcggcaccgatcagacaaatgactgtattcattttcatatcctccttatgatttaacagcttatcacacaggaaataaaattagtgttaaggtagatggggaaggcattaagattgtataaagacgtttttctccattgtctccaggtggacgcgcttcgcgcaataaggtatactattcctgattattgtttggaaagtgagagttgttatgagattttttgaaaagcatccgatgtccatgatcgtcatcgggattattgggatttccctttctgctatttttgtcaagtattcttctgcaccttcgtctgtgaccgccgcttaccggttgttttggacggtgcttttgatgacgccggtggtgctgggcaaaaaaagctatcggaaagaacttcggcatacggatcggaaaaccgtgtggctctgtgcagtcagcggaatttttttagccctgcattttacgttttggtttgaatccctgaaccacaccactgtggcaagctctaccgccattgtgtgcacggaggtcatctgggttgccctgggatttactctttttatgaaaggttctctgtcccgtactgcggtcatcagcattgctgtcaccctggccggcagtcttctgatcgctttttccgattcttccggtgcccacggcagtctatacggggacatactggccctggccgccgccgtgtttgtggcggtgtacactctgatcggaaggattgcccggaccgagatgtccaccgtgagctacacctatattgtctatggcttctgttcgttatctctgctgctgatcctgctggtccagagaacttctctttttgggcatggaaaaagcccggcagtcgtcgggcttttgttaagtatattttccactctgctgggacacagcatcttcagctggtgcctgaaatttttctctccggccttcgtatcggcctccaagctgtgtgaacctgtggtagcatccgtgttcgcggtctttttgttccaggagctccctgccatcttgcagattctgggaggcctcatcaccatcggcggtgtacttctgtattctaaggctgaggcctcagaggcaaaatcagccgccggggctgattagtacacccggatcacgctggatacctttttcgttgtctccatctccgcaatgtctgccagagcgtcagagaaattctgttctttcaccttggcagtgatgacaaccagttccgccatgttatctctgctgttcttctggatcacctgagagatactgacgttatgttttccgagagtatccgcaatcttcgccagcacaccggctctgtcttccacctgcattctcaggaaatacttgctctcgatctcattgatctttttgatcggaagttccttatagcaggtgcagctgatccttccattgcagtgaaactggatattccttgccacgtcgatcacatcgcccatgatggcgctggcagttggcagctctccggctcctcgtccataaaacatggcatcatccactgcatccccgtggacaaacaccgcattaaaggagtcatccaccttagccagcggatgactgctggggatgagcatcgggtggacacgcacctcaatgccttccggtgtgttttttgccacacccaaaagcttaatggtgcagcccatctccttggcgtaggcaatgtctctggatgtaatcttggtgatcccttctgtataaacatcagaaaatgttacccgggagttaaatgcgatggaagccatgatagcaaccttccgcccggcgtcgtatccttcgatatcggctgtcggatctgcctccgcatagccaagctccgtggcgagcatcagggcatcggaaaactccatcccttcctctgtcatcttggagagaataaagttggtggttccgtttacgatccccatgacctcggacagatggtttcccgccagacactgttttaacggccgcagaatcggaattccgccggcaacggccgcttcaaacagcaggtcgcacccatgttcagacgccgtgtctaacagttcctttccgtgttccgcgatcagatccttgttggcagtgactacatgctttcctgcctttaatgccgcgtttatgtatgtcctggcaggctctatgcctcccatcacttccacaacgatctgaatatcatcatcctcaatgatatcctcaaaacggtctgtgagaaggcactgatcgatcccctcccgtttctttgtcttatccctgacaaggacctttttaacggaaagatttgcgcctattttatgaggcatctcttccctctgggcttcaaccagcttataaaccccgatgcccacagtgcctgatcctaacaggccgatctttaatgtctttaattcttccatcccatacctcttttctctaaatatcaaaatcaagcatccatttttgtttctttagtatacccacagggcacaccgcattttatacccttcgggtgcacgtgctccgcacgataaagtatatgctcaccggcacttctttgcaatacccttcgtccctaaaacttcagcgcagcagctcatgttctatgatggcggccaaagacagattatgcaccacatagctctcatggctctcgccttttaggatccgcagcctggccctcgggatctgccttgcgatctctttggtctggctctccttgaccagatccctgctcccggcgagaaccagagtttttgccctgatattcttaagctggcttctcgtaatagacggctctgtgagcatcagccttactttcgggtccctgttccaaaaatatgaaaacttcagcgggatcctgagttccggcttcaagccgtttggattcaggtttgctccgctgacgatcaggtgggatataagccccggcctcctggatgccagcaaaagccccacgataccgccgtcgctgaacccgtaaaaagcagggctttcaataccaagctttcggataaactgagccatgtcagaagccatgtccatataatgaagctcccctgtgccggaactctttccgtgtcctctggaatccggcaggtaaacggtaaagttcctggacagaggctttatgatctctctgaagatcgtatggtcttctccgtttccgtgcagcaggatcaacggccttccactgccataccttttataatacatcttaatgctgtttaattggacaaacataactcctcctaatttccgtaagccctgacaaggcgcaggatattttccaccgcaaacgcaatattctcctctgtataaaaacggctctctgaaaaatcctggggcctgcggttgatgggaaacactcccgtaagccctttctcataaatcccatccatgccttctcccactcctccgaccacggccactgacggtatccccagagccttggctcttttggctactccatccacaacttttccgcacaggctttctccgtccagctgtccttccccggtcatgatgagtttggcatcccgggcaatgtcgttaaaatgcaccatatctaatactacttcaatccccattttcagtttggagcctaagaacgccgccatgccggctcccatgcctccggctgcccccgcccccgggatattggccacatccaggttaatatcttctttgatcctcgtacacagatggatcaggccctggtccaaatgcgccacctgctctgtgtccgctcctttatgagacgcacatacatgggccgctccccggagtccgtacagaggactgtcaatatcacacatagtgatgatctccaccccggaaagctccttggcaagccctgtcttgtcaatataatggatgtccatcagcgttcccccgttggggataaaagccttctgctctctgtctaaaaactgcacccccaaggcagatgccatgccgcatcccccgtcgttggtgcaggaatcaccgaggcccacgataatgatcttggccccccgctgggcagcattaagaatcagctgtcccactccgtatgtggtggtgagctcagggttttttgtttttcctgccagcggaatgcccgcgcaggaggccatctcaatgacagccactctgccgtcatccaccagaccgtaggatgcctgaacgtcatgaaaatggggatccttcacctctgtctgcacccactctcctccaaaaacctttaagaacacactgacacttccctccccgccgtcagctgcagggatggcgatcacctcactgtccggataaacttctgagatcttccggctcatgatccggcatacctccagggaacttgcggttccctgaaaagaatctgggatacaaataaacttttccatgcaaaatccttctttctcttacttcatcttacattgatttttccccaaatcctttgcctgatacatcatatcgtctgctttttggaaaatttcctgcggatgcacagctgtatccgtacactcatagatcccgcagctgaatgtgaccttttctccctgtaagaatggataagaagaacatgaaaattcaatcctgatcttttccatcagttccttggctttttcctttttcatgcccggaaagatgaccgtaaactcctccccgccgtaacggcatgcatacccttttgggccgcagaaagtctggagtaaagaagacagccggatcaggaccagattgccgttttcatgtccgaagcggtcgttgactttcttaaaatcatcaatgtcgatcaccgccagtgtgacagcctgcccggaatccctgcattcctccagctggttatttaatatggtataaaacgccgtatgattatagagcccggtgagaggatctaaaaggatcctgtgctctaaacgttccaggcggtgataagtctggctcaggcgtttcagctgttcattgttgtattcgatgataatgcgggtaaataagtaggtgaagatcagaaatgccactgtaactgccacctcaaacatataatcaacatccccgctcttctcgtggaaagccgcgtaacaggcggatatcgccatgcctcccagagacagccccgtgatcatcttcgtcaataaaatatcgccgaaaagacccgaaataataatcaccaggctaaaaaagcagatgaccaccacaaaatcattgtggacacaggcgatgcagagacagatcataaggctgctgaaaagggtgataaagttcctgtttctctgcgagatcttctctcttttcaggagaaaatgacagagcagccagctgcccatgttgatcagaagcggcactataatatattttaccagatagacatcaaaccccacatacatctttcccgcctggcggattccgaaatagagcccgaattccaacaccgacagcgccaggatgatgaccaggttcagcttcatcagctgccctttccactttgcatatgagatattgttttccataacagcctcccattcttttttcacggttccttcctatctatcatacactacatcaacccaaaaccccagcttgttgacaatattttttaccagagttatcataaatatatctactattgcgcacgcaacgatataaaaaggagtcgatagaagtgaaaggttttttaaaatggatatccacgatctcccggttctcaaaaatgcagctggacaaagaattccgggaatatggcttcaacggaagccagcatatttatatattaaagatttgtgaggagccgggagttgcccaggaagatctgctctccgcctttaatgtcaatgccagcaatgtgacaagagctttaacccatctggaaaaggaaaattatatcgtccggatacagaataaagacaaccgccgctgctacaacatttatcccactcagagggcaagggatgtgtatccagtcatcaaggatgccttaaagcactggaattctaagatccttgaagagtttactgaggaggaaaaacaccagtttattgagtttctggcccgggccggaaaccatatgttagattttgtgtatcacagataagaaagagagatagaaattatggaacaacagcagtcagtacagaacaaccccctcgccgttgagagcacgggacgccttatcgccagatattccgtgccaagcatcatcgcaatgctggtgagctccctgtataacatcgtcgatcaggtctttatcggccagggagtcggcatgctcggcaatgcggccaccaacgtggcctttccttttgtcaatatctgcattgcccttgcgctgctcatcggcgtgggcggtgcctccaattttaacttgaatatgggaagaggcgaaaatgaaaaggcaaaaagctttgccggaactaccatctccctgctcatcctgtcaggagtcgtattaagtgttctttctctcctgtttttaaagccgatcctgctcgctttcggctccacaaaacaggtgcttccctacgcccttacttacaccaggatcactgcgctgggctttccgtttctgatcgccaccaacggtttctgcaacctcatcagatccgacggaagtcccagatattccatggtctgtatggtgaccggcgctatcataaacacctgcctggaccccttgtttatcttcggattccactggggcatcgcaggcggagcagccgccaccgtcataggacagatcatctcctgcttcatggctgccgtttacctgaccaggttccggtccatgaagcttacaaaaaactgtttaaagatcaaggcggacaatgtaagatccatcgtgtccatcggtgttgccagcttctttaaccagattgccatgatggcggtccagattgccttaaacaacaccttgacctattatggtgccctgtcttcctatggcagtgacattcctctggcctgcgcgggagtcatcatcaaggtcaacgcttttgtcatggcatttgccatcggcatcgcccagggatgtcagccgatcctgggattcaattacggcgccaagctgtatgcccgggtgcgggataccctgaaaaaagagatcatcatcgtgacgttgatcttctccgccgcctttgtcagttttcagctgatcccgagacagatcgtgagtattttcggggagggaagccctgcgtacttccactttgcggagcgctactttaggatctacctttttatggtgttcatcaatggactccagcccatcgtctccaactttttcagttccataggaaaagcctggaaagggatcttcctatccctcaccaggcagatactgttcctgcttccgttaatcttggtgcttcctatattcttaggcatcgacggtgtcatgtatgcaggccccatcgcggacggcatcgccgcagtcactgcgtttttcctgggccggcatgaatttatggccatgcgaaagcttgagctgtcagcggatgttctcccggaaatcgatgtctcaccggcatcccggtaagccttaccggtcttccatgggaacatagggcttttgttccaccacactcttatatgcaggccgtatgatcttatccacgttggtgagctcctccagcctgtgggcgctccagcccacaatccttgccatggcaaagatcggcgtgaacagctccagcggtatatccagcatactgtagacaaaaccgctgtagaaatctacattggcgctgacgcctttatagatcttgcgttcctgggcgatggcctctgtggccagcttttccactgaggaataaaggacaaaatcatcgtcccggcctttttcggatgccagtttttcaacaaagctcttaaaaatcatggctcttgggtcagagatggagtacaccgcatggcccattccatagattaaacccttcttatcaaaagcttctctgtttagaagcttcagcagatatgctttgacttcctcttcgtctttcacatcttttacacttttcctgagatcctgcatcatctggaccactttgatgttggctcccccgtgtttagggcctttcagggatgacagggctgcagcaatgacagagtatgtatcagacccagcggaggtgactacgtgggtcgtgaatgcggagttgtttcctccgccgtgttccatatgaagcaccagtgcgatatccagcactttcgcttccagttctgtgtacttcatatccgggcgcaacattctcaggatattttccgctgcggagagcttctcatccggtctgtggatatagaagctttcctgcttcacataatggttatacgcatgatagccgtaaacggccagcatcgggaatacactgatcagcatcaggctctggcgcagcacattcggcatggaaatatcggctgcctttggatcataggaggccaggttcagtacgctcttggtcagggaattcataatatcctcattggcggctttcatgatcacgtcccgggtgaagtttctcggcagtgtcctgcacagggacagcatattcttaaattcttccagctggctttcgtttggaagttccccaaacagcagcagatatgccgtttcctcaaatccaaaccggcgtttctgcacaaagttcctggtcagatccgtaatgtcatagcctcggtataaaagcttgccgtagcacggcactttttgtccatcgatctcctcgtatgcctggatggatgaaatattcgtaagccccgcaagcactcctgtgccgttttcatcccgcagtcctctttttactccatattttgaatatagatctttggggactgtacagctctctgtgcacagcttggaataggtatttgtgtagtctttgatcatgctgcttgtcttcttataactcactctgggtacctcctttacatttcctggtatttcttcttatcatacctcaacgattgatatttgtcaaccattgacacttgtcaaggaactgtctatactatagatatagaaaaaaggagaggataaatcaatgaaccagtcagaatcgaagggaatcgcagtatctctgttcgaaatctttccactgtgccgcaaactgatcttttgttccgtggacatgaaggaactgaatctgaccaagagccagctgtccattttgtttgcactggaagtaaaaccgggccttaccatgtcaaagctgtccaagtttatcgcgtcatccaaagaacagacaacccgtgcggtagctcctcttgtaaaagagggattggtggaacgctatgtggatgaagaaaaccgcagatacgtctatatccggctttctgatcagggaatccgaatgatacaggaggccaaacaaagcttcatccgtcacctgaaactgtctttcgaccggctttcagaagacgatcttgacgaattaaaacaggctgccgagacaacactgagaattctaaaaaagctggaaccataaataccgtggttccagctttgctttttttatgatgttatgttataatttcatatactacatttgtaagattaaaaggagacaaccaatgaaaccgattccccagatttcagatgctgaatataaagtgatgaaagccgtctggtcccatacgccggtcagtaccccggaagtaaccgaaatgctggccgcctcaaatggatggagccctaagacggtccagaccatgctctcaaggctggtaaaaaagggtgctctcacttatgaaaagcagggcagagccttttattatacccctctcgtggaggagaatgaggtgctcagtaaagagagttcttcttttctaaatcgtttttataacggctgcatcagctccatggtctcgaactttctggaggaagacaggctgacttcccaggagatcgacgacctgagaaagctcctagacaagggcctgactgagggggatgaataagatgtacgcttcgctgatgaaagagttcctcatccactgcctgctcctttttttggccctgcctgtgattctggctgccaaaaagcttttaaagcgctgcctgactttgcaaatccagcattccatctggtatttgtactgtttcgccgcgctctttttctttctgcccatccggcttccgtcctttctctcctcctctcccctcctaaacagctttgtccgcaatacccgtcaaggctcttcggtcctctctgcttctgctgtatccggctcctccagctggatgaaggactacgccgtgtctgtccggacgtccatatccccttccttcctgaccgccttgttctggatctggtttgccggaactgtgaccatggctgtgatcctgctgtacagccgcatccgtttaaaccggctgggccgatccatggcgtttatcaagaatccggaagctgaacgtctttttctccaatgtaaaaaggatctgaagatccggcgcaggatccgctttgtgctctcagaaaaaacggacagccccatggccttcggcctgtttttcccggtggccgtatttcctaaaaagtgtctatctgccttctctgaaaaagagctgtcctacattttctatcatgaactgagccattacaagcggggcgacttagtctgtaacattgtctgctgcatcatccgggccttatactggtttcatccagcggtcctatactccctcagaaaaatgcgcacagaccgggagattgcctgtgacgcagctgtcctgaactgtatcgaccaaaaggaatggagaaattacggacataccatcttaaactttgccggatctctttcctccgtggaagttctttcggtttcctccggcatcggcggcagcagatcccagcttagacagcggatcacagctatcgcctcctaccgcagggcatcaaaaaagaaacaccttgcgagtatagtgtttctcctggtttttggactgctgttctcctccttcttcctgaagaacaacataatggccggatccgtctccaaagccccggaccgcccttttataagcctggacctctcctctcatttttcaggaaaagagggctgctttgttctgtatgacaagaagaaagcacggtacagcatctataatgaaaagatgagccggcagagggtctctccggattccacttacaaactatacagcgccctggcagccctggatgccggtgtgatttccccagagaaaaacagcctttcctgggatcatacagattatccctttgcgtcctggaaccaggatcagaccctgataagcgccatggaatcctccgtcaactggtacttccaaaggcttgaccagaagcttggatcagccgctgtacagagaaatttaaagcgcatcggatacggaaacgcagatatatccggaggtctttcttccttctggctggagtctaccttaaaaatctctcctctggaacagacagcactccttagggatctcgaccagaaccgtctgggttattccagagagagcgtagatgccgtaagacattcaatcaaactgtctgccggtaccgggcgtgtcctctatggcaagaccggtaccggcagagtagacggccgcgacaaaaacggctggttcatcggctttctgaaaacaaaagacaatacctattatttcacactgaggctccagggagaggacaacgcctccgggcaggaggcggcaaagaccgccttggagatcatcgggactctttctctttgatcacggcttttgtctttcctacaacatagccgcttccaccccggtctttcacatcctccgccatggtgatcaaaagccatggctctttttctttcttatccacggtaaatatactaaaccatccgagctctgtgccggtggtatcgtccttgctggccttgatctccgctgtcccggtctttcccgccagctttacgccggacgtcttcgccccatgtcctgttccgtttggatgctcgatgacctggaccaagtcctccttaagaacgcccgccgtctttttggagaatgcatccttgatccaatattccggctccagtttttctttatagagcaggtaaggacgtatcatgctgccttcgttggaaaaagcagaatagatcgatgccagatggatgggatttaccagaacctggccctgtccgtatccgctgtccgccagctggatctctgtgtcaatgctctttttgttattagaaaactgtgagactgctgtcttaatgtcgaaaggcatctctgtcccaaagcccagatgtttggcctggctcacataacctttggccccgatctttaacgccgcctttgcaaaataaatattgtccgaatagatcagtgcatttttaagcactgcattctcatatgtatgcagcgtagtcaccttataggatccccagctgctgtccttctgccaggacaatccgctgtatccaaagtcctgattgggatccagttttcccgtattcatgcccatgccagccaccacgggtttaaaagctgagcccggtgcccatttctggcggaagcggttatataagggctttgctttgtcactgttcagttttttccattggccagaagagatccccagcacaaaatcattgctgtcataggacggagtgctgaccagagccagtacttcccctgttttcgggttcatcatcacagaacagctcttatcatttttatactgctcatagatctttgtctgaagctttgcgtcgatggtcgtatagattgcttccccgttcttttctttttttactgccagcactttcttttctctgccgtcttcgttgagaatcgagatcttatatccgtctgtctcgtgaagccggtcctcgtacagcgcctcaaggccgcttttccccaccagctgtccctgctcatagcctttgtctctgaggtttttcaggtcatctgcgctgatctcctgtacgtatccggtcagatgggaggctgcctttccgtacggatagaccctggtatcctcagaggagactaacacacccggtaccttcagcagctgtttttctattttttcttcgctggccattgtcatctttttgaccggcacaaaagaatcttttgtgacccatgaagcgttcagctttttgtctatgtccgctttcttcatatcaagaagcctggccagtgctgccactgaggttttcctgtccttcatcttgcccgggacgatgcccacggatgcggcctttccttttccggccagcagctttttgttccggtcatagatctctccccggtttcctttcagtttcgtcacccgcaccttgtccgtaaattccatatcgggaaagatcatactgtcatcccattttaaacggtaatccccgctctccttctcaaaataagcttcatttttaaaggagatacggcctgccagggtatccatggacatacggtaggtaaccttatttccttccgaatctttatccacaataatcttaatattttctgcctctatcccctgatagatcttttgattcctctggataaattccttttttgaaatttctttcctgctgctcttatctaaaagtccgtacatggactcataatccttttttccaatacaagctgcatactcagagagcacatcctccggctgtccggccccgaacctgctccagagaaagtacccaagaacagccaggatcacggctgccacagggatcaagattcttttcttattcattcagacctccttttacattgaagtttcagttactcagatattatctatatcttacacgtgtaggatatatgtgtcaaggaaaaccggattgtccagaatttaactgccgatccatgccttctttcgcaataaacgactatgcagttggtaaatactgttgtataatggaatataaccgaacggggaataagggataagttttgggaatgatcacaggggagaaatgacatattataattattattagaggggcaggggattactttgtttaaattgattgatgaaattgcagaggtgatctacgtcgctgacgtggaaacctatgaaatgctgtacttaaacagctccggaaaacgtttgtttcaagtggacagctatgaaggtgaaaaatgctaccagcttcttcagggcaaggatcagccgtgtgaattctgcacgaatcacctgctgtcctacgattcagtttatacatggcggtttaccaatgaaatgacggaccgccattttattttaaaagataaactagtagaatgggacgggcacgttgcccggatggagatcggctttgacctgacagaacaggaagaacaggaacagcttttaaagaataaagccaaaggggaagagctggtgctggagtgtttgagaatcctctaccagaccaaagaactggaaacagccatccagatgatcctggaaaagaccgggaagtttttgtccgccgagagagcgtacatctttgagattgagggccagtttatgaataacacccatgaatggtgtgccgaaaatgtcaaaccagagatcgaccagctgcaaaacttacctgccgatcttattgaccgctggcggattgaattcgagaacaaccggtgtatcttcatccgagatatggaagaactccgtacgcagtcaccggaagaatacaggatcctttcctcacaggggataaaacggttgatcgcagccccgctttttaccaatcagcacctggccggatatatcggtgttgataatcctcctgatgatttatttgaacaggtggaacccatattggagactctcagctattttctgtcttccagtatggaccagatgcatacataccgtatcctcaaggatttaagctaccatgatacactgaccggactctataaccgcaaccgctttaacgaagacctggagtattacgcaaaacagcgtttagaaactgtaggcgtcatctatctggatctgaatggactaaaggatatcaacgactcaaagggacatcagttcggtgaccagatcctgaaggattctgccaaaaagcttcaagtcatcttttcagagcatacgatttaccgtatcggaggggacgagtttgccatcctctgcatgaacacggataaggaaaacttcatgcgcaccataagggagctgaaatatttattttctcactctgtagactgcagcggtgccgtgggatacagctggtctgagaatccatctgacttccaggcacttctgactgaagctgatgagatgatgtacacggataaaaaagagttttaccgttccaatcccaactcttccagataccggaactactttgacgaccggctgaacttaaagagtgtggaccagctcctaaaagccatcgaggaccaacgtttctgcgtctatctgcagcccaaggttctgtgcagcacccaggaagtcatcggtgccgaggctctggtccgatatatcagcaaagacggggccatagaaccgccgatctactttattcctgtgctggaatcagcaatgaccatcaaatacgtggacttcttcgtatttgaaagggtttgtcagatcatccaggactttataagatccggatcccctgtctttcctatctccgtaaatttctcaagatttacgctgctggacgctgactttttaaaaacgattctgacgatctgtgaccaatataaggtgccccggcatcttttggagtttgagatcacggagagtgccgattatacagatgaatcatttctggatgatatgatccgggatatcaaaaatgccggtttttccgtagccatcgatgatttcggcgtaaagtacgccaatctgtcactggtgctcaacagtgacatcgacacactaaaactagacaaaagcatgatcgattccattgagagcaacgacaaagcagtgatgttcgtccaggcactggcctacatctgcaagaccatgaatatccagtttatcgtggagggtgtggagacacaggatcaatttgagatcttaaaagcgctgcgctgtgaaggcatccagggttatctgttcggacgccccatgccgctttcagaattctgccgtttcctggaagagaatagagagctgccagaataagtacgaaatcaatcataaaaatccggagaagtgatcagctttgaccttctccggatttattcttttacaggtaccttacaaacaatttatttgccacactcgcttaaaaagcccttcccgctgcgttttgtctcatacatggccatatcagcgtctttcatgattcttatgtagctgtcgccctgggatacccacaccagaccggatgaaatctttatactgcggaggtccccatccggaaacaggatcttcttttcttcgattctattatagaagtcttctatggccttccgtatgtcatctttggaattatatccgtgtaagaacaggcagaattcatctccagaacgccttcccgcgattccatgggggccgttgagcgtgtcaaggagtcctgcgaatgtcttcagatactggtctccccagtcgtgcccataatggtcattgacccctttaaaacaatctagatccatcatgatcatagccgccgttttgatatcactttccagcaggcgttccgtggtcctgtgaaatatactgatattacaaagacctgtcaggtgatcataatctctttcatgctcgatccttctcttttccctgatatcctccgtcacatccacaaccacgccgaatgtacttcccttttctcttgtcatatggatccggatccactggtctgggtctttgctcacataataaatctcctcagctccggccaagggatcgttcataatctcctgcagtctggcttcaaaagctttcctgttgcaaaaaagctgttcagcctcctcttcactccaccttagaactctgcggagcctctctgtggccatcacatggtccgaatcctcatgatattcaaatacgccaataggaagatccactgtatcgatcacttttgtgacttttacagacgcttccagaacgcttcctaccatctggttgatcccctggctcagctgtctgaattcagggttgctgtcctcctctaccacggtttcaagatggccctccgtgatccgcttcagatcataggcaatccgatgaacgccgtcgatgattttttgctttagaagatagttgatcataatgagcattataacggatgtgagtaacagatatagaaatgatatgcccatctgttccccgctctccgcatacagggccttggcggtcaccccagtccctaataatagattgccatgccttctcagcacataaaacttcttccggtctccgcttccgtaaaacttgccatccctgaactgcctcatccgccggtcagaataattaaattctgacatgacctcctgcatcctttttccttctgagtgggcaaccatctttccattcttgacattgacagcaaaaagtacatatccctcgtccgcaggcactctggaaataacataagaaagctcgttccgttttttcgcccgcaaaagccggtcaggtgcgatccccacctgcagaatgccgggctcgtcccgacgtttgactccaatatactgaaacatctttttctccgctccattgggctgtaccttctggatcagataatccctctttccgttcaggatcgaaaggaattcctttgattgttttgtgcttcggaagtccattcctatatacttcggaaccgttccggctgtcagaatcccgtcactgtccactgcatgaagttcgtctacactgagcatttcttttatctcatttaattttttccggctgtctaggatgtccggttctttttctactatatacgcaaatgccctggcccttgtgagataatcttcactgagtccatcggacagattttttagttccgcatcgctgttgtttaagatctgaaccacctggtccagcttttcatttgaattcctgaccatgttatttctggcgctcctgctctgcatcagccatccaaagatcaacatagccgccagtgctcccgctattatcagcgaaatatatctaagaaatattttctgcatcccttattaattcgctcccctttactcatctatgatttcttccggagtaaatccccggtacttccattgccgcgtacttcgctcccactgagagtagcagcgcaaaaactcttccttctcctgttctccgcctagatggattccagcttcccccatcagatagattgccttggagataccgccgcccaggagaagattgttctcaagtcctgtcatcaaatctgcaaaagaaagaggattgtgctttctcttttccaaaaaagtccgaagcctattatattccggggcatccacattgacatactcctcggcgtacagatcgatctccgattcatccggcatgtaatacggcaggttcttaacctcattcataagctccagacagaatctagtatccgggaccttgcgcgagatcacataccgcccctccacacggtattccccgtaagtcttctccgtgaacttcaggaacttggagagctctcccttcttcagaggaacgctgtgaaactcttcccacagcttcatcagctgcttcttctcatacacaccgtataaatgtgccagagccttggcataccggtaaaactcctgattgtggacaacggtttcccggtttttcgcgttggacaaaaacctgatgatcttggccttgacctcgtccggaacaacaaaggacctttcaccctgttccgcaaatacaaagagccatcctcttttctggtaggtccatacctctggaccctcagccccttccggctcctccagcagcactttcaagccgtttagatcctctgacgagctgtactttaaaaccgccggcatctgatccagaatctcagaacccagcctctgcgccagctccgccttcctgtaccgtgaaccatccagcccatagaaagaggctgtctccgaaagctggctctttgtgtaacagtgaagacactctgacaggccttgtgcagagcttttcagaatggtccacttcatttcatttttctgctccatcttgcacctcgtttctaaactgaacattcccttttctttattttaccatagaacttgtgtccttcccaccagtatacagtatactttccacttctgccccgtgaaatgtttcacacatttgccacgggaacataacataatagaaagacaaattctggatgtgatgttttgaaccatttttctgtctccagccaatccacaggcagccatattgcttcctgtgcccaatacagcgtagattccgatacttcttccggcagcctccttccgctgtttcctgtttttgaaagcggaggacaggtcagacagtcagatgccgggacagccatactgatgccgtcttctttctactttgtaagctatcactttattgccagtcctggcagctggaaatacttccggatccttccgtgcatcaatggaactgacgccctgctttatgcatctttcgctcctgccaactcagacggtattgcgtctgcctctgcctgctttcttaccgatcaagcgttatcgctccctgtttctttaggcttccatgtaagctatcctgaatcatcaaaaccattcaacatcgtgggatccgttagcatcgcctcttacggatgctgatcatcacaagattttgtaatagcaaaggaacagtgggacgctttgccgtcccgctgttccttcagcagttccctgtgaatacatattttagccaggtgcgcgctgtctctgccagccgatacacctgctgaacttccgtggcaccacggtccatcattctccatctcggataaaacctggatacatggagagggatctcaggatccaccgaagcgatccatgcggccatctcttccatctcctccctggtatcattctcacccggaacgataagaaccgtcagctccacatgacaatgatctgcggctcttctgataaacctctgaacagtttcaagatctcctccgagctttttataatattcctgccggatccctttcaggtcgatattcattgcatccatataaggaagcactgcattttctacagcttccgggaaggccccgttggtcacaagaacgtttttcatcccgtattgtctgacgatctttgccgcatcccgtacatactcgtacccgaccaaaggctcgttatatgtgtaggcgaccccgatgtttccacgcttccgaagctctgatgccttggaggccagtttctcgggagacagaaagacagtctccgcctggtctgcgtttttcatagaaatatcgaagttctggcagaacggacaggctagattgcatccgaagctgcccacagacagtatgaggctgccgggatgatacatggaaagcggttttttctcaatagggtctaacgccagagctgtcactctgccgtaattctcacaaacaagcataccgtttacatttttcctggctccgcaccggccgaattgccctggctttaacctgcagcggtgcatgcatactgtacatgtctctttcatcttctcacctatgccttataacctcaaaccgctctatctgtaccgattcctcttccccgatcccagctttctgttttgcgatctcaatctgttcctccacagtatccactccggaaaggttcggcagcaaaaggcctctccttcctcccctcgaaacgatgataccatattttttagcatctaattcttcaaatgatgttatcttctgggtctttcccagtacatccacactgtactctaactggtaaagttcctctgcttttaccggtgagaatctgggatccctggccccggcactgactgcgttccatatgatctcctccgccaccgttgactttgtggcacagatggtgccaatgcatccccggagcctgccctcttttttcagtgagacaaaaacaccggcccgttccttcaggagatcatgggaaaggtccttcggaactccaatgactgtcccgttctttacataggactccagggacagtcttgccagccgtacaaaactgtcctctctggcccgtctctgctctgctttcttttgctgcttctccagatacttgtccttaaactttcgttccggattctctcccagcggttcataggtacagactccataccctacgccgaaaggaccttcataggacaatctctctgctttcacatccattccgtccaaaacacctgccatgatcgtaaaagaacggtgcccgcactccccggccttctctaaaaattcttcatcaaattcaaaaagtctctggaaatctccgccgcccatggcttccatgatcttttggtcatatgccgggccttccttgcagaatccataaggcccgtcatccaatagacggtgtgacaggtccccgctggcaatgaacacggtcttcctgccaagctgagacgcagctttcctgacatactgtcccatcgtataatgatcggtcaaagaaagcccagaaagactgatccggacggtttcataatccttatatctctggttgataaaatacagtgggatcattgtcgcatggtccagctgcgcttcctgctccccatccgttccggccatgaaaccatcttttactgccagaccagatatagtgtctgtcaattcccggtcatagaccgtatgaatgcgggtgctgctctccccgaactgtccaaaatccccctgcgcctctgtccccggagaaatgtgaaagtagtccgtatacatgacagagtgcggggtagcgatgacgatcgtctccggagccatcccggctaccctttctgcaacctctttgtatgcctgcacagtcttttgtaccgcctgctcatttccgcgtcccaccgaaggaattataagcggcggatgcggcaccataaatgcaccaattactgccatcttctcatcaccctttccaaattaaatgccagtaagtttccttaattcctcaagcatgacctggatatccagcggcttcacaagatagcctgtcatacccgctttgtatgctgtcactttatcttcttcaaatgcgttggctgtcatggctaagaccggtatcctcgcggcttcctcggtccccagatcccggatggccctgacggcctccagcccgttcatgaccggcatacggatatccatcagcactgcaagatagtatcctgccggggccttctcaaacatctccacgcagatctttccgttctcagctgtgtccaccgcaataccgtatgcttccagcagagatttggccacctcccggttgatctcgttgtcctctgcgatcaggacacgttttccttgcagactctggttctggaccttcggcgcatgaaccgtctcagcgcatgaacgaaggctgctgaatgcctggcacagtgtggattcaaataacggtttagatataaaacagtctgcccctgcctccctggcctcctcctcgattcccgtccagtcataggcagatatgataatgatcatagtctcaggccctaccagtttccggatgcggcgggttgtctcaactccgttcatctccggcattttccagtcaatcagcgcaacgttatagtattctcccttctcaatagccatttttacttcctctaccgcctggcagcctgtctctacccatttagactttgcccccatgccggaaagtatctgggctgcctgctgtcccacagacatatcatcgtccgcgatcaggactttcatgtcctgcaacagctcccttgccttccgttcccgttcggcctcctggtcatcactgaccagcccaaacggcagagtaaacagaaatactgttcccttccctttctggctttccacttcgatggtcccgcccatcatctgcaccagattataaacaatggaaagccccagtccgcttcctacgttatttcttgccccctccggggactcttgttcaaagggctggaagatcctcggcataaatttttccgaaatgcccactcccgaatccttcacctggaagcttaagtatgcatatccaccggaacgtctctgttcttccactgaaactgtaatatttcctccatccggagtaaacttcaatgcgttggacagcaagttcatgagaatctgtttgatccgcagggcatcgcccatatagtacctttccaagggctctttgtggtagatctccagctggattcccaaatctacagcctgaggatagataatcttcaccagatcctcaaagaatgtttgaaactcgaacttttctttgacaatctccattttaccggtctcgatctttgacatatccaaaatatcgttgatcagcgacaaaagatatttggaggatgcgtcgatcttgctcatacagttcttgacatttaccggatcatccagctttaaaagccccagggtggtcatcccgatgatggcattcatcggtgtacggatatcatggctcatccgtgacaggaaatctgacttggcccggctggcttcctcagcagaagacagggcgtcccgcagaagctgttcctgccttgccttttccaccctttgctgatccagcacttttactagctggatcaccagcatatcgtcatttacaggattgtccacactgatcatgtgggcagaaatccaatgatattcaccatcaattcccagctgccggaactccatatagatttcctgttctccctgtgaaaaccgctccatcattgcctccttagaaaagacggaacagtaatcttcacggtaagccggataaaccatgggcagcatctttgcaaacatatcctcataattgcctctccggtcgtcaaacgggcaggtctgcgtctcaataaaacagttgtatgtattctgggtaagattgatgctcatgatcatcggatatgcggtgcaggtagccgctctgagacactgattttcaatcaggcgttctctctcctgcgccttctgcagaagttttgtctcagttacgtccgtatagattgcttggatcacctctgttccctctgtgttgatcagacgttccataaccacattgatccatgcacttaggcggtccccgccctgaggacggcattccctcgtgtaatgcacgatccccccgtttagtttcaggctgtcaaccatctcctcgatcctggccctatcctcatccaacaccaggcaaaatggggtttccaccgactccctgtattcccgctcggatgaaaagccgtaaaactcccatgccatacggtttaagctgacaacccggtgtgaaggatccgctgtaaactgtatgattccacacggaagggaatcatacagctgcacgagaaatctggtctttctctcagattcctgttccttttcttccagctcgcttttcattttgtcaaaagcttcttttccggcagtttccgggaacaactccccctcctggatatctgagtaatccacagaattatggatatgaagggtctcaaagaattccccctttttgcgaaacaaaaatgtagccctttggtgtgtcttaaaataaagtccggtgccttcctgcggctcgatccagctgtctccctggcataggaccacatcttttgatacctttctggatacataccgctcaccgaacatcctgcagcgcaccagttgatcctttcctgaccggaaacagtccgccacacactctctcccttctgcctgctgctgcggtcccgcacccagccagacaatatcctccgcaaatgtggatatcaaaaactccacgtccgcttcgcaaaaatatgattttaatatttgatctgcaaaagcttctgcctgatgcagcatatgatctcttggcatcatgtgttctcctttaactatctttgtaacgagaaatatcatggcaggataacatacacgcatcctgttctctccaccggatcagggatgcatccgccactgtccaaaccttcaggactggattataaacctctattgttttgttcccggtctccctgatatttcttgcagggcactccgcacatggttctgtccgtccaaagaatgcctcgtagcagtacattccagttttcacgtccggtgcaatttctaatgtcttttgattaatatacctcatccggtagctgtcagggtcgataatataaatccaggagttctggttatccagcgctgtctttaaactgaacgctgtttcttccgctcgatcctgagctctttttttcagcagaaagatggatagaagctttgcgatcagcgttaatgcactgatctggtcttttgtccacatccttctgataacacattcgtcaaagcccacaaatcctttatagacccctccgtccctgatgacacactgaagggtggatttagtcccttgaggggtcagaacttccctctgatcccggggcagcaaggagatatcgggacagtaaaagatcccgttctcgttaaaattgtccttgtactggtttgacagcatcttatatgaaatcttctgcctgagccccatctggggatcaactccctgattacaccattcaaatgtattgctgtaactgcttccatcctcagattcctcataaatataagccctgctcacactgaaacgcgatcccgccatctcaagaatcgaacttactgccctctccagatctttctcctcataaatctttcggaagatctgctcgatcaggtcatccgtcttcttttcctgttccccggccggatcaatccttgtgctggccgtggccgccggctcaggaaatccaagtctctgctctgtcagcgagctgtcaaaaagacaatagccatttttccctttggactttgtgtgatagagtgccaggtcactgcgcctgaacagctcctcgaagctggtgccgtcctccgggcagcacgcaatgccaatactgctggaaaaatcacatggggtcctatcctgttggaacatagactgaaaagagtccctgatcttttccgccctgttttttaatatatctactgttcttatatctttcataaagattaaaaattcatcgcctccgatcctggagataatgtcctcttttctgagaagatttgtgagcaccgatgcagtctcctgaagcacagcatccccgaacatatgtccataccggtcattgatcatcttaaaatcatccacatcgatgatcatcatggccgccatctcctcaggattcctgttctcaagatagtgatcgatctcctttctggcggtgctcctgttatagagcccggtaagttcgtctctggaagccttgtcttccagttcctgtgacgccctcttttcagcatcaatatccgtcatgataccgacagctttaaatgcccttcctgaccggtcaaactgggctgtagctttggctttgtaccagcggtaactcccctcccggtccgcgagcctgaactctatctccccgtaaggcatgctgccgcccatctggctgagtagtttttccaccggctccaggtcttccggatggatgtgggactgtgtcaggagcctggtgctggcctcatccatgaccggtgtatagccgaacttctttttccaattggacgagtacagcatcttatcctttatcatatcccactcaaagattacgtcattagactggtccatgatgatcttatgcctctccagcgtcagcctcagttcctcctgagcctgcttggactgggtcacattgatcagcgtcctgaaaatatgctctttgccatcgctccctgtgaccagatggcttttatccaggacccatatgacctggccgtcctttgccaccacccggtactccagttcaatagcatttcccacattcagctgtttcttcgtctgttccagcacttcttcccggtctgccggataaattagttccagatagcggctgtgaaatctctctttaatctctgccgctttatatcccagcagattttccagcccctcattgatctggagcaaggtaaaatacttatcattcaaacactgctgtatccctcccagcgtctgtccaatggctcccactcccggcatacgcacagcctggtgctcccccgcctcatccgaatgacggatgtccttccatatgagaagcacttttctctgaaaaggatgaccgtcggaaaccctcataagggtacactcacaccagctgtatgtcctgaggctctcattgtaaacacggaacttcctgctctccttcaacaggccgtcctcgaaaaacctttccaatcccgggccgaggaagtcaagcgcaggattccggtcctccgggtgcagggagcctttgacaaagttcctgatactgtcctcgaacccatctcccgttttcagagcgctgaaattcccattcgctgtatacaccatatgatagataccagtgccgatgtccacttccatgacagttgaatccacataccgcagaagggtaaaatacttggcctggcccatttgaagcgtatccatggcctcggcatagtttgcctttgatgagggttccggctttagggtatcggtcctggaaatcattttgtccgcatatttccttgaatactgggcaaaaatatcctttacgtttttaaagcactctagaagtttgggagaaaaggttccgcactctccattcaggatcatggtaaacgcctgctccggcgcaatggcttttttatacactctgtctgttgtcagagcatcgtagcagtccgcgatccccgccacctgggcacagatcggaatactgtctcccttaagcccgtcaggatatccctttccatcccagcgttcgtgatggtaccggcaaatattataggcatatcttaaatacttccggtcactcatccggtccagccccgcaagaatctcacatcccttgacagaatgagtcttcatgatctcaaactcctcttttgtcagtcggcctggtttatttaaaatggcgtcaggtatggcgatcttgcctatatcgtgcatggaggaggcgctgacgatcatctggatatcggcatctgccagaccgtattccgggtaactgaccgccacatcctccagcagtgcctccgtaaaaatacggattctgcggatatgctgtcctgtctccgcgctgcggtactcaatgatagaagacagtgcgtcaatcatagcagaatttgattccctcagctttgccgcctgttcctcgatcagctcttcctgattcagccggtgcagattcagctccacaatattctggacacgccgcttcaccacatgtggctcaaacggtttcatgatgatctcagaagctcccagatcaaagacctgaacttcattttccacggaatcctctgccgttatgaccaccactggaaattctgagagcaagccgtcctgtccgatctcttttagtacctgatatccgtctttgaccggcatgaccaggtccagcagcacagccgcgatccttgcgtgatactgttctaacaggaccagtgcctgctgcccattttctgcctccagaagattataatctgtctcaaacacaccacgtaatatgacacggttaatctccatatcatcaacgattaatattgtgtctcttcctgccatgattcttcccccgatattacactccgattatgattcatctaaaattttccactatattgttaagtataacacaaatcttagagataaacgtaaaaaacagccggatcacacggctgtttttaccctatttaaaaaataatggaatgcaggcaaaaaaagctactctgttacacataaatgaccgtaactcctccgaaattgatcccccctgtcagatgtacgttgacggtcccatcgctctggcttctgtttttttcatccacagcgccggcaaatgcactgacgttgttgatcaccgtccaatgcttcgggatataaagctccacacccgcaaaagagacatccagattgatctccgccttaccgcctctaacctgggcattgtcaaaatacgctttgatagctccgaagctggcgtcaagtctggcatacttaaagtcatcagaattcacatatttgaccgtggagccaaaagacgtcctgtgataaaccgaggttccgtcgtcctcatcaatgactgactcaaacggctcatcgctgtgccattccttccatcttctgtgccttgaaggaaacagcatatggcatccaatacttcccagcagcgcagctcccagcaccggccaaggtgtaatggcagtgataccaagcggtctggcataaatgatacatataaacgcgatagaaaacaaaatccctgtatactccagatgcagcaggcttttgatcagcattgccgcaaagaatatggtcaacagaaggctgaagacgctgatatccttaagataacccaatctgctgcaaagaatgaatatggctcccagaataaaaaataatccccaaaaaatcttttcttttttcatttcccaatcctcttttcttctaatttttgttttaacggtttcagataaagcctcgatacataaacctgcttatgtgtgttctcaaactgtataacgcctgaagcagacaatccccggctgatagaatatatcttatgggtgttgaccactgctgactttgagatcctcataaaagaacccggcagcatctcctccaactcatacagacggtaccttgtctcatagatatcatccgccgtatgcacatggatggtgtttccgtctgtctcaaaaaacaggaccttggagagtggaaaataatactcctgctcacctttggaaaacacgatggtctgcatcttggacacggtttcctggaccgcgttttgtaccttccggatcttatcatccaggttttggcaccgtatgacgacctcttcttccgctaaattttcgtcaatctcaattcgtatcttcatcttttcatctccacgtctttcattatatcagagcctgccccgctgtacacgcaaaacagccaacaggttaaaattgcttggtaagtggcacatttcccctcatatatggtataatatctgcaatcagaatggaggtagcatgttatgtccaataaaatattattttttgacatcgacgggacacttgcagaccaggaaggtatccttccctcgaacaaaaaggcccttagggagctgagatccaatggacacactgtcatgatcgcatctggcaggcctgcgggatatataaggcgcatgttttccggccttgcagacggatttatcgctgccaacggaaggcgcatagaacataacgacagcatcctgctggacaacagcttcaccatcgatgaactcaaagagatcatcaaactgtgcaaagcctcccagtgtgcctactgccttcttggagacggcatcgtttaccacgggaaccctctttacctgtacggacatacaagaccctatgaatccatcgatgtcatccatgagaaccagtgggatatccacgatgtgaaggcctatgcgtttgacattatctacaaggataaagatcacttaaagaccatcaagcggaattttgacggcaagtatatcatcaatgatcactttgacggctccgccgatgtgtccagcgtctcgtttaacaaaggacatgccgtggcctacgtgaccaatgcccttggattttcccaggatgacagttacgctttcggggacggggacaacgatgtccatatgtttgaagctgcagggactgcggttgccatggagaacggaaccagcgccgcaagaaaagccgccgactatgtcactcggcactttaaagaggacggcatctttcatgccctcaaacatctgaaggtcttaaacagccttctataatcttacaacgaaacgaaagcgggcaggtccgcttcaactccctaaatccctcaatcatgagggacttgttccgctttacgcgccaaatgcgatttgacgtagtcaaataatttcttcacgcatttgtgtgcataatgcccgtagggcttttttgttccatagggaggttcgaagaactttccgatggaataaaaaacggggctgcccactgaatacaatttgttttcagtgggcagccccgtatttattatattaattgctgagctttacaatggataaggagcggttcatatatcctaagggaaggaaatttgaactgatgcctgctcccacttcatctccggctgacaaggcagcttgaacgacaaacgttgaactgctccggtttaatatcataaagtaagtggagatatcgccgaaagctgcatctccgttgactgtaatcagcgcggtcaaatatggttgatccgcatccggctcggctgtagcctcggcgctgactgataaagatatctgataaaccccgctttctccgactactaacccattgccgctttgactgactgtcaccgtatctgataacggtccagccaaattaaacggcatgctctccagctctgccccgggtacttctatcgtggttccccttagggagccaaatcctaaaccaggatccggtgtgggatccgctggttcgctgccgccgcagttacagccgcagtgtgtgcatcctccgccacagggattaggattacaatgatatttattacatttatccgccataatttcgtcctctcttgtctggtatatgaaagcgatcataaatcaatcaccttcacaatattgtatgtgtacagacaagaaatggtgctcataaatcacacggaaaactgtgagtggtacaattgttcataatatcccttcttttctaaaagctcctggtgggtgccggtctcaacgatctgtccttccttcaaaacaaggattaaatctgcgttttttatggtggagagcctgtgggcgatgacaaagctggtcctgcctgccaaaagtttgtgcatggcctcctgcagcattttctccagccttgtatccacggacgaggtggcctcatccaggatcagaatcttaggatctttcagcacagccctcgcgatggtcagcagctgcttctctccctgggagatattgctgccctcctcatcaatctccatatcatatccttttggaagcgtgcggataaagtggtggacattggccgtcttggccgcgtcgatcacctcgtcctttctggcgtccagtcttccatatctgatattttcatatatgcttcccgaaaaaagccaggtatcctggaggaccataccgaacatgctccttaaatcttcccttttcatggttctgatgtccacaccgtcgatcaggatccttccgctgtccgtgtcataaaaccggagcagaaggttaatgatggtcgtttttcccgctcctgtaggacccacgatggccaccatctgcccgttcttgatcttgatatccaagtcccggatcaccggtgtatctccgtatccaaaggatacatggtcaaactccacatttcccttgatctgtgtcaactggacgcctggatctggatcagggacttcctccggctcatccaagatctcaaatattctcttaagacccgcaaaagctgcctggatctgggcggaaagctgcgccacctgagagagaggttcgttgcactgccagatataacggataaatgcctgaagatttcccaccgtgagcatcccctggattacaaagactgtgcccgaaactgccacgccgccgatgcacaggtaaacactcagagagatgagcgggctcataatggaagatataaactgtgccttcagcgcatgtttctggagtcttccgttaatctcccggaaccgctcctgggaaggcttctgcctgccgaacaaaaggatctcattgtatcctgtgtaaagctccgtgatggctccgttcagttctcccagcgaatcctgttgggccttgaactgtttctggctcctttttaccacagcgatgctgatgagtatgctgacagggatgatcagaaccaccagccatgccatcaccggctggatggtaaacaccatcacaaggaccagaaccagggtcagtacgccgctgaccacctggatgaaactctgctgcagtccgttggacacagaatcaatgtcgttggtcacccggcttaaggtgtccccgaagctgtgggtatcaaaatatttgaccggcagccttcggatcttatcctgcaccgcgttcctcatatcatgcatggcactctggatggaattggtcagcaggaacatgctgatgatctgtgttcccatcttaatgatataaatcacggccagaatcaagagaatcttaaggatcacatcaaaatggacccctgccccggggatcttccccgcgatgtccgatgcatccttagccagctgggtcgtgatcattccctcgatcctcggcgccgatgtcatggcggccacactgatgaccgccgtcacgacagtcccaaggaacccccatttgtatggagcaataaatggttttaatttcttaaggaccgctcctgcctgcttcagttttttaatcatcggccagttcctccttatccagctgggatgcggcaatctcctgatagatcttacagctctttaatagctccctgtgggtgccggatcctacgacccgtccttcattgagcaccatgatcttatccgcatccatgatgctggtgatcctctgagccaccaccatcatgatagcgttccccagtgtctttttcagttctcttctcagttttgcgtcggtcttaaaatccagtgcagaaaaagaatcgtcaaatatataaacttccggttttctcacaagcgccctggcgatggaaagcctctgcctctgccctccggatacgtttgtggcattctccgtaatctggacttcaaacccgcctttttccatgatgaaatcataggcctgggctgtccgtgcagcttcctccatctcttccatggatgcatcttcttttccgaacttcaaattatccgcaatgctgcctgagaaaagaagcgccttctgcgggataaaaccgatggaatttctcagggatttaaggtccatctccctgatgtcttttccgttgaccaacacccttccgccggatacatcataggcccgcggcacaaggttgatcagtgtactttttcctgaacctgtactgccgataaaggcaatggtctctccctttttcacggtaaaagatacatcggtgagcaccgcctcttctccgtcaggatatgcaaacgtcacatggtcaaattgaatctcatcaacagggatcttcccagccgtatcatttggactgccgtccaccgcaggcactgcgtcaaatactttggagatcctctttgcgctgacagcggcttttggatacatcataaataccaggcagaacagcataatagagaacatcacatgaaacaggtaatccataaaggctaccagctgtccgatattcagccctccctgctgaatcataacgctggaaatccagtagatgagcataccagccagattcatcaggaaataaaaggccggctgtgtcacagacatgagcttaaagagctttttggaatatcccatataagcactatttgccccgtcaaaccgttctttttcatgccggtcattggtaaacgcacggatgacccgaatcccgctgatattttctttagagatccggttgatccattccagcgaggactgctggcgttcgctcagaagctccgagcgttttgccacaatgatgactcccacgatgataaaagggatcgtccctaaaatgaccatcgaaagatttaaggatgccttcagcaccagcacgatgctccccactgtcatcacaggagtcatcagtgccgtccgaaacaggatgtttaaaaacatctggatctggaaagcatcattggttgtcctggttatcagagatgcagtgccgaattccttaaattctctgtgcgagaattcctgtgtcttttcaaacatatcatttcggatatcccgtgtgatggacgtggacagataagcacagcagtagccgagaagaatggtccctgcggtccccagaagggagactaagaggatcacccctcccatctgaaaaataaacgttgtgtcttttgccgatacgcccctgtcgatcatccacgccacgatggtcggtatccctagctcaaccagggcaaaaccgaagaccgaaaatacgttcagcgcgaacatctttttataattcttcaagtatgataaaatcagtttcattttgtcttttcctcttttattcccccatcctcattcttgacgggatttacatgtaccatacaatgtttcactggtgcaaaattttcctctattttcaggtggactttctccgcagtttcatgagcctgttttaaggtcagagagccgtccatacagatctccacatctacatatactctggccccgaactttctggtacggatatcgtcaattccttttacctcgggctgccttaagatgacctgtctcatctgttccacagtctccctgctgcaggattcgtcgatcatcttgcagatagaatctgcaaaaatatcgtaggatgccttaataatgaaaatacagatcactacacttgccagcggatccagcaccgggaaacctatcctcgcacccaggataccaataaaacttcccacggaggacagtgcatctgagcggtgatgccatgcatctgccatcagtgccccggaatctgttttcactgccgcatttctggtataccagtacattccttccttgaccgcaatagagattagggcagccaccatggccagagttcccggcacagtaagcttatcatagccacctccgaagatcttttgaagcccggcggcccctatgaagatcccggtaagaaaaagcactgccccaaggaggatcgcggccacacattccatccgttcatgcccatactgatgcttttcatcagcttccttggaggccatagcaacgcctgccagaacaatgacagtgctgaacacatccgatgcggaatgggctgcatccgatatcatagcaccggatctggccgccactcctgcaaacagcttaaatgcagacaaaaccaagtttacaagaatgctgttaacggaaactctcattgccgtttgttcgattttcagttgcttcatgtgcctctacatccttattatctcaatgcttttataatatgcagcgcctttccacaaggttccttcacagtcagtaccccaggcatttccaaaggactttatagagcactctggcctccacaggttttgtcaggtacgcggtcatgccggctttttccgcctgaagctgctcgtctctgaacgcattggcggtcatagcgatcaccggtaccgccgcatcctcccttttcaggtttctgatgcgcctgacagcctccagcccatccatcaccggcatccgtatatccattaatacggcctgatagtatcctatatcagaatctgtatacttgtctaccgcatcttttccatctacagcagtttctgtctccagtccggccatctcaagcagcgtcactgcgatctcccggttcagttcgttatcctccacgatcaggattttctctccccgaaagtggaatttctctttggtctctgtctccccatcttctgggattttctcctcttcctcagccttcagcattggaagtgttacatcaaaacagcttccctccccgagacggctggtcagggatatctgaccgttcatcagatgaaccagattctgggtaatagacagcccgagaccgctgccctcaaataccctgcctgcccccgcatcttcctgctcaaacggctgaaagatcttcttttgaaattcctcagaaataccgataccgttgtcctccaccctgatcctgatgacatccgctttccggccttcccggatccgctctgcacttacccggacggttcctccctcacctgtatatttcacagcattggttagaaggttcatcagtatctggttcagtctaagggtatcccctagataacagtgatcagtgccggatcctgtctcgcagagcagcctctgttttttttgttctgactgctcccggcacatatctgccgcgccacgaatcagctgccggatccaaaacggctcagcgacaatgttcatcttaccactctcaatctttgacatatccagtacgtcgttgatcagagccagcaggaagtctgctgattcatgaatcttacgtaaacagttcctgacctgtcccggatcgtccacacttgcctcggcgatggccgtcatcccaatgatggcgttcatcggcgtacggatatcatgggacatcctggaaagaaaatctgatttggcgttgttggactcttccgccagggcaagagctcctcttagtacttccttcttcctctcttcttccttcctcacatcgtccacgtttttaaagcagaccatgacacgggtcttctgcgcatcccggtctaatagctggatctgtgtatcataccatcggtaggccccgtcttcacataggtacagggtttcggacgacacagattcctgtccggtttcaaagaagtggatcagactttttcttccaagcttttcatcaaactcctgatagtaatccggatgaattccatactgccgttcatccatgaccccatttttaatcagcttggtgatcatcggtttttcatcgcttgggatatccttccagacctggatctcccctgtgtgaagttcatactcataaatcgcgtcataaaatgcattaactgccgagataaacctgtgctcggcctgctctttttcctgtttcgcctgtcttaactcgtcgatgtcccggaatgttagaagtatattatattcgtcattctcatgattttttatggcagttccgatcatctcgcaccaccggtattctccagctccattttttctccggacttgtgtaaagaactttctctgtccaagatcgatctgttccttcatgaagtccagattaaagaaatcaaaaaatctctgccggtcctcagggtgaatcaaagccatggcatatttccggttatcctccgcaaaatctgcggcttgtgttgtctccagagttgcttgcgtggaatcgtcagctttgtgcaccatgtactttctggtctttaagtctagtacgatcagctctccgtacatggtaagaatgctggcggccatgatctgggattccctctccagtttttttaattcctgagcccttgccatctcatcggatatattttttaaggttcctatgaccttttggacccttccattctctcttagggcatccccctgcatcagcgtccacgtgtagctgtcttcttctgggtacctaatgcggatctgggcactgttgatccttccgttcatcatgtcctccaccagtttctggtcatctggatgaacgatcttcaaccccttcagattctgcatatatccctgaatcgtatattctctgccgcccatcttctggctctcatggctggtaagtgtatccttctctggcaggtactcaaacaagacatccacagaactctccgccgcaagacgatactccagctgtttctgaatctgctccgtcacgtcgaatacaacgaattgatagataggatatcctttttcctcgccagtcttcttgccctcacagtgcacccacctgatggaattgcaggccgtcttcagacggaactccgcactgaccggatcaccatttgcagccttttcatagaacatgtccatgacccagccccggtcttcatcataaagactgtatcctccgtcctcctggaaccgctcctgttttccataagagagaaagaactccgggcttccgctgagtactgtgaaatcctcatccagacggatgaccacagtctcacctagaagatttctgttatcgtattcaatttttacattttctcctgccgttttgtcttccacgccctatcctccttcaacaccacatctgctttcagtccgttttattatacccagaagggcaccttttgtttttataaatttcatctattctctaacgaactgtcagtaagcctgaacgaatttgtaacgtttagagaaaacacacaaaacgaaaatgatagaagcaaaaggagccgctttaccaaagttatttgccactattggaggagcgcatttcaaaagcgtgacttaaatagtggtaaataactcataacatagattcactgtttccctgccttggcatactataaaaacaactgaaacagcaaaggaatttttcttatgacattttctgattcttacaaaccggcagtcactgactcccgtccttatccgcctattaaagttgcacgcagaaacccacgctatgctgacatgatcgtgcctgcgctgagagcccagtccagtgagctgactgcgatcaccacatatatttatcagaactggatcttctttcagaagcatacttccctggccgaaaccatctcaaaaatcgccaacgtagaaatgcaccatctgcagatgcttggaacccttgtgacacttctgggcggtgaccccagttttgcgcaggacacctgccaatgctggactggaaatgctcccggctacacacacaatatccggaaggccatgaaggacaacgtagaagcagaagaggcagccgccaacttttatctggagactgcctctaagatacaggatcagtttgtctgtgccgtgctgaatcgtattgctatggacgagaagatacatgcaaaaatcttccgccactatttgaacaacttaagctgctgagcccagtcttcaaagctttaatacttccagatcatccggcacaaaaacatttcctgaaaatatcagttctgcctcttttgtatattgcctttttctgtttgccaagtcggtatcctctgtatgataaagcaccagattcttaaccctcagtttctcggccagattgcccgcatccaacgccgtgctgtggtgcttttcatacggctggaatatatcccgcatgccgtacagacaaaacgcctcacacatcagccagtcggcaccttccacgtaagctctgcagacactgttatacggctcatcccccaggcatgccagagagatcccgtcctgccagtctgcccggaatccaaactgtctggccttcgtagactgaatatcaaaaaaccggactgtgaatccggacatctccctcttctctccgtcctccacttcctggatcaggatcttgctgtccagaagccttaaaaactttccggcaagggtgagacggcagatttcttttaagatatgagcggcctccctatggcagtaaatcgtaaaacgtccgtaatatgtttcagagatcatcatggatgcgatctttctgaccatccacaccgctcccagtatgtggtccgtgtgggcatgagtcagaaacatgtgacggatctgcccgaacggtatctccgccctttcgatctgagcaaggatcccgtttcctccaccggcatccaccaagagatattcgtcctcatgatgtatagcaaaacacgtgttatagcacttggtgaccatggcgtttccggtgcccaacaagatcaattccggtttcataacatcaactcatttctctttggattggcacaggcctttttcagcttcatggacgcggccatcaggacaggcctgctgacactccgggcatgctgcggacataccgcaatacacctcatgcaggagatacatttgtctctgtccgtctcatccggcttttccggggaaatcgctcccactggacactgtactgcacagactccacattttgtgcactgcttaccggcagacggcttcatagggaccccgttgtattctcggtacggccggtttccttttacggacaacggactcagctgtttgggctcctctgctgctttgagtttcgcctgaatcttttccgcgtattcctgtaactctttttgatccagttcatccggccttcccgccgcatactgccgcatgatggaatgctctgccaccgccgccactgccgctgccgggacaaacccctgttcctctgccaggtcttttaactccaacagggtatcgtcataatcgcggtttccgaacacggccacaagaacgatcggtgccccgtttcctttcatattacgaaatctttggaccgcaggagccggaacgcgtcccccataggatgggacgccgaaatagacaatctcatcgctttgaaattcataatgctttccggcatctgggtaacgtgaaatgtcgatggcctcgcacgactcctctccccagacattccccagaagctttgtgatcttctctgtgctgtatgtagggctgaaaaaaataatcttggcttttgatatctccataccgttcactccttacctgaagagacttatcatcgctgcactccggaaaagaaaacctccgccgcagattttcctgcggaagaggcctcttttcatttgttttattatatcagatattcttattctccgatagcctttatctgtgtatcttctctatgcttctggatgccgtttctggttccttttttgataagccggcagcttatccctgtgttcagaaatgatggtattcttgacaaaccaaaccctgccatctttctgcttttgcagtaccacctgatgtgtaaatgcctggtctgtacctttctgtttcaggagagcatccaccgtcaggactgtcatacctccccccttatgttcaacgtccacaacctccggcactggcatggactggggagtcagattccagccccttaacggctcccacagataagtgctgtccttctcactgtaatctgcgtactgcctgatttccttttttgaaaacggcagatagtcctgcataacagcttcaaacttttcagacgttatcctgtccacgctgttgtcatcctgaaagtatcggtgatgcttcatataataaaaatactcatacaaatcatttaagtacaagtttttatgattctttctgtcccagtccgtcagaaacaggttatttccccggtatcccacaggacttatgtactctctgttaagcctccggcagtcatcactgagaggcagcaccctgaccatacagtgggtatccatctcctcgttttctgtgggaaccgtctcccagatcagccaccccttttttgtatactcccatttggcagctgttttggtgtctatataggagacagccggctgctgctttttatcccagtccagataagcatcggtcacgctcatttttttgccctgaaacttcatttcgtacctatgaaggcctccggatgaagtgacacagtaaaatacagcctgtcctttctttccttctttggccttcttaagccctctcgttaccttctgtatgttcttcatattacagtcatttcccatgcaggctgatgtatacccattcctgcccagctggtccacgatcctgtgaacttccttttcagacaggacagtattcttccctctgcccttctccgcctttatataaatatcccggtaactgcctgcagccttaataagctcctctctgactgtttcatttttgtctgtctttttctctgcgcaggctgacagtgtacagagacttaagattaagatcaatagccaaatattctgcttcattgacgctctcctttttcttgttttacaaatcttacatctgtaatatttaaatgtcaagaagaaaagggttcttaaattaagaatttaaaaaccttagctgtgatctccttcccggtaaacaacttctccgtcaatgattgtatatatagtctttgtcagggtgttgaccgggttgccggaaaagacagcgatgtccgcatcctttccaggctccaggcttccgaccctgtgatctgtccggcatatctttgcggcgttgatggtgatggcccttaacgctccctccatgctcatcccctgcttcaccgccaatcccgcacaaagaggcagataacggatcagggataccggatggtctgtcataatggctgtgagcacccctgctttttccagaatcccgttggttttaaagctcatgttctgtacttcgatcttagatcttgccgtcagatccggtcctatgatcgccgggaagccggatgcggcaatctcttgcgccaccaggtgtccttccgtacagtggtccagtgtcagatcaatatcaaactcttttgcgatccggatcgctgtcaggatgtcatcagccctgtgggcatgggtttttaatggtatcttcttttccagaaccggtatccacggttccatgcggaaatctttcttttccagtttccctgctttcctgtcctgctgatactgtttcgcctgaaacaaagcttctcttaaaattgctgccgtccccattcgggtggaaggcatcagctcccttccgccgtactcgtttttgggattttctccaaacgctgtttttatggctgccggttcaagcactgccatctgatcgatacaacgtccgtgcgtcttcataaacacagactggcctcctaccacattagcgcttcccggtcctgtcatcacagaggtaatccctgcaatgatcgcatcatgaaaggcagggtccatgggattgacgccgtcaatagcccggatctgaggagtgacagggtctgtgacctcattgcagtcatcgccggcctctccccgtttctcctcgatgatgcctacatgacagtgagcatcaatcagtcccggcataacccaggcgccggcagcgtcgagcacttcctcgccgttctctggcttgggcgcctgctccacgctgcccagctctttgatgtatttcccttctgtactcagatatccctgtttgatttcttcccctgtcatcggcagaatcctgccatttataatgagcataaactgtttcctcctgaggattatatttactaaaagtattgtcttaagttttgcccaaagctaaaaaaacaaacatcttatcaccttttcttccaaatcacagataatttttttattttttggaatactgaataccagaagaaatattatttgaatcaaaggagattaggactatgccaaacaaaattattgtcgtcggcgcaaaccacgccggcaccgcggcactgaatacaattctggatcattataaagatgtggatgtcaccgcatttgacgccaattccaacatcagctttttaggatgcgggatggctctgtggattggcggacaaatctcaggtcctgacggtctgttttattccagtaaggagatccttgaaggaaagggagccaaaatctatatggagacctcggtcaactccattgattttgataaaaagactgtctatgtaaaagatgcgtccggcaaagacaaagaatactcttacgacaaattgatccttgccactggttcaacccctgtaggaccccagcttccgggcatgagtcttgacaacgtccagtttgtaaagctctaccagaacgcccaggaggtcattgaaaagctcggagatacctccattaaaaaggttgctgtagtgggcggcggttatatcggagtggaacttgccgaggctttccagcgcaatggacgggaagtgactttgatcgactgcgccaagacctgcctctctgcctactatgacgagatgttctgcaagcgtatggaaaaacagctttctgaccacggaattcacctggcatttgaagaaaaagtggaacgcctggaaggaaatacgagggttgaaaaggtcattacagataaaaacagctatgatgcggatatggtcatcttctgtgtgggattccgtcccaatacaaaacttggaaacggccagcttcgacagtttaacaaaaacggagcctatgagacggatcttatgcagcagacaagccatccggatgtctatgccgtgggagactgctctaccgtgtacaacaacgccatcgaggatacggattatatcgcactggccaccaatgcggtccgttccgggatcatcgcggcccacaatgcctgcggcacggaactgaaatctccgggagtccagggctccaacggcatcagtatctggggtttaaatatggtaagcacaggtctctccctggaccgcgcaaaaaaacttggttttgatgccgccgccacagactatgaggactggcagaaagccggattcatggaaaaggacaattataaagtggtcatccgtatcgtctatgacaagaagacccggcggatcctgggcgcccagctttgctctgactacgatatctccatgtccatccacttattctccatggcgatacaggagaaagtcaccattgataagttaaaactgtttgacttgttcttcctcccgcactttaaccagccgtataactatatcaccatggcggcgctgaacgcagaataaccgctgctttttcagaacaggaggaaacagattgaagacttttcaggaattatataaagaattattaagaaaccagatgaaagacgaagacatcaacgatgaggattatgatccgcaccatctcgactgtctcttaaacccagaccagtatgctccggtcatccacacggattcctgccaggaatgcgcctatgacagggcctgcaaaaacagctgtatctttgacgccatagaagaaaaagacggaaagcttaccattgatccggacaaatgcgccggctgcggtgtctgtatcgaggcatgcagcctggataagctttccgagagcaaggatatttttccggtactcaaggagatccgcaatgaaaaaaaagatgtgtatgcactgattgccccggcttttgtgggacagtatgaaaatgcctctccaggtcagctcagaagcgccctgaaagccgccggctttaaaggtatggtggaggtcgccgtatttgctgatatcctgacattaaaagaggcactggaatttgacaagcatatcaatacggaagacgatttccagctcacaagctgctgctgtcctgtctggatcgccatgatccgtaaaatatacaaggagctcatgccccatgtgccgggagccgtatcccctatgatcgcagccggccggacagtgaaaaagatccatccggaggcggtcaccgtctttatcgggccgtgtatggcaaaaaagaaagaggccaaggaaccagatattaaagatgcggtggactatgtgctcaccttccaggaagtacaggatatattcgacgcagcagacattcatccggaagaactggcagaaaacgaccgggaacactcctccagagccggccgaatctacgcccacacaggcggtgtcagtgaagccgtaaaatccacagtggaaaaactccatcccggaagagaagtccctgtccatccacagcaggccgacggagtaccggcgtgccggaaaatgatcgaacaaatccaaaagggagagacagacgccaacttcttcgagggaatggcctgcaacggcggctgtgtaggaggtcctaagattatcatcgacaaagaaaaaggaaaatccaacgtggaacaatacggggaagaagctccttaccgaacacctcttgacaatccttacgtgatggaactgctccaccgccttgggtttaaaaccatggaagagtttgtggaaaagagtgatatgttcactcgggattttggagaaagtcatcctcaatcccagagccattaaaatatgtaatttctgcttacgcaggatgttacacaagacaaaaggtatcatcctgcataagtttttcctccgattaggacttggcctctttcctcatttctggcaggaaatactcaatcttaggaggaattttttctacccttaaaactgcagtacacaattttgcggactgcaggcaaccactatatccagttatgataaaactgcaaaataaataataactacgataccgagcagaatccggtacacaccgaaaatcttaaagtcatgcttgcgtatatagctcaaaagcatacggatggccagaatggataccacaaaagataccgcagttcccacaagcaggagtatccactccgtcccggaaaacatccctgacttaagaaagtatttgatgagcttgagcccgctggctcctgccatgaccggaacagccaggaaaaacgaaaattcactggcaacataacgtgaacatcccaaaagaaccgctcccaggattgtcgcaccactcctggatgtacccggtatcgccgccagcacctgaaaacagccgataaagaatgcggctttataagtgagttccttcagagaactcatagacgggcgcctctttctgctctcaataacaataaaagcgataccatagaggatcaaggttgcggcgatcacatagactcctgagagataatcctccagtaccatatctagcggaagccccacaatgatgatcggtatacacccgacgataacctttttccacagattgtatgtctcccttttttcctgtctgcttttccggggcgaaaagggattcagtttatggaaaaataacacaagcactgccagtattgatccaaactgtatcacaaccttaaatacctcaaaaaactccgggctcgatgccataggccatatttggtcaaacaaaatcaagtggccggtgctgctgatgggtaaccactccgtgataccctgtataataccaaggacagcagcctttactatttcaatcagattcatgaacattctctcctttataaatttagaataacgattctattgtatttcactttgccagaaattacaatgaacaattctgacacaatactaatgttcattttttataccattaaaaaattctttcagctcctgccgtacatcctgggacagatcttttttcttcactccctcaatggcggcctcgatcccccacaggcggtggaggcacgcagactcatcaaaagcccggatcttcagccacgcctcccggcttccggtctctatgagctgttctttggtatagattcccgcttcattaagctgttcctccagcttttcaccaatgttcggcagttttcttaattctcccatgatgtttcctccttctactgtttctctcgattatattctacttgaaaaaagaaaatgaggcgaaaccatctgccgtcttctatgcatttccatttacagccacgctgtgacaatgataaagattccaatgataatctggaaaatgataagtccataatttttgcggtctgtgatataaagatacggttcattttcgcagatataaatgggatatgtatgtccgctctcataattctttgccatattcaatggaacttcttcattgctttcattttcataagaaacaccgccataagtatatcggaatgtaggtatcaccgtctgcattttattgcttcttgattcccggctttttataaatgtcccataaatctgagtcccacacatacgaatcttgattagatcaaagatactcatacagatgccctcaactccaaccgtacaccaaagcagcgcatgcaaaagctctgtgtcttccatatacagagcataggttcccgcaaggcctccggccaaagggatcaggcccataaacattttcttccaacgcaagaacttcttctcctttataccaaacggaagaagaaaaaaaatccccacagcataacatataattaaaccgatttttcctcccatacttgacagtattcctcctctcctgtgacaggctccctatggatcccttcttccaaaaaaccttctcttttgtaaaatctgtatgccgccaagttctttttatatacatgaagggtgagctttgggtttctccttttgcaataatcaagcaacgcttttccaatccctctggatcgcctatcccttctcacaaaaatccctgccagatatccgtccgtcactcctgtaaatcctgctatttttccatccttatcttcgtatacgaaaatatcggctttttggatcgcttctctgactatactgtaattccttttccaataatcatgtgaaataaaatcatgggcatccagattagaagccagccagatgtccatgactggatccaggtcttcacatttcatcttcctgatcatcccttgcgccgtctctccgattctcataaaaacctcctatccgacagttttattataaaacacagtgagacaattgaaaagaagaggatacggagtacttactttatgtcattctgctccacctatattttccctttaagcacctgatttcctctgcatggcccgcaagatctgtcggtgtctctaaaatgaacggcagccggtacagcgccggatggtttatgatatctaaaatggtctctttgccaatgtgtccgctgccgatcaccgtgtgccggtccttgtggctttctctcacattcatgctgtcattgatatgaaatgcttttaataattccaggcctatgatctgatcaaaatggctgagtatttcttccaggtgatccacaatatcatatccggaatcccagagatgacaggcatccatacagatccctatgtggtcttttaattcaatccggtccagaatgcccttcaattcctcaaagcttctgcctacctcgcttccttttcccgccatcgtctccagaagaatcacagtcctcatctccggaaacataatagagttcagtgcgtccgcgatctgtccggttgcagtctccaaagactgttttaaccggttccccggatgcaggttataaaagttccccggcataagttccatgcgctgaatgtcttctttcagcatctgggctgagagttccctcagatgtccgtctgaagaacagagatttagggtatacggagcatgggcaagaaatgacccaaattcattcttttttagaatttccaagaactctccaatctcttccatgttgatctttttcgcccttgcccctcttggattccggatgaaaaattgaaaggtattagcgccaatctcaatagcgttgcgtgccatccgctggtatccgcctgccacagagaggtgggtaccgatctttaggtttgtatttgtttgattattttttatattttcaatctctcgtttcatataaatagtctctgcaatccctatttgtttatgtgcaaaagaggcagcaaaatgaaaaaaacaagattagaacagggtcgggaaaacctgcagatcgctcccgacctggtactccagagagaagctggatcctcagaagagggaactgaaaaagggaacagaacctgcatataagcagggactgtcccttttttgaggattataaaatctctatcgtataagaccgcttgctgctttcccccgcatccagggactgaatcaggtacttatgccggatatcctgcactccctgcccgacaaaatcattgatgccgcaccaaggctcaatacacaaatattccgcctgatcaatggcggacggcatggtccaaacagccgctgccggaaatcccggaaaacacactttcaggtgataatctgcctttttacagtccaacgtcatggacgaaatcccgtcttcaaagaccagcgcatccttccggagcagatcaggggtgagccaaagttcccctgcctgctttgccaccgggtatgtctctctggtcaccagcctgcctttcacccggtgtgtgtttaagtccaatgcccggtcaaagatcaggcggtaatcggaaagtccagtgttctccgccagctgaaatcccggatgggcgccgatggaataatacatggtgctggaccctgcattgagaactgtccatgtgaccgtcagcttctttccctccagccggtgggaaacctgcaggcagaaacgataggggtaagatgcataggtatcctcgctgctcgtaagctgcatcacgatctcgctgttgtctatatgcactaaggtgaaatccatatcacgggcaaaaccatgtgctcccattttataagttttctcacccaccgcataggtttcgtcatagaagccgccgatggaaggaaacaggagagggctgtgcttcggccacaccgggcctgcctgccatatgtactcacgctctttggtcttatcgtacatttcgcagagctcgctgccatgttctagtatcgagatgcggcatacttcattttctaattgatacacttcaatgttcctcgctttctttaaaacgtctggatttttgttaggagatatagtataatgaagcggcaaaaattaagaattttttaccatttttccttctcaaagtctttaatctgatgaatatggacatactatgtgcttgagatgtatattttttaatctaaagaggctgctccatcacatattttagcattaccggaggactgcatttaaagtaagacaaagaaacatttccgttttggaggattgtgaatgaatcgaaaatttatgtcggtcaaaaactgtattctagaaaaaattgacaagatgtcacccaatgaaaaactgccttctgagcgcgatcttatcgaagaatttggcttctcccgccccaccatccaaaaggcactatcagatttggaaaatgaaggtatcatttaccgaaaaccacggcagggctcctttgtcgctgaccgccgcctgcacaagtctctggattctcttcaaagttttccggaagacctccgttcctcaggggatatcccctccacgaggctgattgatttcgagatcctggaagcatctgagactgtagccagaaagcttcagatgaaagtgggggatcccgtttactacctcgtgcgtctgcgccataaaaacggtgatccaatcatttatgattactcctactatgctccgtttgcgattaaagatgccagctgtgaggtattagttgattctatctacagctttatggaaaaaaagggaatgaagatttccatggcagaaaagaccgtggatgccattcttcctccaaaagagattgccgatgcattagaactccgaaaggatgaacctgtcattaagatcgaaatgatcgcctacctttcagatggccgcccttttgaatatactctttcccataaaaatccaaaaaaatatttgcttgaaataaaatcctaccgctgataggtaaaggtgccaatcacatgcctggcaccttttttattgtcattctatactcacagaatctccggtctgatagtccgggtattctccttcgacatgtacagtccctggaagcgcggcctctttggccccgtcaaaccggactgtacaatgcccaagctctgaaaatgtcttcgatgctatatcacccaccgcagtgactggatagctgttttttccaatacatagagtatctcccggacaaatggaaaccggcttcttaggctcagtgatgagcacgctgtaatcttccagtcctccatttgcgcactgtccaaagaatatcagcatgttttcacccttgaattcacgtgcctgtgctccaatccctataatctttgtctcaaatttcatgctgctttcccctcctaaaataccagctgaccgatgataacagcaatgatgatctcaattggcgctactaaaaatttagagaataatacagcggataccccgacttctactgtctctggttctgcttcgcaaagtgacatgccgactggaataaaatctgctccgcaaggctgatggatcgcaaataccgttggaagcgccatcgttagtggcacggcacctgtactgatgagaccgccgatcagcgcaccgatgacctgtgggataactgctccgggtccgatgatcggagagatcagaggaaatgtgatgatcaggcccatgacaaccagcccaaccggagatgtcgccagtcctgacagcgcatttgctatgatatttccaacccctgtactcgtgatcagcgtaaatactgtggacacaaaaatcagaaatgggatgatggtttccagacagagcttaaatgaattcctggccgcctgcacaactgtcattacaaattttccgatcgccgaagccactgttgtcataaatttagaaactgctttcataatttttcccctttctcacactcaatcttcagcggtgacattttttacagtagaaccggacacataaagcccctctttgcaaaatgacccaaatggtccgcttggccctgtgggatttagatttatcgtcttgagaccttttttgggaaacatcccaagccgcaggctgcccccgcagtttacaatgacacatgcagtctcagcatccggaactggcttgcgaaatccgtccacagcttctccaccaataatctcagcaattttttctgccaatggatggatacccacaccggtcatacatacaacctttgttcttttaccttctgcgcttatttccagcggagtaccgaatcctccgcctccttttgatacgatagcttttcccatttctttaacctcctgtataattgatagatgaatgaaacacagtactgtatcctagtatgcttctccgtgttttctggcttccacttcttcccagtcgatcccttcgcgttttgcaagaattccattgactttctcaattgtaagcccgatcagggaggaggtgcatagaccgatcaagaatgtacatactgccagaacgcctccagcctgtgccccatacatcttgacaactccctcatagactcccagccaaacatacatttccgccgggtttacgtgcgggaacaggcacatcatcggagccatgttggtacggtttgccacctcaaagaaagcggctttgtatttctctttcagataacggccgaacgtaaatacaatcgggctgcccacaaaaaagttccctagatacgggagaatggtatatcgtgtaaagaaatttcccgtcagtttttgcgcgaacctatcaaagcgttcctcaccgatcaaactcacgatcgcattaagtacagtcaatgcgatcagtgccatcggaaggatgccaagcatgttatcaaggaacgtagttcctgcagccttgaagaatcctgtcaggccttttgccacggtaacgaatgctgtaatgatacctggaagctgaaacgccgtttcatttgccgctgatgcaagttgtgtaagcatatatttttcctccttttgcttttggagggggcaggcagcgcccccttaagaattgttttacgagtacaacattaagctgtgcacttgtcagcagtctgaccgtcagagacgataccgaagtcctttttatattttgcgaccgccatgtcaacccactcttttgtgataggcttcgcattaataatggtataacgcagaccctcccgctctgtgaaatcacgcagcgtcagaaggccggtgcaaagctggtcctcagtgattcccagaccttccagagtcacatcgattcccaaacgtttcagcatcatgaccgccctctcatgctggttgtcctggaataaggacataaagtagactgtcaggccgatgatctgcccgtgcaggaaaggctttttacacacatactccatattgtcaaaaaacgcatgctcactggcgctttcccacatcgtatggttcattttggcactgtattcagccacccagcggaaggcctcacacataaaataaattccgtcatcattgacttcacggatgttgtcaatattctcagataacattccaagcagatattgggcaccatcgcagatctcctgtgagaacctatggctttttgttaccatactgttcagtctccagtcataggaggcagtcaggcacgccagcagatcacccgcacctgaaatgtttaagtactttggagccccttgaataatgtcaaaatcaatatagatcgcttctggaaaaatacgtcccatgtatgtaacgacattcttcactctcatggcagatttataacagaatgccgcattgacagacagaactgtcggaacactatgaattttcttacccaaatgttccgccatccactttccggcatcgatggccattccccctcccattgcaacaacagtatctactccatcatattccttgatatcctgttccagggtggaaacttcaacgtcctttacaatgtaaacttgatggttattttttaattgttctttatatttctcatagacaaatccgtcggctacgacaagataattgtttaaatcagctgtcaattcaggtaaaagatttcttccatagaccaggtggaactgatctcccacatgtggaaatatcattttcgccgtcctccttttttagaagtattgattgtagtggctttctatgttagacttatttgagatatcatatggaattgatattcaattccgtatctttcaaatgttgattctgtcagaagcctgtgcgagaggcttctgacaagatctctatgacttaggcttgatagccggcagctttggcaagttctgcatcgatgacgattgtgacgtctctgtgcatcttgagcatggttgccggtattttgcatgtaatctcatcatctgtaagaagagctttgatcactggaaccttattttctcctgtggcaatcaatacaatcttttcagccttcatgatgtccccaatgcccattgtgatcgcttctttcggcacatcatccggtgaatcaaaaaaacgggagtttgcagcgatggtgctatcatccaatttttcaatatgtactcctgatgtaagcttttcgccgggttcattaaatccgatatgcccgctcacaccaactcctaacagttgtaaatctatcatcttatctgcgtacaatttttcgttaaacagcgcaatctcatcttctgctttggttaatccagacggtacatacgtttttgttttatctatccctgccggatcaaagaaacggtcagccatatactggcggtagctctgcgggctttccgggtccattccgatgtattcatccaggttgacggaagtaatctgggaaaaatcaactgttccttccttatatgcttttaccaggtatggataaacctgttctgccgttcctccagtcgcaagacccagctttgaatctgattttttctgaacctgcgtaataatctcatttgctacagcctggcaggattcctcataattttttgtcacgatcactctcataatgatgctctccttttctttaaagattaataattgacttgtggatatgtccacgattagattatactgcacacgtccagatatggcaatagctttttgttaaatttaattatattttttctgttttccttttaatattcatcatatatgcctaaaatactgtataatcaagccattttagaataataattgaccaagaaaacaaatgatgttatactactcccgagaattcatctggtcatgtccaattcaaatcctaaccttttacctggacttgtccatagttgattctctcacactacactgccaataaaaatgaaattcactatatccttttaggaacatctataaaacataggaggttttaaaatgaaccgaaagtttatgtccatcaaacattgcctgctaaaaaagatcagcaaaatgtcaccgaacgataagcttccctctgagcgggatttaatcgaagaatttggagtttcacgtccaacgatccaaaaagccctatctgacctggagattgagggcattatttacaagattccgcgtcagggatcctttgtatcagatctgcgtctgcgcaaatctctgaacaagctgaagagttttgcagaagatctccgttcaaccggggataccccctctacccgcctgatctcctttgaactgacggaggcctcagctgcagtagcgaaacagctggatctggcagaaggggatcccgtgtattatctcattcgtctgcgttttaagaatggagacccaattatttatgacgactcttattttgcgccgttttcgatcagtgggatcacttgtgacgtgttgatcgattctatttatcagtttatcgaatcacacggcatgaaagtctccatggcagaagaaaccatcagcgctgtgctgccgccacaagatatcgcagaagcattagaacttcaaaaagatgaacctgtcattaagattgagatggttgcttatttatcggacgggcgtccatttgaatataccatctctcataaaaacccaaggaagtatctgctggaactgcagtcttttcgttaaaaaggacaggaagaaaccctatcatgagtttcttcctgtccttttttacaccagtatcttattacgctgcctctttctggccctgttcttccaaacccttttccagatactcagctgccatgtattttgctttttcgaactgggttcgctttttcttatactgtaaattttcgatgatttcacggtaattcttttcacccaaatccagatcttctttaaatcctgaaaatacaaagttcccgcttgtcttataaccgcacaagatatttccttccttatccgtgaccagcacataggcacggttccccttccagtggcgcgccagacctacactggacacaggccccaacttacggatctccaacagctgcttattcaacctgcggatctggggcagtgccatcagtttgctcacgacgaccatgactaaaaaaaataggacaacaccaaacaagttaccattcataaagacttcctccttttgcattcccagagaatctgaacacacacatatcttatggacatatccattcgattatcaaataaagtttagtatatatcaagtttatag

SEQ ID NO: 9 - DNA, 120053 bp, Anaerostipes rhamnosivorans
atatataatacagaacaaaatacacagagactgccacagcgattaaaataggattctggctccaaaatacataaaacaagcctgcaatcagtggatgacacatgatcccgaaactggtaataaaaactccggtctggtcaagctggaatccagcttttaacgcaacctctgtaaatgtaggtgcaagctgtgaacagatcaccattcccaggctgaaccatatggctcccataacaatggtcttggctatatttccattggacacgcagcagaacacttcgatcatatatggcagggcaaccagatccgccattggaagcacttgatttcccggcaggacaaaagccagacctaacatgatcggtatcaggattacacctgcaaccagagtattgggttctccatagccgactgcatcattgacagacagataccattcacgcccctcccctttctgtaccgccttttgtttgtatgcgtctgtgagactggtgaatgcattggcaaagatacccgccaccttcggaaaaactgccatgatcgctgccgtggacactgccgccgatgaaatcgttccccacgcctgtaatgtgcccagagcattaaagtttcctatgaccgcgatcaccgctccgacgatcagcccgataaacatgggctcaccgaacagtcccagttttttttgcagactttgggcattgattttgatcttgtcaaatcctagttttccgagaagcagattcatgcccaccgcaaacggaaaggattccaaatggtggggtgccgtcatacagcagttaggatattgatagtaggtagaccaccgctttgcgcatgcctcagagaacaacagtatataaagcagctgggccaccatgagtcccaaggacagccagagattctttgtcagtatgtataacatggatccccataccataaaggaataattattccacaggtcggaagccataaagacgtccgtccattttgtcacaaagagaacgatctgtattaaaattgcgatcccgataaaaatcagccctatatttgtggagtatgcaatgaccgatgtggactgccatcccatatccagcaccggcagattcacaccggcattcttgaccatctggttcaccaccggtgagatcacaccgctgtagctgttgatgaccagattaaatcctgtcagtccgacggcacataacagcgcggatttgaatgctttgttaaaaggcagtcccataatcttggcgatgataaaaagcatgaccggaacaaaaaccgcagcgcccagagttgaaaatacattacttaatgtttgaaaaaaagctgccatattgatatcctttcttttctaaaaatttcgttatttgttgtccaagatcttcagacattcctctattacctgattttccgacatccccgtgagcatgccgaccgcattgactttcggtatgccaaagtcttgatacaccgggcttacgcacgcgatcagatcataggtgtcaccggagagcgctgtctcaacaccgttgggactcgtctccaccgcatgcacttcccatcctctttcgttcagctgctccgtgatcttccccgccaccatggcagaactcactgttcccgatccgcacacgcataaaattttacattttttcatctatgatactcctttcttttatcaatcctcattcaccgatatattttgctgccacctgataaagttgctccgcatcctgggcatctttgaatttcttcgcaatctccgcgttttgaaatactttcagcactttttgcaatgtttccatatgttcatccgggtttaagatcgccatcataaacagcagctccgcctctacctgtttttcaggctctcccatatggcagaatgttaccggccgtgaaagctttacgacacatacccccgatctggacacatgcggcggatctgtgtgaggcattgccaccccgatgccgtccagctgcagtcctgtggggaatctttcttccctcgccaccactgcgtcaacataactgtctttgacaaaaccattttcataaaataatgccccggcttttctgattgcctcctctgaatcccgcgcttccatattcaccgcggtcagctccctgaatactgtctgcattctttttcctttcttccatgtcctggtgtataattttatctttccaaatctttattccttatgttatatttaacttaacaacgaaacctgatgtatggtttcatttcagaaaggaattataaatggaaaatcacaacgatttgctcgtccatatatctcagctctattatcaacaaaacttaagccagaatgaaattgccaagatcatcggtatttcccgccccacagtgtcaagacttctcgacgaagcgcgccagaccggcgttgtggaaatcattgtccatgaccccatacgcaaaaatcccgatctctccattgaggtccgcaaaaaatttgatctgcgggaggcagtgatcatctccgggaatttcaagcatgatatcgccatggaacgctgtgcgcaggttgccgcccaatttctgtccggcatactggagaacaatatgtccataggattttcatggggacgtgccatcaccgctgtatgcaatgccatcaaaccaaaagaatattacaatgtgaccgtggcacagatggcaggatgcctggcaaccggcaatccacacctagacggtatggaacttgccatggatgtggcaagaaagttcaacggcacatatacaaatgtggtctctcctgtattcgtagaccatctgctggtccagaatgctcttctggccacaccgcagattaaaaaggctcttgatatcgcttccaatcttgacattgccctcactggagtgggtacattcaatgacaaaaacagcacattgctgctctccgactgctccacggaggaagaacgggcagaagctatccaaaacggcgccgtaggccacatcctcgcacgcttcatcgacaaagacggaaaagaagtcttctttccgaaccattatccaatcacagtacctctggatgcactgaaagtcccaaaatggtccatcgggatagtggtcacctcacaaaaagcagaagccacccttgcagccatacgaggcggttatatcaacagcttgattgccgatgaacctctggctctggaattattgaaattagccgagacattagaatgatgctattctaatgtcttatctatatatatcacccctttcgccccttctccccggaccgctttttcaaatccttctttccaattctttagggataccatagcagtcaccatatattccggaacaattttgccctctgcaagcatctggatcgatgttctccaagaactcggtttttggcttctggatcccacatagacaatctctttgttcaggatcagatcagcccgtatcgcttcctttgcattgggaaagacccccatctgaactacagttccttttctcttcacaagctccagcgccttgtttaaggccggcaccgccccggaacattcaaaacattgatccgccccatctcctttggtcattttcatgacgatgtcattcaaatcttctttcgtctggtcaaccgtgcggtcaatcccggacttagcggcaatttcaaacctttccctgtcgttgggcagccctgccatgatgacagatgcgccgcatcccttcgcaacctgtgataccatctggccgattgctccggcaccgaataccacacatacatccccctttcctacattccctttttctatcactgcatgaactccgcaggccagtggttcagtcagagaagcggataataaactcacatgatccggcagaacatgcacactttcttccctgctcagcaaaaattctgccatagatccatttacctgggttcccagcccctgccgttctctgcacaaattataatctttgcttttacacatagcacaggtaccgcaggttttatatgtagtttcactggttaccctgtcaccgattttgacttttgttacatccggtcccactgccgtgacgatccccgagaactcatgaccgaggatcacaggtgtccttgtactgggatactcccctttgtaagcgtgcagatcggtgccgcatataccggagtaagccaccttgatcttcaccaggtcattaactgccgccggctcatcaatctcttgatactccattttgtcaaaaccgtctgcggtttttacgactgctttcattgttgtgttttacctccttttattttacatttgttcacttttaagaatttttgtaatatgataatagcattgttttcccatgaatacaatcttttttcttttatttttttctgataattgttattttgtataattatctcaataattctcagacctatttgtgcatattttagaaaaaaccagattgacatatgtttataccagtgagatactggttatatcatttgttcatctttaagaaataatgtatcatatcatttgttgaaatcgaaaggagcttctaatgagtcaaaaagctacagtggatgaaatacagaaaactgcggacagtatccgcagacagattttaaaaaccgccctggataaaggcggctgttatctggcacaggcttgttcctccgcggaactggtggccagcctctatatggaaatcatgaacctgggaccatctgccggcgaatgggaacccattccctttccgggcgtacctggtcccggcaatatgaattatcagcggggagctgcctatcacggggtacctgctcctgacaaagaccgattttttgtatcctgctgccattatgcatccgttatctactgcgcactggctgcaaccggacggatttctcccgactgtatggaaaagtttaatgtggacgggtggaatatggaaatgatcggagccgagcattccccagggtttgaaaacactgcaggatccctgggacagacggtgtccatcgcagccggcaccgcacacgccagaaaaatgaaaggtgaaaccggcaaagtattctgcctgctcggagacggagaactgcaggaaggacagctctgggaatgtatccagtctgcctcctattttaaattagataattttattgtcctggtggatgccaacggccagcaggtagaaggtgccacagaccatcagacaaatgttgaacctatgactgaccggtttgaagcttttggagccgtctgcgtctcctgtgacggccatgatatccaggctgtcattgatgcggcgtcaaagaccccgcacaaagataaaccacttgttgtcatcgccagaaccaacggaacaactggtatcccgccgcttcaaaaaagatggccgtttttacattttgtacggatcaaggaagatgagcgggatgaattcataaaaatatatgaggaattatagaaaggagtgccaatatgaaaattgaagtcaatacacacgaaaagtctatgctggcgttcgccgaaaagcatccggaaacacttgtgttatcggcagatcttggaacatcatgtgaagtcaaaaagttcagggcgcaaaagccggaatcttatttaacgatgggaatcgcggaacaaaatatgtgttcctgggctgcagggcttgccagagagggataccgcccgtttttacatacctttgcggtatttttgtaccgccgcattctggaccagctggagatgagcgtggcctatccaaatctcccagttgtttttgtaggattcgttcccggcatcacaactccaggcggggtaacccatcaatccatcaatgatgtagctaccctgcggtctgttcccaatatggctatttttgatatcggggatgccacagaaattgaaggggtcctggatcttgcatatgaatggaacggccccgtctatatccgtatgctccgcaaggaggtccccagattgttccctgccaacgaaccgatgcagtttaatcatgcccgggtgctgtccgagggagatgacgtagtgattttttcttcctccatctgtacggaggaagccatgagagccactgccgccctgaaagaaaaaggaatttctgtccagcacatgcacatatcaacgttaaaacccttcacagatcccagcgtaacggccgcgatcaaaaaagcgaagtacggggttgtaaccattgagaaccatttgaccactggcggtctgggaaccgctgttgccgatgtcatcgcggagaatggtcttggcaagaggctgataaagatcggcctaaagagctatccccacggagcctctaagatgtatctgatgaaaaaatacggaattgatgccatgaacctggtctatgccgttgaagatctgacaggaaaaaagctgaatctaaacgaatccgatttggaggacgtccggtttgtggatttcctggaagtttaatttgcaaaggagcacctaatgtttttagaagagaaaaagagaatcatcgaagcaggaattaaattagaccggtacggtctcatctcgttggcaggaggaaacatcagtaccaaaacagatacaggtgaaatcctcatgacaccttccggcatgatttatgaagatatggaacctgatgatgtgctggtcatggatcttgaggggcacatcatagaagggaccaacaaaccatcttccgatatggacggaattttatatattttcagccgccggcctgacatttatgcggcaatccatacccatcagccatatgcaacggctatttctttgatccagaatgaattccgggcggatcttacgacactggggaatgcgtgcggcggtaatgtgaaagtgactccttacagttctcccggctccacagaaatgggaatggatacggtagagtatctgggagaaagtctcgctgttattttagcccatcacggtgtgatgaccgtgggaaaaagcttaaaacaggcattgaccgcagccgtctatcttgaagagaccgcaaaggcatatctcgcggcaaaagcatgcggaccaacaaaggaattaagcgatgcccagatcaggcagacggtagaaatctataagtatgtaggacaggggacgtctcaaatgccagagggcttaacggaccggatcagttgatccaatatccagccaaaaagccgggaaaacgtaattctttttagaatttacggtttcccggctttcattcgatctattatacccataggacacaccgtgttttataccattcggctcttaggtagtgtctgctggataaggatgacagcggaacagaaggcaccactacgatagtttttctctattatcggaaggaggcctttccagagccgactggagataatggagaaaaactcattatctgctgaactcaaccagcaaaagttccactccgatccggtctcctatctttccagtcttaatcccctcgtcagtggccgcgcatttctttatcatcgtatacagttcttccttttgaaacagacggacctgctgttttagctttcctgccacaaaaggcggtacttttaattcctttgccatctcactctgggattttccggccgcggcaagagactgggtctgtaacaactggttacactgtcttactaaaagggcaagaataccgaacggtgattcttttaattcaatcaaatcatagtagagctttaatacagtgtccctctgcttcttcgcaatagcctccagcatgacaaagatctgattggtcgtctgggaggtggtaagggcttccagatccgcagcagttatgacttcccggccccgggtatagtcgatcagctttacgatctcattttttatggtaaacatatcatgccccgtcttataaagaaaaagctgaagatccttctgggtcattttcctgccttccttagcaagcatctgggcaatccatagaaccagttctttttccttcggcgtctcaaaggctactgcacacccctctttgttgatgtacttatagatcttggatcttttgtctgcctcatcctctatgatcagaagaatggtagactcagggatatccttcagcgcttttaaaaaatcttcattgctctttttcccaagttccgtctgatccagcacgataagacggtggtcattaaaaaacggcatggtctgcataagctccaggatttccggaagatctgcctttttcccctcaaaataagaataattcatcgtatcttccgcgggaatcagagctttttttaatctgtctctcgtctgggcaagcagatacttttcttttccataaaacagataaagattctgataattttgttcttttatatgttccaatactcttttcatggtcacagtctctctcttccgttatattcaatacacaatgccgtaagctccgcgagcatggcctgcccttcatcctctttcctgaaagccagataaagagtcctctcattctgctcgagatctaaataaaagatcaggaggtttcctttttttgcttcctcctccacagctttcagaggcatgacagcgattcccatccccatgctcaccgaccgcttcataatctctttgtcgtggatctttgccgccacatgcagagtctttaagtcgatgccgtgttcttctaaaaagcggtcctcatcttcctccgtgtcatcggtcagttcccttaagataaacggttcccttaggaggccctccagggtatatccattttccagcaggttccgatacctctcacggttgggggcgatcaccacctgctggtcacagccgtacggaatgaaggtaagctccggcacatcttcgtgcctccccagaaatccaagatccgcttcttttgtaaggagcatctccaccgtctttgcactgttcttctgaatcagggcaatatctgtatctccatgcagttttttgaacttctctaaaatgtccggcagaacatactggagggcaacagaatcccctgccagcacaagggatgtcttctcatccccggaacgaataaactctttatatgcttcattccttaaatccagcatctttttggcatatccgtatagcttttctccctcttctgtaacctccacatgctttgttgtccggtcaaacagcctgcaggatagttcctgctccaaagacaccacatgggcactgaccgtaggctgggacagaaacatctcttttgcggccttagaaaagctgtgatgctgcactacatttacaaatgcctctagctgtcgaaactccatgtctttacctcactctgccgtaatattccatcagtctcacataatcctggggcgtgtccgtatccagcatacagcccgggtcatcctccacagtcaccagaaccgtggattctaaaaattgcaggagcgcccgcctcagccctccacttccccggaactttaaaagataaggaaaacactcacaggagatcaccggaggatggattctcctcccctctttgacaggaatcacaaccaaaggcgccgctgcctcaaaccaggcaaaaagcgtctcataagttctcccggagatcataggcatatctcctggcacgaccacagcgccgtcaaacgacagggcctgtgccaaacctagctgcactgactgcatcatatcaccgtgctcaaaattctgattatatacaaactctactctttcaagaccggaaagctcctcttcaatctctttgctccggcatccaacaaccactatgaccttacaaaccccggcatccagaagacttactaccgtggccctgataatggtgctgtctccaaatgggagcagcggcttaaaggctcccatcctccgggaaagacctgcacatgggacgatgccggcaaatttcttctttttattcattttcttattatatcaattttagaacgtaaaaaccagaacatcctgctctaaatgaacaggtattatacggatcagacatttataaatcaataaaataattttgtatactcggtctgtgtatccgctatatgataaatatatacagttttatcaatcttgcggtaaatcgccacctgtttttcgcagatgatcatacggtatccccgttcattcagccatttatccggggtcaaagaccccgaatcaggatatgattccagcctttcaatcgtattcaaaatatgatcgctgacttttaacgctgttctaacatcaaattgtagtatataccaatcttcgatacgttttaaatcttcccacgctgttggaagaatcccaactttataatgcatcaatccgatccctcaatctctttctcgcctctgtgacgctgagtgtttctgcgccgcttagacgttccagttccgcctgcaatactttttcccgaagatccagcatctgttctctcttctcaaaggcatcaatattcataaatactccatcaccttcgccgtttcgtgtaatataaataggttcttttgtttcttttgccatatcagaaatagatgaataatcatttctcaatgcagcggatgcttttataatcatttttcacacctccatatctataatttgatataattatatcaaattatagatatggagtaaataaaaacactttttcttcgtattcacaaaaatttatatcatctgtatgaatgtaaataccaccgctttctttccatagaaaaccacagcattccttgtttggatgtttcgtaaatcctgcactcagaagctttcagtcgttctatggtctccctgtgcggatgcccataccggttgtttttcccagcagacaccacagcaattccaggttttaactgtctaagcagtgcttcccccgtcccattcctggatccatggtgccctgcctttaaaacatctgccggttccactccctcctgcaccaaaagctcctccccttccttctccaaatcaccggtcaggagagcggagaattgtcccacttccagccggaacaccagggatgccgcatttttctccagtttgtcatccggttttggatgcaggcattccattgaccagtcctgcccggaaattttactgccccgtgccagatacgctacagggacatgattcttctgcgccagtttctccatctccttataagcctgatcctttgttacatccggcagataaagccgtttgatgatccccatggacagaagctcctgaatacctgaatagtggtccgaatccaagtgggtgaccacagcggcactgacggctttgtagccctgggattttatgtagggagcaatgaggtaccggcccacattctttttggaggagcttcccccgtccaccaggatcatgtcactgcggttcagggataaggcgatgcagtctccctgccccacgtccaaaaaagaaattttatccgctctcttttgtacccctaaaaccagaaaacaggctcctgccaaaagacaggcatacttccaaaaaggctttcccttaagtccctgacagacaaaaaacagctccagataaaatacaatgatccaaagaagtggaggctttcctaaaacaatatttgaaaaaggaagacatccagccaaccgggttgcagaaagagtcacagaaaacagcatagaagcgggcacagaaaataaaaagaacggaaaaaaggaactgagaaaaccagcagtgaatcctgccgttaccagtggcaacataagaaaattaaaaagaaaagagtatagataacactcatactggaaatataaaagaaccggtgccataatcacctgaattacacaacagaagacaagacggcttttctgtttttctaacaatgtcttctttttccctccgccgaatatctccccatagatccccgcagaaatgactgcacccatggacatcaaaaaacctgcgtccgcacatcgaaacggacactccaacagcagaacaatgcccgcaacgcctcccgaggagagcaggtcataggagcgtcccaaagcttgggataaaagaaagatcagaaacatcaaaaatgccctttcagaagatccagacatacccgtcatgacacagtaagaaaacgcgaacagcagtccgaaagtccccgaaaaccaaaaggggaaactggcctttctcagcctgcgcaagatgcctcttccgaccagagaaatatgcagacctgaaattgccagaatatgaacaatgccgctttcggtgaatgcatccttggtatcatctgagattcctgtcttatctcccaggatcatagcctgtgaaacagaaaggatctcatttgtgtattgagaagacaggtttttagacatttgctcccgtaacgaaaacagcacattcttccatatgtttttctcctgccccacgatctcccggtcccttggaaacatggtaaactcgacattcctggaaagataatagactctcatatcgttctcccccagatttgtggggccctcgtggggcttaagctcccctgataaggaaatcttatttccggaaagcaccccgttaaaatcgtcgtcatataccataatatccccatccagataaagcttttgttcaggtagaaagagatgagagaccagcaggtactccttcgtttttgtctttcccttccattcaaccgtgcccactgctttgacctgccctaggccttccagtgccttttcctgtcccctgatcctttggtcctggtaggaaaacacaaagcctcccaaaaaaaagccgatcaaggcagacaaaacagcgcctctcataaaccaggtcctgttcttaaaaaagagcacaaggatccccggaaagagaagcgcggcaaacaccatccagacgtttttacatgctgtgagttctccaagccaacagcctgcaaacaacgcaagaaatggtctatgattcatttaattttactccatcggaagttccccgaacagaaagctgtcacggttcagagcaccaatcagtttcccgtctgtatctatgatcggccggccggaaacagtgaattccacatatccgactcctttcagctgcgtcagcgtatagacgatggcagccttgcagatgacatcttcattcggttctatcttcttatatcctatagaaaaatcaacatatgcgatattgttggaaaccgtcacattgctgatgacaatattgtctggtatggcagttttatatttgctgcttttttcgaccttttccatctggtccaaaagctcttctgccccgagctggctgttcatatcgacatcgatctttttgtcttttttaatcagctttgtatagcttctgtttgtatagtaaatccctgtcccgcctttggtctttgtgctgtcatcttcctctttggaacatcccgcacagagaagcagcacacaggtaaggacaaaaaggatacatatagaaatcgttcgtttttttgtcactgtatccctcctcatgcctgatattttagaggaattctcaccgtaaacgtggtgccttccccttctttgctgtataacttaatctcgccgttgtggacaaggatggcatttttagtaatggcaagtccaagacctgttcctccggtctccctggacctggctttgtcaaccctgtagaaacgctcaaacacctgtccctggcagtcttccggtataccaacgccggaatcggccaccttcacataaaaatacttatggtccgcattcagggataccctcacccatccgttgtcctggttatatttgatggcgttttcgatcaaattggacagcgccaggctgagttttacctcgtcaatctctgccgtcaccggacggaaagattccagaatcagttcgatattccgctggccggcaatcggcttgagccgtttcatgatcatctccagcaattcattaattttcacgctggaaatctccagcttcgctgccttcttgtccaattttacaagggaaagcagatcagatatgataacattctcccggtcgatctctgctacgatgtcattcatgaattcacggtagagttccgccggtacactctctccctgctgtaaaagtgaatccgcaagcaccttcatagaggtcattggtgtcttcagctcatgggacacgttggagacgaactcctgacgcgaattttcaaggacctgtgccttggcaagaatctcgttgacactgttgaccatatttttcacttctgtacatccgaccacgctgatggtctcatcttcatgtccggaagcgataaagtcaagatccttttggatctttctgtaatccttggtcagccaatagctcaacagagctccggcggacattccgcagataatgaacgccaccataagcatattcctttgctgcttcatctcattggagactgcaacaatatcactcttggggatcgtggcaatgacactgcccagcacctttttcttacggctccccttgttcatgatcggtatcatgatctccacgtttttacccgccttggaaacgatccgtttcttgtttccgttcattattttaagcagatcatccgaaatataaaacttgtcctgataatctgtcatggtatcttttacgatcttataattgctctttatgacgataatccgcccatgcaggcctgccgccagctcattggtctgattagaaatagagttggagctgtcatcgataagaaaatccaccccaactacctggccggccagccactggcactggctgacgaccccgtctatcttctgctgttctgctttttcgctgtatgaatcattcaaaagcttgctgaacaagatgaccacaaatactgtgatcaccagcaccgaaataaaaatgaggaactgcatgctcttcaggtaggaaaatctgtccttcttatgcctggaaataataacctaccccccattttgtatgtacatagtcaggaacccctggattcacttcgatcttttcacgcagcctccggatgtggacatccacagtccttgcatctcccggatagtcgtagccccacactgtgttcagcaggtcttctctgctgtacactttgttcggatggaacaccaaaagttccaacaggtcaaactccttagctgtcagattgacctcttttccattgatgtggaccctgcggctgtcacagtcgatctttaagccgcggctctcgatgactctgggagtctccgccggaaccgcatggcttatgcttcttcttaaaatcgctttgatccttgctttgacttccaagatgttaaacggcttggttacatagtcatcagcaccgtactccagtcccaggatcttatccatgtcatcaccctttgctgtcagcatgatgatcggtacggttgaaaattccctgatcgcctggcacacttcatatccggtgagcttcgggagcataacatccaggagaatgatatcgtattggtttccctttgccagttccagagcttcctctccgtcataggcgcagtccacctccatctcatcctgctcaaggctgaacttgatcccttttactatcaatttttcgtcatcaacaaccagtacctttttcatattttcacctcaaactaaactgttatcatgtccttgatcttactgtagatcccctgtttgattccacggatcttcataatatcctctggttttgcaaagcttccgttctcttccctataggaaatgatatcagaagccttagcttctccgatgcccgaaagcttcatcagctcttccttggatgcagtgtttaaattcactctgtcatctgatgaagagcccttctctgaggaacccttctgctgcttttgggcttcctttcgtgagggaacataaatctgctgcccgtccttcacatgttctgcctgattgacatcttccttagaagcactctttgtaaatcctcccgccgcagctatggctgaaacgattcttgcatcttctacgagttcatagacccccggctttttgacactgccgcagacatagacacagatcttatcctctttttgtgtgtcggcagctttctggacctctgatcccttttccacctgcactccggacttttctgtgcaccctgccgtacaggctgcaaaaaacaaaacggcggccatacatatactttttgctttgaacattaaggatcctccttagctgaacaaagcgtcatctatccaagtgtaaaatctctattgctattgtaactaatctacctcatttttacaaggacatctttcaggataagtttaagatttccatttgaaaataaggatgccccctacaaacaaaacaactcccaaaagcttcatccactgaaaccctgttttttcgacgccaaacagcccaaaaacctcaatcagataggaaacgatcagctgcgcagccacaatgagcatggcagattttgccggccccagcatgccgatgcttttgatgaccgtaaaggtgatcccggctcccatgataccaccgagaagcacatatttcggtgataccttcgcaaggcttaaaaagcttgtacctctctccgcaaagagccagactgcgagacaggtgagaagacctgtaaattgtacaaaggaactggcggtccacaacccggtctgtttggaaacttccgtgttaaataccccctgaatgctcatgagggctcctgatactaacgctattataaatccaatcataaaaaaacctccaaagatttgttatccatagtttgtccttggaggtttttgtttattcatttaaaacgatgctctgagcctttccgccatcagatccacatgttcattttcgatcacaagcggcgggacaaaccttaaaacattatttcctgccgagataaggatcaggccgtttgacagggctttcgttacgatttctccgaccggcttctccggcgaaaactccagtccctgcatcaatcctttaccgcgatgggcagtgataaaatcaaattcttcttttaagccctcaagcttttcccataagtaactgccgatctcctgtacatgggataccaaatcaaggctttcaaactgttcaaagacagcgttgactgccgcgcctgccagaggatttcctccgtaggtggttccatggtctcccggcacaagaatgccgtccgccttttctcctaccacaaatgcgcccaccggaaccccgcatcccagcgcttttgcaagagtcagcacgtcaggtttcacaccgtagagatcatgtgcaaacatagaaccacagcggcccataccacactgaatttcatcaaagatcaacagaagatctttttcatcacaaagcttccgaagaccctttaaaaactcgggatcagccggataaataccgccctcgccctggaccacctcgcagatgatgccgcaggttctgtccgttatttttgatgccacatcttccagattgttaaattccgcaaacactgcccggaattctttcggcacaaacccttcctggtacttttcatttcctgtcacggacagtgccccctggcttcttccatgaaaagactgattcatagcgataaattcatactccttattgggatcctttcgataaccgtattttctggcaaccttcaaggcgccttcaatcgcttcggtaccactgttggtgaaaaatacttttttcatcttggaggcttctacgatcttttttgccgcttctatggacggaacattataataaagattggaagtatggatcagtttgtcgatctgagttttgagcgcatcgttgtatggtttgtttccatagcccagggcaaagaccgcgatccctgcaccgaaatccagatattcttttccatcagtatcataaaggcagactccttccccgtgatccaggaccaccggaaaacggttgtaggtttttaatatgtatgcttcgccttcttctataaaatgattcataatttcctcctaaaaaatcggatctttcaggatcgctgttccgatacctttttgtgtcaggaactcaagcagcagacagtggtccaggcgtccgtccaggatatggactctggcaacaccgttctcgatggcctcaatacagtttttaagcttcggaagcataccgccgcccacaacccctttgtccacaaactcgtgtgcctgggtcagatccatctcagagatcagggtactcttatcctccggatcaataaagactccttcaatatcagtcaagaaaacaagcttttctgcgttcagcgcagacgcgatcgcacaggctgtgtcatcagcattgatattgtaaccagcatactcttctcccagtccgattggggagatgaccgggacaaaatcgtcttcgatcagagcttccagaaggtccgtgttgacctcttttactttacccacatatcccagatctttccccgggacctccttcttttctaccttcatcatttccgcatctttaccggaaagtccaacagccttgatcccctgctgcgccatcatagcaaccagctcctgattcactttaaacagaaccatctcagcgatttccatagtctccttatctgtgacacgcagaccgttataaaactccggttctttgccggaaagcttcacccatttgctgatctcttttcctccgccgtgtacgataatcggtttcataccgatcagtttcaaaagcgccacgtcacggattacatttttctgcaggtctgaatccagcatggcactcccgccgtatttgaccaccacgtattttccgctgaaataacggatgtacggcaaagcctctattaatatctctgccttcagtgattcttcctctaataatttttcgtccatgattcctctccttaacttctgtaatctgcgttgattgatacatattcatgggtcaggtcacatccccatgcagttgcctgttcttctccgttatgaatatcgataatggctttcacctcatcttccgataagatcaaggtcgccttttcctctgaataatctgttgcaactccatcctttacgatggcaagacttccgcttttgctctctaatgaaatatcaacttttaaagggtcaaaggaagcgccggaataacccatagcgcataggattcttccccagtttgcgtcctttccatagatggccgcctttgtaagacttgaagtgaccacggatttgctcagtgtcttggcacagtctttgttgggcgcatggtgcacctggacttcaaacagcttggtgcagccttccccgtccccggctattttctttgccagctcccggtttacatagaaaagcgcttctttgaatgtctcatagtcttcattctgttctgtaattttaggattcccagccataccgtttgccagaacaaataccgtatcgttggtagaagtatctccatccacagaaatcatattaaaagtatcctcaatcagctctctttgaagctttaagagcagatccttgtcgatggaaacatcggttgtgataaacccaagcatagtccccatattgggatgaatcatcccggaacccttgcagatgccgcccacggtcacttctgttccagaaattataatgttgacagcggcctctttggtctttgtatctgtggtcagaatcgccgccgctgcgtctttactgctctggcggtcatgttttagttcaggtaccagaagctttactcctgtctctatcacatccattggcagctgctgcccaatgacaccggtagatccaactagaacctcttcttttgtaattccaagctcctctgctgccaattccgcggtttttaccgtattctcatagcccttttctccggtacatgcattggcgatccctgtgtttacgaccactgcccggactgttttctgctcgtttaccagtttctgtccccaaagtaccggggccgcctttacgatatttcttgtgaaggtcccggctgccgccgccggtgtctcacttaagatcattgccatgtctttgttggtctttccaggtttcattccggcccgaagtcctgctgccagaaagccttttggggctgtcacgcctccgtctaatatcttcatcatttcctcctttatgtgatcctacggaaacatcgggacaagttctagtccctctgtctcaggcagtccgaacatcaggttcatattctgtaccgcctggcctgctgccccttttaccagattgtccatggcccccatcataatgatacgccctgtcctctggtcgatcttaaaattaagatccacatagttgctcccttccacccatctggtctccgggcatacattttccggaagcactctcacaaacttttctttcttataataagaatcatagatgctcttcaccttctcataggtaacgtcctctttcagagaagcataggcgctcaccaggattcctcggttcataggaaccagatgcggcgtaaaattaagcaccacctgctgttcggatgcatacccaagctggtcttcgatctccggcgtatgcctgtgggatgccaccccgtaagctttgatattttcattgacttcacagtacagattattcaccttggctcctctgcctgcccctgaagttcctgatttggcatcaatgataatggtgtccatgtcgatcagaccttcctttgccatcggataaatggagaggatggaacaggtcggataacatcccgggttggcgatcaatcttgctttctttacatcctctctatttatctcgcagagaccgtagacagcctctttgataaaatctctgctcgggtgtttgatcccataccactcttcatatcggtctgcatccttgatcctgaagtctgcgcttaaatctatgatctttgtctttgagaggacctcctctgacacaagagagctacacagtccctgaggagttgctgtgaaaatcacatccgctttctcggccaattcctccatgttgtcatccatacagtccgcatccacgatctcaaacatattatggaagacatcgtaatacttctgatctatgtagcttctggaaccataccagacaatctctgcgtccttatgctgcatcagcagacggaccagttcctgccctgcatagcccgtagatcctataattcctgcttttatcataatattctcctcttttcctgcatttacgaattgtttataattatacaactctgttatgtaatatgcaacaccttttttactgataaacctgagtttttaattcttttgtcggaaacttatcattgcatatttatacatttatacttgaatatattcatttattttgaaattttatgcactttattttgaaaaagcccttgcatcttcttccgttatcccgtatattattgaatagaacacagacgaagatctgatggtacgaactatatgaggaggaacaaacatgaaagaaaaagttgtattggcatactccggcggactggacaccaccgcgattatcccttggttaaaagaaaattatgattatgaagtcatctgctgctgtgtggatgtgggacagggaaatgaattagacggcctggaagaacgcgcgaaactctccggagccacaaaattatatattgaagatgtcgttgacgagttcgtggatgactatgtgatcccgacggtaaaagccgacgcagtttatgagaacaaatatttgctcggtacctcttttgcccgcccggttatcgcaaaaaaactggttgaaatcgctagaaaagaaggcgcagtcgctatctgccacggtgccacaggtaaaggtaatgatcagatccgttttgagttatccatcatggcactggctccggatattaagatcatcgctccatggcgtgagctggatacatggaaaatggattcccgcgaagatgagatccagtactgcaaagatcacggcattgaccttccgttttccgctgaaaacagctacagccgtgaccgtaacttatggcacatcagccatgaaggattggaattagaagatccggctgtggagcctgattacaatcacttattagttttaggaaactcaccagagcaggctccggaagagggagaatacgtgaccatcgcctttgaatccggtgcaccggttgcagtaaacggcgagaagatgaaggcatctgacattatccgcaagttaaatgaactgggcggcaaacatggcatcggcatcatcgacattgtggaaaaccgtgtggttggaatgaaatcccgcggtgtctatgagactccgggaggaaccattttaatggaggctcaccagcagttggaagaattagtcttagaccgtgacaccatggcattcaagaagatcgttgcaggcaaattcgctgatctcgtctatgaaggcaaatggttctgcccattaagagaaggattacagtcattcatcgagaccgtcgataaggacgtaaccggagaagtaaagtttaagctttacaagggcaatatcatcaaggcaggtaccacctctcctcatacactttacagtgaatctctggcaagcttcacaacaggagatttatatgaccatcatgacgctgaaggatttatccgtctgttcggcctatctatgaaggtaagagctttaaaagaccagggactcgcagactaatctgcacatctgattaaactacataaaaaagaagacgcgtcttgaatcattttaaaactgatttaagatgcgtcttcttttttacatttatcacttgtctgtcacattcccgttgccgttcaccgggattgcttttcccagatattttggtttcggctttagaagcgtatatccgaagtccttgacccttgctatggcttctctgaactttctggctttgtcccctttgtagacagccttgtcacaggcaacaccctttacctgaagccccagagcctttgcgtcatacaccgcacgatacagatgatacttctgcgtgaccacgatgacgtttcgtgcctgaaatacctctctcgcacggtacatagtctcataggtagaaaatcctgcatggtctttaaaaatgcatttggacggcactccctgcttcactgcgtacgctttcatggcgctgacttcatcatacccctgggtcccgtgatccccgctcatgatgatccggtctgtaagcccctgcttgtaagctgcaatccccatgtccacacgttccttcagcatcagactcatactgccgtcttttcggacctttgctcccagtacaataaccgcatccgctttcttctctttccctcttgaaatatattcccatgcttctatgcttttatcagcccggttcaatacaaacaggttgattcctcccacagccaacagacctgcggctaaaaaaaccacaaacaatttcagccaaaacctcatctgttttctctttcgactcatcccaaccccctaactttatttccaatacttcgctgacatccattccttttttagatgaaaaagaatccctcgtcgaaagacatcctctgtcttgtagcaacatgctctagcagacattacgtccattttctacatgattggagtgaggcattctaagagccgaacggaaatcatgtggaaaatgtcatagttttaactttgcgaatgcatcagcaaatgcgttattgatcggctgttctgcttcggcctgctgctttttcaaatagcggttcacttcttttttgctgacacccgcaccgtcttttttcttgcgctccttaaaagcactgagcttctccttgtggccgcagacacagacaaacttctgtgcctccccttcgcctaccatctccattttcttgtgacagaccggacagcgggcattggtagtccttgaaagtgttttcctgcatccgcactcccggtcctggcagactaagaaggtcccgtgctttcctttcaccttcagcataaacttcccgcattccgggcacttatggcgggtaagattttcatggcaaaacgtcccctgggcatgtttgatctcttcgatgatctgccttgtatatccactgatctctcccatgaacttcctgtcatcttccctaccctcggcgatggctgtgagcctttgctcccactgcgccgtcagctccgctttcctaaggtcctccggcaccagctctaacagctgcttagcctttccagtgatcaccacatcattgccattcttttcaagaagaaagctggaaaacagcttctctataatatcggcacgggtggctaccgttccaagcccctgtttttccatcctggagatcagagttccttctgtatatctggctggaggattggtggtcccctccgtgatcttcatagagtccaccgtgacctgtgttccttccctgagcatgttaagcttatcctgaggcagagcttcccctgtgctttcctcttcctgatatagttccttccatccggccttgaccataacggtgcctttagcctcaaatatttccccgtgaatagtcccagaaatagaagtctgctcgtactcacatgccggtgataacacggcaaggaaacgtttcacaaccagatcatagattttgcgctcgtcaaaactcatatccgtcagaaataccgactgctccgttggaatgatggcatgatgatccgtcactttgctgtcgttaataaaagaagccgaacgattgaccttttttgacaaaagttttgctgtccactttttatatggacctacgctgattgcattcagccgctcttttatcgtatctgccatatcgctgctcaggtaacgagagtcggtcctaggataagtaaggaccttgtggtgttcatacaaactctgcatcagattcagggtctgtttggctgaaaatccaaacctcttgttggcatctgtctgaaggtcagtaaggttgtaaagcgatggagcatgggttttcttcggtttcttagaaatctttccaatcagaagagtttctccccctgccgttttctttattctgtctattttctctctgtcaaagctctggctgctgcctgacattctgtccttccatgtaaatgtcattcccagtacaaacgccttgatcccgtaaaacttcttcggcttaaaggtacggatctcctcttcccgttttgcgatcatggcgagagtcggtgtctggactctcccgcaagacagctgtgcgttatatttacaggtcagcgctctggtggcgttgatccccacaagccagtccgcctctgcccttgccactgccgcatggtaaaggttctcatactcttttccaggcctcaaatgtgcaaaaccttcccgtatggctttatccgtcacagaggaaatccaaagtctctgtacaggcttttgatttcctgcctttttaaggatccagcgggcaaccaactctccttcccgtcctgcatctgtggcgatgataatatccgacacgtcatttctgaagatcagttttttaacagattggtactgctttgatgtcttaccgatcaccacgagcttccactgtttaggcatcataggaagcgtttccatgctccactgcttgtattggttcccgtactgctccggatctgccaaggtcaccaaatgccccagcgcccatgtcacaatatatttctcaccctccataaaagaagaacctttttgcttacaccccaaaaccctcgcaatatctcttgccaccgaaggtttttctgcgatcactaaatgttttttcaatttcttatcctcatttcctatttctaccgccggctgcggaccgccctgtcaagcagcacacggatctttcccagataccgtctggtctgcttcttttcctcgtccgtcagccggttgtctttcatatctgcttctatattcctgcgtcccatttcaaaatagtcctctgctgtttttccgtcctgattcactgccgatggatcggcccctgcatacaaaagactgcggatgttatccaccgtattctggtttacgctgccgttggccatataacaggcaaacatcagcggagttgtcccgtctttatcccggtaatcagcgcttgccccggcgttaagaagctggcgcagcaatttcgtatccccaaaggagacagcctcatagagcggcgttctcctccggaacacaatgtcactgtctgtctgataatccgcattcacgaaagctccctgcttaatcaggaaagccaccatgctgtacatgcggtccctgtcaagggcatcgattgccatgatcaacggcgcattggatgcagtctggctggaagcgttgagatctagtccctggcttaccattcgtttgatttcctttttgttattataaaagatatgatattgaaccgttccttctttgtatacagacttcttcgccgcctttttcccggctgagtgccagacacccagcaaaaaacatcctaccagcaggatgaacaataaaacagctgccatttttttatgtacggttggtatttttttcataagaatcacctcacagttcccattatataaaaccctctctggctaattcttatgaaaatacttatatttttattattgtttcttataaaaatctaaaacccaaccggacccggacaccccaatgtattctattataacatgaaggaaaggatttataaaaacttataatgtggtttttcttcatgaaacagcttataccgcagaaagtcatctatgacaatggctgcgctggacgcaaaaaaccagagtaccgagtacaaaaggcagatctgccctttaaaattatatggcagattggaataatcccatatgtcccacccgagccatacattgacaatcaggcctgtgaccagttcaagtcctgtgatgataaacgttgagagcaccatctgactcacgaaactcatcttgaatttcacactctcatttaagagcccgatacacaaaaaacaggcgcctccgcacaggaacattgtataatgggagtaccctctgactaaaacttctaaaaagaaatatcccattccgcccaaaataaataaaactatatgcttttctatttttaatcttcgttccattctcatcacccgttttttaaatattgtgtgtcatgccgggtctgcttatacgcggtttttccaataaaaatatagtaaatattgcatttatagtgtaaaatattatggttagaatttatcaaaagacaaactaataagaaatgaggaaatacatatggcacaattatggggtggcaggttcaccaaagaaacagatcagctggtttacaattttaatgcttccatcggttttgatcagaaattttaccgtcaggacatccaggggagcatggcgcatgtgaccatgctggccagtgtaggtgttttaacggaagatgaaaaagaccagatcattgctggattaaagggcattctttcagacatagagtctggagccgttgagatcacaagcgaatatgaagacattcacagttttgtagaagcaactttgatcgaccgtatcggcgatgccggcaaaaagctccacaccggaagaagccgcaatgaccaggtggccttggatatgaagctctacacaagagatgaaatcaccgccatcaaagatctgataaaggatctgatggaagctctgcaccagatcatgaaagaccatctcgacacctttatgcctggatttacccatctgcagaaggcacagccggtcacacttgctcatcatgtgggcgcctatatggagatgttcaagagagactactcccgcctgactgacatttatgagagaatgaattactgtccgctgggctccggagcgcttgccggcaccacctatcctttagaccggaacatgactgcggatcttctggatttttacggaccgaccttaaacagtatggattctgtgtctgaccgggattatgtcatagagttattatctgctctttccacggttatgatgcacttaagccggttcagtgaagagatcatcgtctggaattccaacgaataccagtttgtctccatcgacgacggcttcagtacaggaagcagtatcatgccgcagaagaaaaacccagacattgcggagctggtccgcggaaaaaccggcagagtctacgctgcactgacctctatccttacgaccatgaaaggaattcctctggcctacaacaaggacatgcaggaggataaggaatataccttcgatgccattgacactgtaaaaggctgcttgagcctgtttacgggcatgatgaagaccatgacgttcaacaaggaccgcatggaagacagtgcgaagaacggtttcaccaatgccaccgatgcggccgactatctggtaaatcacggagtgccgttcagggatgcccatggtatcgttggacagttggtacttctgtgcattgataaaaatatctccctggatgatctttccctggatgaatatcaaaagatcagtcctgcctttgaagaggatatctatgaggctgtcagcatgaagacatgtgtggaaaaacgtaacaccattggagccccgggacaggacgcaatgaaaaaagtgatccagatcaacgaagcatatttaaaggaaatctaaatgaaaagaagatgtttgctgtctgttctgctgctgtccctagtgtttttatggggctgtggcttggaactcaacagccgcatggaattaaacaaagacttttcgggccaccggatcatgacctgtactgtcagctctgcggatctgtccaggtatttttccggctccaaaaaggacctagacaaggtcatccgagacgcctgcccgaaggctctggtttataaacaaacctcggataacgacaataccatttataccttccgcctggactattcctcaaaaaaagattacaaaaagaaggtagagtctctgcttaactttgcacctgagatcaaatacagctactcagattctccatttgccaaggggatacggtattcagaaaacttttccacaaaagatctcatgtcctggctttatactgctctctatgagaagggttatgtagaccaaaagtctgtggatgatctctggaacctgaaaaacaccgagtttacctttgccgggaaaaagtacgacacagacgataagatcaacatagatgagatggattatgtgcccatttcatccattgacatcaaaacaaaagagaccgccggcatgaagcttacacgcaccatctccatcagacttccgaaggagacactggaaaaacacgcttctgcagtgaacagctacttctccggctcttcctataagaaaacgtggaaaaatgagaaagacggaaaaaccctggtcatctcttttaccaaagacaacttctctgatctgtgcgccgtgacacgaaaggttctgcacacctcagataccggaggtacttaccgggtggagactaaaagtggcagtccttttgagttccagctggattttgaggagacactggatttcaagaactttgcggatgaatccggcaaggtccctgtgacctatacctatactgccaacgattccttttccgacagtggagaacagaccgtaattgacgaaaaagtctccaaaaagaaagtaaacttttcatcctctttcgcccagccggtgcggaaatacgaggttgccgaagtttacaagaataaaaatgatatccgcagaaactttaccttccttttctcatccgtgtgcaataaacgggaacttacaaaactaaaggaatcttttatgggtagcaccataaccaatgtttcccttgacaaagaggatgaccaccggctttccttccagcaaaggggaagtgtcaaacaatgcgatgcggatttaaggaagatctggaagggaacttcctccagctatgaatccaagaattcaatcttccgcggacagacttccgattatacaagtaagttcaggctgcatctgaacaataaaaagaccaaggggacttttacctttgcctccatcagcaaggattcttccgcagatgtcactgtcaccgcagactcttaccaagaaatcaaaatggcccagaatgtggcggataaaccggtgtccgcactcctgaacggagatgagactatctcttcaatccataaaaaccagatcaccggggattcttttatcttgcattataaaggaagcacttcagctcattatattttaaatatattaaaattcttactaccattggtgctgttgctatcagccggaatcttcctatacattaaacagaactccgtagtctactggctgaaaaggttgaaagacaagatccaggaactgctgaagagataattctcttgggcaacactttctgttcggcctccattcataaaaaaatcaggacatgtatttccatgatcctgatttttttattctatcggaaagttctacgaaccctctttattttattcattgttttctgttatttcttccggttctttttttgactctttcagctccatgacattgacatccagcttattgtatggaatctcaacaccttctttttcaaaggcatctttgatgtgctccagcaaggaccaccgggtggaaacatacacctcagtggatacccaggccctcagtcccataataacggagctgtctgccaggtcgctgacaaacacctggatattgtcatcctttgtcatatgttccttctttgcaacatccatcatgatctgtttgaccttctggatatcactgtcgtaagcaatcccgatctttaggtcaatcaggcggctgtcctgttttgtgttattgatcaagttgctgttactcagcgtcccgtttggaatgacaatgaccctgttgtccacggtcttaagctttgtatagaaaatatccatggctgccacttcgccctcgcagctggtcccgtctacaacgatatagtctcccacctgaaacggctttaagatcaacagaaggactccccctgcaatgttggagaggcttccctgcagcgccagacctactgcaacaccggcagacccgaacagcgccacaatggatgtccctttgactcccagacgctccacggccataaagatcacgatgcagcgcaatgcgatcttaagaaaggagcagctgaatgtaataacgccaaagtcaacttcccttttctccattcctttccgaaacagcgataccagccatttgctcagtttaaaaccgacgccgataatgatcagggcgactaatatatttaaggcaaaatctaaaatctgatctgtataatgattcaatacaacattccaattcacgtttgatgctatcatcttatgttcttctcctgttttttataagtactttttgtgcataatgcccgcagggcttttttattccatagggaggttcgcagaacattcctatggaataaaatacaagaaacacgcagagcgtgtttctctatgtacactattttacggtaactctgcatgttttcttagtggatgtgcctggaatccatgctgtgatcgttgctgtaccctttttcttctttttcttcacaacgcctttggaagaaacggttgcaatctttttattgcttgttttgtacttcagcttgtcgttggatctcttattataaataacaccctttagagggtaactctttaccttgatcaacgtcagtctgctggcattcagcttgatgcttctggaacccaatgacactgatactttgcactttttagaaaggtttgttcccttgaccgtagctgtcacataacaggttcccgttttaactccggtgatcacccctctggatgaaaccgtggcaatctttttatttgatgatgagaatgtgacggtatcaccacttctcttattaccgattgtagctgtgagcgttgcagttgctctggttttgacattaaggcttgtcctattgatggacaaagttcttggttttgaaacagaggaggacgagctgctgctgccgtttaacacttcttttccgtttttgtcataatagcggaaatacttcatctcactctttgaaacaaccctgtctgatttggcataagttttcttcccaaccactcttttccaattttgttccaataaggtgacattgttccctgaaacattctgtactatggcccagtgtgtacttttggatgcgatatctcccaccttcggtgaggtcacctttttaaatttaccacccttgtcgtattctaacggtgttgcaccggcaaaaagattgtacggtgtaaatccatatctggcctgataatatttctttaccagtgccgcgcatgagtagatcttgtcatcaccgtcccatttgcctgggcggtacacagcatttacgccctgaaaactgtccactacctgtcctgctttttttacctccacgactgtcatagccgcttttattcttccccccacaggaaaaataactgccaggccaagtgccaggccaagaattcctaatctgatcctttttttattcatccgtctctccctttgtccccgtaaaatgtttttacactgaaacaatctcattataatataaattatgaacaaatacaattgtttttgtaacatttgtaacatcttcatatgtgtaaattctggaaggaacaaagaagaccagccattttaaagaataatggctggtcctggtaataacttcattttattttttcgtaataaatccctgcgcctttaaggtctctgcacagagcacggctccgccggctgctccgcggactgtattgtgggacaaacctacaaacttgtagtcatatacggtgtcttctctgagacgtccgatggacactcccatgccgttctcatagtccacatccatgctcacctgcggacgattgtcgtcctccagatactggatcatctgtttcggtgcacttggaagttcaagttcctgaggaagcccgctgaaattcacaagcttttcgataagctgttcctttgtcggtttctttttaaacttcacaaacacagctgctgtatggccgtttaaaaccggcacacggatacactgagttgtaatgactggagattctgccttaacaatctccccgttttcaatgtgtccccagagacggagcggctcctgctcactcttctcttcttctccgccgatgaacggaataatatttcccaccatctccggccagtctttaaatgtctttcctgccccggagatcgcctgataggttgttgccacaacttcgtaaggctcaaactctttccatgccgttaaaactggtgcgtagctctgaatggaacaattcggttttacagccacgaaccctcttgtagttccaagacgctttttctggcttttgatcacatcaaaatgttccgggttgatttccggcacgaccatcggtacatccggtgtccagcgatgagcgctgttattggatactaccggtgtctctgttttggcatagtcttcttcgatctttttgatctcatcttttgacatatccacggcgctgaaaacaaaatctacttcctttgccacttcttccacttcattcacatttttaacgaccatggactttactgcttccggcatcggagtatccattttccagcgtccgcccactgcctcttcataggtcttacctgcggatcttggacttgccgccagcgtgacaacctcaaaccaaggatggttctctaacagggagataaatctctgccccaccattccggtagcaccgagaattccgactcttaatttttcactcatatcaatcacctctataatactctcaaacggatcactccgtcgatctgtttcatttttgaaagaactgcttcagaaggacgttttgctacatcgaaaatggagtaagcataatccccttttgatttgttcagcatattttcaatattgtatccctcttctgccaaagctgaagtcagctgtccgatcatgttcggaagattcttgtgatgtactgtgatcctgcactcagcctcaatatctcccaagtcacagttcggataatttacagagttgacaatgttaccattttccagatagttcatcagctgatctactgccatctctgcacagttttcctctgattcctctgtggacgcgccaagatgaggaattgtgatcactccgtctgctgctgcaatagcaggattcgggaaatctgtcacatagtgcttaatcttctttgctgcaagtccgtccagcactgcctggtcgtctaccaactcacctctcgcaaagtttaagatcgttgccccgtctttcattttctggaccgcttcctgtccgatcattccctttgtgctctccatatacggaacatggatggtcagaaaatcacatttctcgtagatttcatccaaggagctgctgtgatttaccattctggacaaactccatgcggaacgtacagatacatatggatcatatccatagacattcattccaagacggttgcagatgtttgccacaaggacaccgatagctcccagtccgatcacaccgatacttttcccttttaattcgtttccagcgaattcttttttcttcttttcgatcaatttcgtaagatcggcttccttggcattgtctttgacccagtttacaccgccgatgatatccctggatgctaagaggagtcctgctacgaccagttcttttacaccgttggcgttggcacccggtgtgttaaatacggtaattcctttttctgcatactgttccagagggatattgttgactccggcaccggcacgcgcaactgcgatcatagaatccggcacctcaagatcatgcatggatgcactgcggactaagactgcatctgcagcatttaaatcatcgatcacttcaaattcacttgtaaataaatccaaaccacggtttgaaatagggtttaagcatttaactgtatacattctcaacactccttatttgttttcttcttcaaattttttcatgaactctactaatttttctacgccctctgtcggcattgcattgtagatgctcgctctcattccgccgacggtacgatgtccctttaaattctcaaatccggcttcctttgcctccttgacaaacttggcatccatgtcatcatctcctgtgacaaacggcacgttcataagagaccgatcctcttttactacagttcccttaaacatttcgctctggtctaagaaatcgtagagaatcttggcttttgcttcattatgctttttcattgcctcaagtccaccctgttttttcagccactggaatacctttccgcagatataaattccatagcaaggaggtgtgttgtataaagattttgcgtctgcctgagtcttccatttcaacatggtcggtgtttccggcatgacatcatctgtgatcagatcttcacgaatcactgcaactaccactcctgcaggtcctacgttcttctggacaccaaagtagattactccgaaatcttctacattgactggttcagacagaatacaggaagacatatcagccaccaggatctttccttttgtgtccggcacctgctggtacttggttccgtaaatggtgttattataacagatatatacatagtctgcattttctgaaatattcaggtcagaacagtctggaatatatgtataagtcttatcctcagaggaagcgatgatattggctttcccgtaacggctggcttcctgatatgctttctttgcccattgtccggtgatgataaagtctgcttctttgtttttcatcaggttcatcgggatcgcggaaaactgtgaagatgctcctccctgcagaaataacactttgtagttgtccgggatgttcatcagttcccttaaatccgcctcagcagtctcaataatgtcagaaaacatctttgacctgtggctcatctccataacagacatgccgcagcctttatagtccagcatctcctccgctgcttcctttaacacctcttccggcagcactgccggacctgctgaaaagttataaactcttgccattttcataatcctccaaaatttactttatagttttttccaagtcttcttttgtgtatgcctcctgaatcgcggctccaggattcaccatcggccagaccttatcatccaggtccacatggcagtctaaaactaccggccttccggcttcaagtgcttcctcaaacgcaaattcaaactcctccagggttgtcacttttttagccagagcacccattccctcagctaccttcacgaaatccactggatcctcgaaggtcgtataggaataatgctcagagtaaaacagattctgccactggcgcaccattccgagcacactgttgttgatgatgacttcaatgatcggaatattatatctggttgccgttgcaagttcgtttaagttcatccgaaaacatccgtctcctgcaatattaatgacagtcttgtcaggattgcccaccttggctccgatgctggctccaagaccataccccatggtccccaggcctcccgaagtcaggaaagtccttggttttttatatttatagaactgagctgcccacatctgatgctgtccaacctcggtcacgatgatggcatccccctttgttctctcatagatggcttccacgatctgcggaccggaaagctttgatttgtcataggtgagaggataattgactttatccaccatgacatttttaacccatgtattatgattctgctggcccagtctccggttgaccatggtaagcaccgctttgatgtcaccgatgatgtgggtgtgtgccatgatatttttgttgatctccgcagggtcaatgtcaatctgcaggatctttgcatgctttgcaaaagcgtccgcattgcccagcaccctatcactgaatctggttccgatggcgatcagcagatcacatgctgagacacccagattggatgttttcgtgccgtgcatgccgagcattcctgtatacaaagcatctgttccatcaaaagcgccttttcccatcaaagtgtccgcaaccggagcatgaaccttctccacaaactccctgagttcttccgatgcgtccgacagtacggccccgccgcctacaaggataaacggcttggtggacgattcaatcaattcaaccgcccttctaatgtccatttcacggatattgtcaatctttctcttgatctctttcggttcttgctccttatagttggccacagcggctgtgacatccttcgggatgtcgattaggacaggccctttccgtccgctctgggcaatacggaatgctcgccggatcgtgtccgcaagatcctccacatttttgacaataaaattatgctttgtgatcgggagggtgatacctgtgatatctacctcctgaaaactgtcctttccaagaagccccactcctacattacaggtgatggcaaccattgggatagaatccatataggcggttgcgatcccagtgacaatgttggttgcccctggacccgatgtggcaaaacaaacgccgacttttcctgtggacctggcatatccgtctgcggcgtgggaagcgccctgctcatgcccggtcaatatatgggtaaaacagtcctgctgcttatataattcgtcatagatgtttaagatggcaccgcccggataaccgaaaacagtgtctaccccctgttctttcaaacactctaaaacaatctgtgatcccgtcaattgtttcataagaatacctctctatttatcctggttgatttctaagatggcgccgcggtttcctgaagtgaccaaggaagcatatctggcaagatagcctgttgtgatcttcggttttcttggctcccagttctctttgcgtttctgcatctcttcctcagacacttttacattcaaggtattggcattaatatcgatggaaatgatatctccttcttccaccagggcaatcggtccacccactgctgcctccggagaaacgtgtccgatgcaggctcccctggaagcaccggaaaaacggccgtctgtgatcagtgccacactagagccaagccccatgcccatgatcgcagaagtcggattcagcatctctctcattcccggtccgccctttggtccctcatatcggatgacaaccacatctccggctttgatcgctccgcctttgatggcatcaatggcgtcttcctcacagtcaaagactcttgcaggcccttccatcttgagcatctcaggagcaactgcggaacgttttaccacaccggaatccggtgccagatttcctttcagcacagcgattcctccggtctcactgtatggattctcaaccgggcggataacctccggatccctgttgacacatccttcaatattttctgccactgtttttccagttgcagtgatcaggtccgtatatagcagttctttcttatttaattcgttcataactgcgtacacaccgccggcctcattcagatcctcaatataagtgtgacctgccggagccagatgacagagattcggagtctttgcactgatctcatttgccagttccagattcagttccactccagcctcatgtgcgatggccggcagatgaagcatactgttggtactgcatcccagtgccatatccactgtcagggcattcaaaaacgctttttccgtcataatgtctctcggacggatatttttttcataaagttccatgactttcattcccgcgtgtttggcaagcttaattctttcagaatacaccgcaggaatcgttccgtttcctttcagacccataccgagcacttctgtcagacagttcatagaattggctgtgtacattccagagcaggaaccgcaagtcggacatgccttattttcaaattcatccaggtcatcctttgtgatcgtacctgctgcgtaagagcccactgcctcaaacatgctggacaagctggtcttctgtccttttacacgtcctgcgagcattggtccgccactgacgaacactgtgggtacattaacgcgcgctgctgccatcaaaagtccagggacatttttgtcacagttcggcaccataaccaaagcgtcaaactgatgtgccaatgccattgcctctgttgaatcagcgatgagatcacgggtaaccagagaatatttcattccgatatgccccatggcaattccatcacatacagcgatggccgggaagactaccggagttccgcctgccatggcaactcccatcttgactgcttctacgatcttatccaggttcatgtgtcccggtacgatctcattgtaggagctgacgatcccgactaacggtttctccatctcttctttcgtatagcccaatgcattaaataacgatctctgcggagcaaaattctctccattggtataagtattgctcatatcactctacctcctaaattcatctatgcctccggtatcccggaggcggtcatgtgccgaaggcactttatgtcaaattgtcttatattctctcgataatcaaatcacccatagccttggttcccacctgaaccatgccgtcagacatgatgtctacggtgcggtatccgtcttccagcactttctttacggctttttcaataagatcagcttcctcatccagatcaaaggagtaccggagcatcattgccgccgaaagaactgtggcgatcggattagcaatatccttgcccgcaatgtcaggcgctgatccgtgactcggctcatacagtccgaatttgccttcagccaggcttgcggatgaaagcattccgatggaacctgtgatcatgctggcctcatctgataaaatgtctccaaacatattttcagttaaaatcacatcaaactgttttggattgttcaccagctgcatggcacagttgtcaaccagcatatgttcatatgtcacatcttcataatcctttgccacttcttccacaacctgtctccagagtctggaggaatccagtacattggccttgtcaacactgatcacatgcttttttcgctttctggcaatatcaaatgccttgacagcgattcttctgatctcattttcattgtacgtcagggaatcctttgccacacggatgccgtctaccacctctgtgcttctctctccaaaatacaggcctcctgtcagctctctcatgatgaccatgtcaaagccgtctccgatgatctcatcccttaatgggcaagccttctttaactcttcatataaataagcaggccggatattggcgaataaccccaatccctttctcagagcaagaagtcctgcttccggtctgagcttggcaggcagctgataccatggggatgtggaagtatctcccccgatggatcccatcaaaaccgcgtcgctttttccggcaatctccagagtctcatctgtgagaggttttccataagcgtcaatggatgcccctcccattaaaatctgttcatatgtaaactgatgtcccgacttttctgccaccgcatccagtaccctcaccgcctggtctacgatctcaggacctattccgtcacctttgataactgctacattaaaattcatagaattctcctcttccctataatatcaccgatatcatctccacgcccaaagctgccccgcagcttaaacaggccacagtgacaatgttcatctccctgtatgccaagatcacagcaacaataaaccctataacggatgaccctaagctttttgtagctgaaaacaccgccggtatgaccattgctgccaatacagcatatggtacatagaaaagaaacgatcggaaaaactgatttgttatctttttttgtatggcagccagagggatcattcttacaagatatgtagtcaacgccatggcaatgatatacaaaagcaatctctcaagactcattcttcttcctccttgacaggaaacatcacagcccctgctcctgcagcgatcagcgtacacaggataatggaaaaaccgctggagatgaaagaaaataattttacaaagctaaatattaggctgaaacatactgaaatcaatatgactgccacgattttcgggttgtgcttcgcaggcggaataacgatggcgatcagcattccgtaaatggcaatgccaagtgcattcatgaccatctgcggcagaaggccgcttgccgtggctcccagaaaggtgcctaaggtccatgcacaccacgaaatactcatgagtccatagaaatatttgggtccgatctccccttttcttccgcaggccatggcgaaaatctcgtctgtcacaccaaatgccatcagaaaccgattccaaagctttgtttttgatatcagtttttgtcctatggcaatggacatgatagaatatcttagattaataatgacctgggacaggatcagctcgatcaaggatccccccgcagtgatagaaatcagccctgcgaactgccctgctgatgtaaggcatgtggcagatatcagggttaccgcccagacaggaaccccttttgcacttcctgcgatcccaaaagcaaaagaaaccgccagataggccagcgcaatcggaatcgaatccagaaccccgcgccgaaagctgttctctactttcattttcttctcctgttactatttcattgattgttctgcttctataatatggaggaagaaaaatccccctgaagcgaacttatataataggataccatatttcattagagattgaaaatagttttttcattgaatatgcgattccctggccctttttgctgttttggaaggaattatggatgaacaggccggattttggcttttgaaacaataagaatgaaaaaagaggagatccataatcttccatcaagcatatcactgttgtttcagccagaaaaatatattataatggcaataacagaataaaaaagggaaaaggggaatacatatgaatcgtaaatcacttctttgctttggtcttgcagccatgatgctcgtctcaaacatccatcctgcatccgctatcagtgctgggaccaagtttaaggtacaatacacccataacaaaaagacttatacaaaaaaagcactaaacgccagatacaacaatactatcatcaagacaaacatgcctggctttctggacgggtctacctctatgtactctgcctactggatctttggcagatgcaaatcattgggtacttcttataagtatacaagtaaaacaaaaaaaattactattaaaaaaggcagcaagaccgttgtcatgactttggacagtaaaaaagccaccttaaacggcaaatcctttactcttccggctgcccccagaaaagtccgttatgtggcgaaaaagaaaaattatatcatggtgccagggcagaccgttgccggaaaactgggcatctcatacacatggaataaccggctgttatctggcgtgatgaaagtttcatcttcttcatcctcttcgtccaactcttcgtctccttcaactccgactacgggacaagtagttgcacctaagactaagatcacggcaggcagcagtaattactccgtgcggataaaaaagccgtcaggattatcttccgctgccgttacttcagaggatgattattggaataaacggctaatattaaatatcaatggaaattataaaactcatttttcttcttcatccaaccggaatattaaggacagcctgtcctattctgtatcctataccggaggaaagacaaaaatctatctgactacgagttcgatcaaaggtttcagtatcacacaggattccagttatatctatgtgaagtacgcagcgccaaaaaccatgttctcgagagtgatcgtcgtggatgccgggcacggcggtagcgacagtggagccgtaggaaatggactttatgaaaagaatatgactctgtctattgtcctgaaaatgaaatattactttgatcgaaactctaattacaaagtttattatacaagactttctgactggtatcccggaattaaagaaagatatacgttttctaataacattcatccagataggtttgttagtgttcatattaattcttttaaaaagaaaagcgctaatggaacggagacattatataatcctaaggggaaaaactcctcctctccttatagtataagttgtaaaaattttgcatctagtgttcacaaaaaagttttagctgcaactaaatttactgaccgcaaacttacgcaacgtattcctggcagtggagcaggagtaggagttttatcttattcaaataccgctgctacattgggagaagtcggttttataacaaattcttctgatgctgcttttatgaaaaacaattacactaagattggtaaagcattttatgatggaatcttagcttccttttaacagaacagtattctcataattaatatagaagtaatagaaaatcccagattgttttatttggcagacgcctcagaatttaaaacaattatgggattttttatatgattattgcgtttttattacgaatatgttacaatctacccgaaaggacgggaaagtatgcataaattaaaaaaatctatcgcttatttatcacttgtgatgttaacagtcactacgattcctgcatccagtgttaaagctgcttctgttccaaaagcaggcagttattatacattaaaaattgcgggtaaaaaacaaaaaaagaaatgccggaatgtcaaagtcaatggcaagactgtaaagacatatgctccgggatttgaaagagctaacacttccatgtattcagcctactggctgtttaagaagcaaaaaagtcttggagtgtcctacagttattcatctaaaacaagaaaagttactttgaagcgtggtagtacatctgttgtcatgactctggacagcatgtatgcatatgtaaatggcaagaaaacaaagatgcccacaccagcaagaaaagtatattcttatgccaaaaagaagaattatatctatgtcccgggagctttctgtgccacaaaacttggacacagttataaatggagttcctcccagaagagcggcctgataacaaccaaaagccaggcttcctctaattcagggagcagctcttcatcaggcacctcaaccgtgactcccagtacaaggatcacagcatctgcttccaactacagcgtgaggataaagaaacccagcggactttcatcttccgccatcactacatcggatgattacggaaaccgaagactgatcataaaggtaaaaggtaattacaaaacccacttcagttccagctctaaccgatacataaaaccggacaagtacttccgctcctatacagtcacctacagcggaggctacacaaatatctatatccggccgagaaaagatgtcatcaaagcctatgcggtttcacagacatccagctatatctatataaaatatgattcgccgaagaaaatatataatcgtatcgtagtattggatgcgggacacggtggatcagattcaggtgctactggaaatggacttagagaaaaagatatgaccctaaatattgtaaagtcagcaaaatcatattttgacaaaactggttcttacaaagtgtattacacgaggctatctgaccggagcctcattttgagtgaacgttcagaccttgctaataatgtgggtgccgaccgcttcatcagtgtacatatcaactctgcttctgcatccgctcatggaacagagaccttatacaactcaaaaggttataagtcctcctcagggcttaccagctataactggtccaataagattcacggttatgtgagacccgccacaggctttacgaacaggggacttaaaaaccggaccggcctggctgtattaaggaatacgaaaacagcttccagtctgacagagatcggattcatctccaataagaaagaagctaagaaaatgaaaagcaatacgggcacttatggaaaagctgtctacaacgccattgtaaattcattttccacctacccaagcaaacgataacatcatgtgataatggaaagaccggaacaatagtaccgaaattgttccggtcttttctttatgtcagctagtgtctagtctcaacaggacaagaagatggtcacttatagtatggaatcacaagatacatcccctctttgatctcaccatcataaatatggtttgcctcacagacttcctctacatactcatgaactgagctgtattcttccgatatatttttcttggcgatagaccacaggctgtcacctctcttaatctgaatgctggtaaagtacttctccctgccgtcggcggcaccggccacctgccggctctctgatataacggctgcagcgatgcccagtaccgtaacgataaatagaacagtaatcaaaactcttatcttcagtgttttcataacgcttcctcctatcgaacatttgtttatattactattatatagaacgcacgtttgtttgtcaactgttttgtcgaaaatctgttcgggaacacttgtttcaatctgcaatatatggtaagataataccaagaaaataaaggaggcacattatgagcaaacaaaagctgagcccaaaacaagaacaaatcttagaatatataaaatctcagatactggagaagggttatccgcccgcagtccgtgagatctgtgccgctgtcagcctgaagtccacctcttccgttcattctcatttggagtccttagaacgcaagggctatatccgcagagaccctacaaaaccgcgcgccatcgagatcattgatgatgactttcagctcacacgccgtgaggttgtcaacatccctatcgttggaaccgtcaccgccggagaaccgatcattgccacggagaatatcgaggactatttcccgatgctgcctgagttcatcggttctaagaatacctttatgctccatgtcaaaggagacagcatgatcaatatcggaatctatgacggagatatggtgattgtggaagagaccccatcggccgagaataatgatattgtagttgcccttatagaggactcggctaccgtaaaacgtttctttaaagaagacggacattaccggttacagccggaaaatgactttatggatccaatcattgtagacgaagtttccattctcggcaaagtcatcggcctgtaccgcagcatgtcataatcatacatatctatggaatagaaaaagctgatttggagtaagttccaaatcagctttttctattctgtacatattaatttatccttctgcttccatgggcacttccaccccatccttccagatcctttccagatcataaaacagacggttttcctggtcaaagacatggatgacaatatcgccaaagtcgatcagcacccaggtaccgttctgatacccttccatctgtttcatctcatatcccgccttaaacagggcgtcctgtacattatctacgatcgcctgcacctggtttttattcttaccgtttgcaatgataaaataatcggccaccacagaaatcttctggatatcaatcactttgatctcctctgccaatttttcttccaacgcatgataagcgatgtttgccatctctaaagactggttcatgtgcggtcttcctccttataatattgataggtttcctttgttttaggatcaatggtctggttcctgctctcaagatactgcatcgtgctttccagtatccccaaaagacattggtccatatctgaaaaagccagctgtctcacactggaaagacccggtatctcttttcttcccggctcaatataatctgcgataaatacgatcttctccaggagcgtcattcctggttttccggtggtatggcactcgattgcagatgcgatttcctcatcctcatttccgtagcaatctctggcgatatacggtgccagggctgaatggagcagctgcgggctttccctgcgctcttttgtcagtggaatgccatatctttggcagagctctttctgccgctccaacggatatcctttggcacaatcgtgaagcatgcctgccataaacgctttctggatatctgcgccaaatgccatcgccattgcggcagctgtataggccaccccgacagtatggttataacggctttccttcaagttttctgaaagcttttttttgatctcattcagttccatacaaatcatttctttctatataaagtctgacttcctccggcacgaaataacggatgctctgtcccctagccgctcttttcctgatctcgttggaggagatctctaagtccgggctgtccagatggcatatactgcactgatacttatcttgaatatactcaatctgtgcgtccagggcgctcctagagtcatttctggatgccaccagaatggttgccatggataaaatctgttctgtatccttccaggactcaatctgatacaaggagtctgcacccataataaaatagtattctgcatccggatgcatctgagtgagctttcttagagtgtccactgtataagtatatccctccctgtagagttcaatgtccgaaaactcaaagccaggatggcttgcgatcgccagcttgaccatgttcacacggtcctcaatctccacattcctagatatttttttgtatgccggatttttggtagggataatcaataccttgtccaagccaaaatcctccagggcagtctgaccaaggatcagatgtccgtggtggatcgggttaaacgtccctcccagaattccaatcttcttcataatccctccgaatctagtaaatcatctgcgatagtttttctccattatctccagtcggctctggaaaggcctccttccgacaatgaagaaaaactatcgtaggatggcaccttctgtttaactgtcatccttatccagtagacactacgtccatgttctacatgattggagtgaggcattctaagagctgaacggaaatcatgtggaacatgtcatgctttcggcagctgtatcttcttatggtccttagactctttatataacacaatcttctttccaatcacctgtacgacttcagatctggtcctctcagcaaggatctgcgcaagttccttcggatcatccatacaattctgaagtacagcgatcttgatcagctccctggcgtcaaccgcctctctgatcccctcaatcaattccggggaaatgctgtctttcccgacccggaataccggatcgattttcattgccaggctctttaaataggctctctgtttacttgtcattgtttctccttatttgtaataatcaaactctaaatcatataacttcacggtatccccttcttctatcccaagggcttccaactcttttacgacaccattctgcttcaggaatttctgaaagaaatcgaatccacgctcagattccagattcgtataaccgagcattcgctccaccttggggccttctacggtgaacaggccttcctctggattcgctacaataatactgccctcttcttcctcaaatgtaaggtcatattcctgctcaaactcagtcgctccctccggcagctcgtccagaagtctgcttacgtgccacaaaagctctttgacaccttctccggtaactgcggagatcgggaacacctcaatgccgtcttttccgaattcttctgacagcaagtccatcacggtctctctgtcttccagagtcatggcatcaatcttgtttgccgcgatcacctggggacgttttaggatctccggattgtatttctccagctcttggttgatggcatggatatccgcaatgggatctctgccctccacggaagccgcatccaccagatggatcatcacctttgtcctctcaatgtggcgcaggaactcaaatccaaggcctacgccttcggatgccccttcaataatacccgggatatcggcgatgacaaatccctttccgcctgccaggtccacaacacccagattgggatttaaggttgtaaaatgatagttggcgatcttcggccttgcgtttgtcaccctggataagaacgtagatttgcccacattcgggaatcctaccagtcccacgtcagcgatgaccttcaactccaaagtcacttcaagttcctggcatttgccgcccggctgggcatatttcggtgcctgcatcaccgctgtggcataatgctggtttccttttcctccccggccgccctttaagagcgccaccggctctgttttatttgacatatcaaggattactttccctgtttctttctctttaatgatcgtgcccggcgggactttcaacacgatatcctgtccgtcagcaccatggcagcgcctttttccgccctcttcaccgtctccggctttatatttccttttatggcggtaatctgccagagtgttcattccctcatccacagcgaaaattacatcgcctccgcggccgccgtcaccgccgtccggaccgccgttgggcacatagagctctcttctgaagctcacatgtccgttgccgccttttcctgatctgatatatatatttgctctatctgcaaacatcggcttttcctttcttattttcaaaaaaacggctccaaattgtgaaatttgaagccgttaaacattcaactgtctgcctgtacaaacgatgttaacaatttatgcaactgggtgtacagaacactgtttcttatctctgccttttctctcgaaacgaacgataccatctactaatgcaaataatgtatcatcaccaccgcgtcctacattgacacccggatggatctttgttcctctctggcggtaaagaatatttccagcttttacaaattgtccgtcagctctcttcgcacctaatctcttagattcggaatctcttccgttctttgtggaacccattccctttttatgagcgaaaaattgaaggttcattttcatcattgtcttacacctcctcaaatactacgtgaatatatcgatgatactctgattcaatgttggttatcccaagaaccagagaatccaataatatctgtcccttttcagaacatatccctgagacttcaaaactgatcactgcatcttcttcagatacatgatgtgtgccaacatcgtctgtcagctgttcaaaagaattcaggaaatttatgaccagtgcagaaactgcggcgcagacaatatcttgtccttcctccgcatatccggtatggtcttttgcagaaaaccctctgggttttccttcatggtcccggtagaatgtgatctctgtcattctctcggcccttgattatccaacaatattgtcgatcttgacttgtgtgaataactgtctgtgaccatttttcttatggtatccggtttttctcttatacttgtaaacaacgacttttttgtctttgccttcgcttacaacgctcgcttcaaccttcgcaccgtctacgttcggtgttcctaccttaacagtatctccaccaactaataaaacatgatcaaaagtaatctttgctccgacttctgcgtcaagtttttcaactttgatcacatcaccttcgcttactttgtactgttttcctcctgttgcaataatggcgtacatctatggcacctcctataatcaaactcgccagctttggtgatctctgaggattcttatacctcgctgtgcggcatactggtatagtatagcaatttattttttctgtgtcaagaagttttcttacaggaaatcctctttttctatgggttttctgacttttttcctggtgatctccatgagtcccagtctcgtcatatccactgccgccgcctttttggaatccctgttcaggcaggactgcatgtaagaaagaagcttatcctcttcctctttttccttcatatcaataaaatctacaaggacaatgccggataggtttctcagccggatctgcctggccgtctcttttgcagcttccctgttgatttttataatatggccttcctttttaccccgcccgatggattttcctgtgtttacatccaccacggtcatggcttcggtgcgctcaataatcagaaatccccctgacttcatccatactctcgtatggaatgcctcctccaggctgtgggagaaccgataggcccgctcgatggactggtcctgcctttccatttggcggacctgatatccatgttcctgtgcctgtctgcatatctcgccgtcatcggaaacaatcctgtccgtctgccccggcgagaggccgaatacatagcgggatgaaaaactctggttggtggctgccagctggcatggtttcagatactgctgcttttcctgaatctttataaaccgctcagccagagttctggcttcgcttatgatctcctcatcccctgcaccggcggcctccgtgcgtacgataaatccgtagtccccggtaacaaaaccagagacgagactctttaactcttctctccttgccttgtcccggatcttgccggatatgcccacgaaagatctgtccgaagacaacaccaaaaactctcctgttagttctatgttttcagtagccagcggttccttcttgtccgtgccgtctttctttacctgcacaaggatctcctgttcatttttaagcttctctttgcttctccgctcatccaggggataaaaacagagcctgcccctgtcaatctccacgaaagccccattgatattcggcacaatattctttatcttacctttatagatatttccgaccagacttccctcagtgaggggctcagaagaaaattctacaaactctccgtccaaaagccagccgctgacaatatgctgccggcgtctggtgatgattacttcattcatatgtactattcttggccggaaatgcttgggatatccacagaagggtcaagatcctcctcgtagtccactccatccatacggaagccgaacatttggtagaaatcatcccagtatccgtcaatatcagaatactcctggacattttcggtgcagaccttctcccagcggcgttccacttcttcctggacttccgggcgcagttcccagtcatccagacggatcagaccctgttcatctgtcttggcctgtccaaagacagccttttcagaaaacagccttacgatctgttcgatacagccttcatgaagtcccttttctttcataacgcggtacagcacagccatataaagcggtacgatcggaatggcagaactggcctgtgtcaccagccccttattgacggagatgtatgctttgattccatcctttgagaattcctcattgatctcacccgccgtcttatgaagatgcttcttcgcggcaccgatggttccctcaaaatagataggatatgtaagcttaggtccgatataagaatatgcgaaggtgactgcgcccttttcaatggcatccgcatcggtaagcgcctggatccatgccttccagtcctccccgcccatgaccttcacggtagctttcacttcttcctctgtggcagcctcgatggttttctcactgatggtattatctttaaggttcaggttcttatttgtaaaatcttcccctgttgtctttaagacagactgataaaccgtgccgtcctctgtcgttcttctcggtgcagccagactgtaaatgacagcgtcaaccttaccgaaatccttcttgatcagttggatgacctggtcttttacttccctggaaaatgcatctgcgttgaccgtcttcgcatataagccttctctggccgccgcctgttcaaatgcagctgtattataccatccggcagtggcggtacgtttaccggccgccggtctctcaaacatgacacccaaggtatccgctccgcacccgaatgcagcggtgatccttgatgccaggccatatcccgtggatgagccgatgaccaggacctttttcggcccattctcaacaccgctgtgtttttttacatatgtaatctgatcttcaacattttttctgcagccctgaggatgtgcggtaaggcacaaaaattcacggactttcggacttattttcatgtatatctcctttgcttttcaagttcaacgattactgaaaattataatcgttcctttttccactgtcaagtttccccttccatatccttcctgcttatgctcttatcctgtaagattctctgaagcgttgtctgaagcacattcaggtcaatgggttttgacacatgggcgttcatccctgcctcacgtgcattctgtacatcttccgcaaatgcattggcagtcatggcgatgatcgggatattggccgcatccgcccgtgtagtccttctgatcatccgtgttgcctcatagccatccatctccggcatctggatatccataagaactgcgtcataagttccaggctccgcttcctgaaacgcacggactgcctgtacaccatcggtctccaatacagattccgctccgcatatccgaagcagctcacataggatctccgcattgatagcgttgtcctcagccacaagaaaatgcctcccggcaaacaatttctctttcacagagtccagaaagtccattgctgttccactgtgggactcaccgccggcctgtgctgcgtcaaattctaactctaccttaaacacggagccgctgccgatccggctctcagccgttatctctcctcccatcaggtcaaccagtccctttgtaatgctcaaccccagtccggtaccctcaatgcgcgctgcattgccgctgcgggtaaaaggttcaaacacatgtgcaaggaactcctctggcattccgatccccgtatctctaacggtaaagcggtatctgacacggcccttatcctttggcaggcttaactcctcagctataaattcgatgacgccgcctttttccgtaaacttaatcgcattgcttaagatattgatcaggatctgattgatgcgcagcagatccccgcaaaaacactcctgatcgatatgctctgcccgcattctgaactcaagacccgcctcttctgtctgcgacttgatcatgacagagatctgctccatcaaatccggaagaaaaaccttgtcaagattcaaattgatctgggaacgctcaatcttactcatatccaaaatgtcattgatcaggctgagcaaatgatttgaagaaatttcgatcttctgtaaacaatctttcacccgctctctgtcatccaaaaaagtggatgccagcgtcgtcattcccataatcgcattcatcggtgtacggatatcgtggctcatggcagatagaaagtcgcttttggctttgtttgcttcttttgcaaaaaccagcgcattttccagatccttttttgtccttctttccgccgccagcatgtcggtcacgtctgccctcaccaagcacagcgtccgatggtttaaatccccccataggacattgatctgcttataccgttctccctcctcactctgataagaaaacagaaaatcatatccattgggctgtttctccaaacgctccagcatcgttgagatccggaactgtatccgggcttcctcaagattctccgtggtgccatggctgtccacaaatctcctgattgccttatcatattggccgattaccagagctggcagattttctagtacactctcccttgtataaagtgtcaattccctgctgccgatattgataaatgctgccagttcaaatgtataggcgatcatgtggagcaggccctgctgttcacggatcgagtccgtaatatcagttcttgagaggcatacccttcccagtctcaggtcaacagccgagactgtcatattctttgtcctgatatccccattgtcatccagcacggagaacgcgaaggtgtatgcccctgcccgcttcagcttcctatacatatctgccgggtaaagccctctcctatactgttctttgtctctcggcacgacccttgtccggagcatctgatccatccatgcagaatggcttcccgtgggcggcggaatacaacatgcgttttcactgcacgaaagaatcttgtatctgtctgtagtcagatccacatccacaacaaagtcgcagcctgtcacagatagctggtgaaggatacgctccgagatggcctgctctgtaatatctgtgaccgttagtatccctgtgacatccccgctgtcgggagttgccaccatatgcattttaaactgtatataacggcctctggtatctttagggagctttacaaaacactccatctgccgctccagcttcccttcctcaaaggctcttaacgccggctcgtccagataagttccaaggaattccctgcgttccttttcgtccacaatgaaaccggacagtccggtaaaaaaactctgccggtcatcactaaatgtcttcagcagatcagaatccgtgtaatcaatgatatccaggatcctgctctgggtaatgttacagtgccccacgaccagcgcattcggtcccggtgtccggtaatgctgcaggatcagatctttgtactggctgcggatcttctcctgctcctccaccgactgggtgatatcggtatagactgcataaagcctgacagccccgtcttctgccttaagcagggacaacatgcatttaacccagatatatcctccgtctccctgcatcacacgggcagtcagctcacagttgccttctccattcctgatatagctttgaagcttctcccggatccctttgacatcctccggatagattcctgcaaggatatccttctcgtacattttctcggcttcttccaccgtcatatgggtcatggcggcatagccgtcagagataaattctgaaaccagcgtcccatccggctcacatcggatgaccgaaataccgccaggaagatttttgatgatcgtctgaaaatacatttccaggcggtctttctctctttttgtaatgacctcctccgtcacatcccgcacatattggatatatgctggtattccattccagtctgtctcacggaaatgcgcactgtataccctgtcagaagcgggaatcttcatcttatgttcgccgcttcctgcttcataattattcatgtgacagaagctgcagggactgtctttgccgtgcagggctttgtaacatttctggccggtacagtcctttccttccataaaaagatgggtggattcatttgcatagagaaggtcatagttctgcttatctatgacatagatcccgtccgcagtctcgttggcaatgctctgaaacaggcgggtttctgccgacatgcctgtaaacacagcatagaatcttgatgtctttgacagtggtcccatacgccttccgtttaaatggacccagatcaagtgtccatccctgtgaaagatacggtaggatacatccagcacctcaccgctggccagagcctccttcgtggcctcaaacacccggtccctgtccggcccgtagataacatcaagggcatcgtacctcaccatgtcctcatactcttttctcgtatgccctgagagtctcataactccatctgaaaaaaactcagggataaaacgccctccctctacccggtagctggcaatgccccctggtatggagttgatcagatggtccttttccagctgtacctgcttcaggctggtgatattgtggaacacacagtgaagcagcggacagccatcctcctcaccaatccattttatgtgaatatgtacccatacgatatgcccgtccctgtgctgcttgcgaaattcaaactctgatacaccgccgctctcaatgacttccatggctttggatatgaccatttccttgtcttcccaatacgtcatatcaaccgcgtcttgtttgacgagttccctgtactcttccaccgtgtaaccggacagttccggtactccatctgaaaaatagaccgtctcaaaaatatcggagactttatagatggctacgcctcccgggattgcatttataatatcctgcattttttcgttggcacggatcaaatcttcttccatctggatctgatcgctcacgtcacttaagacaacataaaagagcacccccttatcttccatgcagcccttggccccatccaaatggatccaccggtatatccccttcttgtcatgaaatatacggcaggtatgagataaagtcgtaccctcatgtaatagtttcgttattttttctttcagcgcagggatatcctctttgtgtactcccgacaatgtcagttcctgtccggaattctcgatctcagaaatatgttcgcttgagtaccctaacatgttataaaaagcagggttataaaacaccggataaacataaccatcttccagataatagacacacactccgcccggaatacggctcaaagactgcttcgctttctctctcaatgcctgcagcgtcctgccggccgtctcctgctttttcatacgttctcttttctccattgacagcaccacctttgctactgctccccacatcagacaggaaaaaaaacgctcattcccgcactaactctgtccatatatatattaattaattctaccataggcagtgtaaaagtgcaatgaatctcactgcgattccaagaaaacaaagtgggcaagcccacctcatctccccaacccctcactctttgaggggcttaaaaactttgagcaccaaatggatttgacgtagtcaaatagattccttacgcatttgtatgcatactgcctgcaaggcttttttattccatagggagattggaggaactttcctatgaaataaaaaaccgtatcggcagtcttatgaccgatacggcagttttatctctatatattatgtatatgtgctattttacgactcttcttacagccacgatctttctgtatcttgcgttaggagagatcttgattccccctcttggatatggcgctgagttgctggcatgaacaattttatttttacctatgtaaatcgctacgtgtccgctgtagcagatgatatctcccggttttgcctttttgatgccgccttttactttctttcctacttttctcattccataagaagaatgaggaagtcttttaccgaactttctgtaaacagacattacatatccggagcagtcagctcctctggttaagcttgttccgccgtacttatatttatttcctacaaagcgttttgcatagtttacaactttctgtcctttattggaagcagcttctgcttctcttgttcccccgattgtggaacatcccacgactgtgagcattacgactaccagtgcttttactactaaacgtttcatgtactctcctactcaatcactacaaatgctacgatattatttcatgtgtttctttcactgttgttattgtagcttatatgtaatgaaattgtcaagagttttttaacaattgtgtaacaattatatttttttctttaagatatcgacaaatctcttcacaaatctaagttcctcatctgtgatctcatgctggctgaaccttgctttttccgcgatatttcgagctttttcgtagataaggcggtgtttttcatccaaattctttccctccatcagggaatttattaaattttgataaactatgactttttccttattagagctcattttccatctacggtacctcaggatttcctttataattttaacaattgtaacaattatgcaaagagatagaaacaatacgatcagactctggaggaccatatttttttcaaaaaatgatcccttatgatccaccgctgcggacggctcctcctttgactgctcctgttgcgccagaaggctgttcgtgttcgtcacctccaccggaacccagcctgcattctctatgtaaatctccggccaggcatgggcatagaaatctgtgacctgcgcggtattgctcctctggaatttcttcttgtcgatccggtatccttccacataccggcacgggatccccgctgaccggaacatcatgactgccgcggaagcatactgggtacaatagcctttcttattctcatttaaaaagtaccaaatagggtccttcccctccggagtcatcccagaatcgctggtataatgatagttcttctttaacagctcctggatcatctgggtctttttgcgtgttgagacaactgcgcccagtgccggaaacttcttcagcagctttttcttaaggctttccggtactttggtgtactggctgtctacatactgattataagaatccattgcctgaaagtactcccgttccaaagtgacatctcctgtctgtccgtccagcagggcatccgtgatcctgccgtccgctttcagcatgctgtctaaggaaacaggataatacaacaaagtctctttctttttaaggtttatccttgcaatgttgagatcgccgtaatatcttcctttttcaggtgagatattgcaaaaatacggccataaatagtagtcgtcagtgaacttctgataggtgatctcagccttttctgccttcacctgaagacctgtatctaaaagttccagagaaagctccggaatcttcaggtcaaaaaactgaaacggaagatccaggctgttttctcccaggatcaccttcgcatccttcttctcctttttccacataccattttcgtagatgccgctggtgaaccctttcagatacaatgtcctgggctttgaaagctgaaccttaaaaagttcagtcccacgcggtgccacagagccgatctttccgatatcgccgcttccgatcccacctgcaacctggtaatccttgccctgggacacagttctcacaaactccagagcagtttccttaagcggattggtactgacgggactccccacggttcctgatgcagccacagcgcccaagagcaggcagcccgagatcaccacagcgctgtacctttttttgcgcatccaaaaactgtatccggcaattccacataggaacagcagaaacggacccgtaatggaatagggagtcaggatcagcagacacgcttccacaatggatacagcggctgtgagcatcttggtccttttggccagcagatgaaacagaacacttcccacgagaaaaagcagaagaataaagagaatgctgtccctccttgtatcatccgcctgtatatccacataataataaaaccccatgtcatacactttgtttacggcatcggccatcctgttgctgatcacctgaaagccgttggccagcgcgccgcgcaggaaaaaggcggtaaccgccgcaaaccccagaactccgtagaccgcttttggataacgctctaaaagcacacacagagcagtcaagatcgccacgcccgaacagagcagataatattgaaaggctctggtaaagaagcccacaaatacactgtctgccagccccagaaatatcatgctgagaaatatgtatttaatatatggttctattttttctttcatataaaaagacctctaaagaaataattccagatcataaattccctgttccagtacgctccggtcaactgcatttgtctctgaccccgtttctacataaatgaaatcagtgtctgagcttttcataaagatatgaatcccctcagattcaacatctccggaatcttcattaaaatctgaggcaaacatcaatccaaacaattcctcatactgctgataacgctccaaataaaattccctagttccccagcagaccgtctggggcatttcctgctccaaaaaaaacttggatatggaaaaaaatacagtaaaaaagtcgtcatatgcctcctcctggtccggcagggaaagccggatcaacagtttttcttccttttcgtcctccaaatcttttaccatcatcagatttttcccagccagcagtttccagtggattctggagctcttatctcccggatgatattccttcagcccgtcatactcatattggttctttgtttttgcctccaccacccggtcaaacatcagtcccagcggatatgcatccggcatgatgagtactccggccttggactttacaaacttttctgcccagaacagtcctgttatatccctgatacggatcttggctactgtgatatgtacctcgtcacagtgctcaaacttcagaggaatctgaaatccttcccctcctcttccggcatactcaaacttctcttttatgacttttttccgtcccatgagccagtagcgcacctggtaggtcacttcgcattccactgcgtccagacaccggattccagtaaagacgccttttaaaagaatctcgtcattcctcgatgccgctttcggctccagagaaacttctaccctgagttttgatgccttcctgcggacgatccaccaggaaataaaaaccaaaacaaataaggatgccagcaggcatcctccaatgatatcttgatatagaataacataaatcatgctcaggaagatgattccgattatcatggccgctccttatctactctctgggaccgggataccctcggcgatggattccaggatgtcccttaccgtcttacgcttgattcttgcctctttgctctttacaactctgtgtgccgatgtggcataaaaaacatctttgacgtcgccaggcaccatatagtcccgctcatcaagataagcattcgcttttgccatctgcagtaaagaaatggttcctctcgggctgatccccatgctcagatcaggatgattccttgtggcgcatacaatgtcgacgatataccgatatagatcctcgtggacatataccctctctgcctgctgtttcatcaaaaccaaatccgtgatcttaataatctcctccagtgaatcgatggccacattgactctttcctgtttcaacatggcaatttcactctccctgtcagggtagcccatggaaatacgaatcataaaacggtccagctgagcttccggaagggaatgggttcccaccgctcccagagggttctgtgtggcaatgaccacatacgggtccggaagttctcttgtcactccgtccactgtgatcttaccttcttccatggcctcaagaagggcggactgagtcttcggtgaagtacggttgatctcatccgccaggagaaggttggtgatcgcagcccctctctgatattcaaaggtctcgctgccctgcttatagacagaaaaaccggcgatatccgctggcatcacatccggcgtgaactggatcctttgataatcaagccccagcaccttggaaaatgcaatggcaagggtagtctttcccacccccggtatatcctcgatcagaatatgtccattagctaagatcgccgtcatcacctgtctcgtgatatggtcctttccaatgatcacttttcctatttcctcaatcgcccttccggccaaattgctcatcacatcacctctaagccttcttttttacattccagacaatccaagccatggcaacagccagtgccccggccgcgatggccagacctaaaaatccatttcccaaagctccggctgtcagatatccgatcaccgcacaccccgcaacgataaacgcgtagggcatctgtgtcgccacatggtctatatggcggcatccggcccccgcagaggccagaatggtcgtatcagagatcggggaaatatgatctccgcatacagcccctgaaaggatcgatccaaccaataaggtcagcatagaaatatcgctgcccatgaccgctacggagatggggatcaagatcccgaaggtcccccatgaagttcctgtggcaaaagaaagccccagtgccgccaggaaaaacagggctggcaaaactgcggtggcagatgtatttccgcttataactccgctgacgaactggccgatccttaagtattcatctccgcagatgccggaaagtgtccatgccaggcacagaatcataatggcagaagtcatagacttaaatccctggctgaagcttccgcaaaagtccacaaatgccacgacctttctcggtatatacagaaggaacgtaaagatcagggtggaaaaagacccgagtacaaggcttcttccgctgttacagccggatagggccgatatgatatctttgccgccaaaaaatccgcctgtataaagcataaatccgatgcaggaagcgatcaggaatacgatgggcaggatcagatcctttacctgtcctcttcccaccacaggcacatccgcgtcatgcttctggtcatgggtctcgttccccttttcctcctcatactgtttcatcttggaaaaatccacgttgatgatgatcagaaagatgaggaacaccaaagtcaggagagcataataattaaacgggatagccctgacaaacaaagagaatccgtcaatcttacttccctctggaagcgaggagcccacagccgcagcccagctggagatcggggcaatgatacagatcggcgctgcggtggcgtcgatcacatacgcaagcttggccctcgtgaccttatatttgtctgtgattggcttcatgacggttccaaccgtcagacagttgaaataatcgtccacgaagatcacagttccaagaagagacgtggcaaacatggcctgtctctttgacttaattgcctttaatgcccattttccataggcccttgaggccccggatttggtgatcagggctactaaaatacccagcatcacaagaaaaatcaggatgtcacagttgcccccgatttttccagtcataatttcaaatatggtattcattgcttccacggggttgaagtgttcaaacatcaaagccccggaagcaatccccaccatcagggaaagataaacctcttttgtgatcaatgccagtccaatggcaatgatgggcggtaccagcgcccaaatagttccgaccatttatgctgctccttagttctcctctttatagtaattgatcaggcatcccttcaggatgatctctctctcatcatctgtaagttctcccaaggacagctcaaattcaagaagctccccgtccttcacaacaaaggcctggatcttgcctgctttcttctccactgcctctctgatacccggcaggaataagtagtccttgttcttaaacggtagcgctccttcttcgattgtcagcggaagcattccccagttgatcagattagagcggtagcgcttagtagcatatccgttggcaatgtttgcccatccgcccaataccttctggcaggatgccgcctgttctctggcagagccgtcacccggcttcactgcgaagatggtacttccgatcccaagattgccttctccggttcccggatactttttattgacagcctccatgacaggctttaattcttctactacatccagaggacaggttcccgcctcaatggctttctggcctttctgaatctcctttgcaagtcccacatatgcaggatcttttctggacagcgtaaactctgccagcccaagaggattagagcggtaggaagaagtctcccctgacgggatcagctcatcggttgtggtgactggatcgtggatctcagacacaacctttaataagagattctcagggagtgcagacatcttaggccaatcctttatattgggtccgaactgtacttccacggaagtatccgccacacccttgctgtcaaacacacggttctcataaattgttttgtcaaagaagtactttggtacattaaaatcagaatccagatctgtggctggagtcaggtatcccttgtttgccgcagtggctgcgatggatctagcatccatcagtgccacggatgcgatctgcccgctctgtaacttggagccctctctgttcgggaagttccttgtagagtgacggatactaaacgcattgttggcaggtgtgtctccggctccaaagcacggtccgcagaaggctgtttttacaacggctcctgtggccatgagatccgccaccgctccgttctttacaagctccatgaagaccggcgtacttgcagggtaaacactcagggtaaactcatcagaaccgatgctggctccctttaagatatgagctgcctcacagatattctcatatccgccgccggcacatcccgcgatgattccctgatctacatacagttttccgtctttgatcttatcctgaagcgagtaatctacagctccatctaggcttaccatggcgcgtttttccacttctgccaatacatcacttaagtttgcattgacttcatcaattgtatacgtattgctcggatggaatggcatggcgatcatcggtttgatcttggataaatccacttccaccattccgtcgtagtatgcaacggctccaggatttaattctttgtagtccttttccctgccgtggatctcataaaattccttgatggtatcatctgtcttccatatagaagaaagacaggttgtctctgtggtcataacgtcaatgccgatcctgaaatccgctgacaggtttgccacaccaggccctacaaattccattaccttgttgttcacatatccgcactcaaatacggcgccgatgatggccagagccacatcctgaggccctacccctttttcaggttttccggtgagataaacaccgacaacggaaggcatgttaatatcataagtacggttcagcagctgctttacaagttccggcccgccttcacccatagccatggttcccagtgcaccatatcttgtatggctgtcagaaccaaggatcatctttcctccgcctgcgagcatttctcttgcaaactgatgaatgactgcctgatgaggaggtacatacatgccgccgtagcgctttgcggcagtcaggccgaacatgtggtcatcctcattgatcgttccgccaacggcacagaggctgttatggcagtttgtgagcacataagggaccgggaacttttcaatccctgacgctcttgcggtctggataatccccacaaaagtaatgtcatgggatgtcaatgtatcaaatttaatcatcagcttgtccatgctgccggacgtgttatgatcgttaagaattccatatgcgatggtgttttgtttcgcttcttcttttgtcgggacagacccaacaagctggtttaatcgttctgcgtttttttcatctacaagttcggtgccgtctactaaaaatgcacctttttcatacaaattaatcatactttcctcctgaatctttttaggagattatatcataagatgctgttttaggaaagaaaaataagctggcaccattaaaaactttatatctggcattttcatcaatgccacttttttattaagataaatgaaacggatttgagcaatcttaattgaggaggaatgatcgttatgaatcaaacgaaaaaacttgtatataccgctcttttcacggctttgtgctgtgtggggaccatggtcatccagatcccaacccctgccacccacggctatattcatctgggtgatgcctttgtcatcttaagcggtgttatcttgggaaagaagtacggctctctggccgccggtatcggctctgcctttgcggatatcttttcaggctatgcttactatgcgccgactaccttcattgtaaagttcatggtggcgctctgtgcagccgtactgtataaagccctcaccagtcacggagtgaaagaactgatcgccatgatcccgtgcggactggctgacatcttatttgtggtggcaggatacttcctccactcctatattacggagggaatcggaccagcacttttaagcgtgccttccaatgccatccagggctgttccggcctgattgtggcagccattctgctgccaatcctgacggcagttccggatattaaaaaagcgaaattgtgcatgaaccacgagtagtctaaaagaactgctgcccttggatattactccccggggcagcagttcttttatgttctgtattcttatttcttatcgtataaaaattcctctggcaggtttacctgaaatgcttcacccagatccctgaaattctgcggtgtgatggtcttaagcttatcaggtcttacagacagcacttttatgagaatctctgctgccttttccacggtgtgcatcagaccgaaggtgttgtcaaaatcctctccggaacaaaagatgccgtgatgagcccatatgatagcgttgtacttattcatcagcctgctggattccaccgcaatctctcttcctcccggaaccatccatccaacagttccgatcccatctggaaatataaccggacactcggtcatcatttcccacagttctcttgtaaataccttgtcatcaatggggaggataaaggtcagtgcaatcacattaggtgtgtgggaatgatagatcaccctgtgggctccgcctgtagcttcttttttcacctcgtggttcatcaaatgggaaggcagttcactggtgggcactccgcctccttccagtccccaaacgatccgataattctctcccctgctgtcgatctcgatgacagcgatgtttgtctccggcttaagctccacattgcggaagtatttgccggaacccgtcaccaaaaaatactcaccggccagtcccggaacttctgttccgatcggagtgaactcccgttccaggctaaatgcctccctgatcttagcaacttcctccggcttcatacggtaggttgcatttccgccgttcctctcgtgccacccctgcgcaaagccgtctgtgcacattctgataaatcctttgataaattctgctcccaatacgttcatgttctgcctcctctaatcgcgctttaacaggatattgttttcgtaagcttttacttcctgaaaccagtcctcttttgcaggtaccccgttgatctcacagaaataattccatacgtcccccgccggatacagcttcaattcctcctgcatcaccataagctccgtgaattccctgttctcctgcagccccttaagcttctcattaggtctcagcatggctgtgagcagggctttctgcatgtttctcatgccgaccacccaggctgagatacggttgatactggcatcaaagaagtccagcgcaaggagcacatgctctgtcccgctcataacgatctcctttgcaatctcttttgtctcatcatccagaagaaccacatgatcgctgtcccagcgcaccggcctggttacatgaagagccaccttgtctgaaaacagaagcatggatgagatcttgtcagagactacctctgtaggatggtaatgtccgttgtccagcaggcagaggatatcattcttagccgcatagttcatataaaactcatgggagcctacggtataactttccatgccgatgccaaacaccttggattccactgccacattgactttttccttgtcatagcctgccgccaggatctggtccagggagtccttcagccttgctctgggtgcctttctgtctgagggaatgtccttaaagccgtcagggatccagatgttcattgtgcagggagttccaagctcctctgcaaaatattcggagatccttaagcatgcctggccgtgacggatccagaactgcctgatctcttcattttcactggaaagagtcgcttcctccgcttttggatgagaaaaataagtagggttaaaatccaggcccaggcctcttttctttgcaaattccacccattttttaaagtgcttcggttccagggcatccctgtccacaaatccatcttcaaacacagcgtagctggcgtgcaggttcagcctgtgttttcccggaatcaggctcatcgccttgtcaatgtcttccatcagctcttttggtgtcctcgcttttcccggatagtttcccgtagcctgaatccctccggataacgctccctctccttcaaaaccggccacatcgtctccctgccagcagtgcatagagatcggtacattttttaaattttccagtacctgatctgtgtccaccccgatgtttctatagctttcttttgccgcctcatatctttcttctactgtcatgatgcttttcctcctatattttccggtttataaatttctatttcaaatgactgcgccacacagtttcttgcttctttcaaatccttaaaacatccggcgtatctcatctgtaagagcaggcttcctatggctgttgcctctgacggtcctgcatatacggtacacccggtatattttgctgtcagctcattgaggtatccggcgtttgcgcctccgcccactacataaatcttttcatacgttttacctgtcaggctctcgatctccctgatggtctttgcataacattctgccagactgtgatagatcactgccgctgtctcccactcgctcttcggcacctgctgtgaggtcttttggcagtaatcttttaccgccgctatcatgctgtccggtgccagaaatgactcattgttgcagtccacaatggatgggatcgtctgcttagatgccatctcacagagataggaaaatgaatattccgtgtcaaactccttctttacagactgtatcatccacagtcccatgatatttttcaaataacggaaccggtaatccacgcctccctcattggtcaggttggccttcatactttccatggaacagtccgcttttgtaagctcggttcccatcagggaccatgtgccagagctgatatataaagcctgttcatcttccgttggtatggctgccactgcagacccagtatcatgggttgccggaagcaccacctggcagttgaatccgatgtccttctggatctcctcagtgaagtttccgacaaaagttccgggaaccgctatttcctgaaagatctcttcaggaaaaccgagacgctttatcaaaggataatcccaatcctttgtctccggatccaccagttgcgttgtggtggcattggtgtactccgtcttcttgactcctgtcagaagaaagttaaagtagtccgggatcataagaaggcttttggcctgatcaagacgttttggttccttctccctgtccgctgtcagctggtaaattgtattaaagatctgcttctgtatcccggttctctcatacagctccttaagagagatctcctcatatacttttgtatccattccctgcgtcctgctgtcacggtacccgtaagactttcctataggacagtcattttcatccagtaaaacgtaatccactgcccaggtgtcgattcccatacagacaggaattttccccagatccctgcattttttaagcccctgcttgatctcgtaaaacagagcgtctgtgttccagcacagggagccgtcctcgttctccatactgtttggaaaccggtagatctcgtcaagcttcagctttccgttttccagagtgcctaagatatgccttccgctggaagctccgatgtccactgccaaaaaatattttttcatttttctgcctcctgatcagtctaaatggaataccagctgaaggtcttggctgaccgggctgttgtccggattcgtctccatgatgtcagccataaaatcccaccattttcggttgatctgcgtatctgccccctggttccatttctcttcatcttcgatttctatgtatccatacaaaacattggtttccggatccagatagatagaataattgcttccgccatattcattgatcatatccttcatctccggccacagctggttgtgtcttttttcatattcttctgcctgcccttcatagagcttcattttgaatcctttgtattgtttcattctttacctcctgctgttctttggcttccgttaatccatacttcagataggtggcaatgcctcccagtacaaagtagcagaccgtgatcggaaaagagattgttttccatgtttccacaccgatgcctcctgcgaataccaaaactgtcacagctgccagagcagctaaaactgcataggacaggagcgctgccgctttctggaattcaggtttcttcggcacatattcgatgatattttcatcttcctcttccattaattcctcaagtgccgcccgcaccttctggtcttcttccttctgggccgtatagtcctccctggctcccatggaacaggccagaatgatataacttaccatggcaagaagatacgtgggcaggaataaaagataagagtggatcactccggtcaaggtcatcaccaccacaaataccagtgagatcagccatgcaaagagacctgcataattaatcttccatcctttaaatgtagcccagtatctggtgccgcccagtttcggaaggatccagtgttccgtaaaaatcactgccccgatggccggaatcacaagcacaatgatgttgacaatcgccataatgttcatggtaatcgggaagcatgccgcaaaggtcataactgcgccgatcacataggtgagctttttcagtggtatcttgttaaatatagtttcaaatgcgagacttgcacgataaatattcggattggcagtggtccaccctgccacaatgactgccagcaggccggttgcccccaaaacggctcctgtgatggctcctgaatccaggataagcagagatttgttcaatatgacagaagctgttgctcccatgattcccgcacttccccatgcaaaaaaatgtcctataaacattccgtaagaggtaataaatccgtattttggagtctttgcgtagcggaacaatgccatatcgttcagtccgccatggtaagccagattgcacatccaggcaaatccaatgacatggatgatacccagcttctgtcctcccggaatgactgccccgttccacacactggtgtttagaagattcataaagtcggcaaaactatgtaccggcgccccgttggttaccttgatcagttcagggacaaccacgaagactcctgctgcaaaaataatgatcatccacggcacacagacggatgagaatttggccaccgcctcaaatccatttgccgccactaaagttacaatgatacccagcacaatgaccaccagaataaatttgatatccgtcggataccactgagtctgcagtctgatcccaaagatttctctcactgctgaggccgatacggtcagcatggatgctgccatggcaatggatgccagcccccagacaaagttgtaaaccttctgcatgtaaggtcccatgaccttttttaagtaagaatatagggtaactcttgtgtcagtcccaatcggtgcacagatcagtgcgtatgtcagcgttgccagaatgttgccgataaacagtccgataaaaatgtctgtggccttgacaccccaggtcaccagtgtagcgccgatgacaaactctgtagccgcgatgtgttctccgccataaatcccaaagaaattcccaagtccggaaatgttctttttggaaatgggccggtcttccggcgggacagccgatgccttccttcgatactctgcgttcatatgtttctcctccttttgatttcgttctttccttcgatacattaagtataagaaaaaccacgcccaaaagttaggacgtggtttgacgaaaaaggtgtctttatttgactgtacaggagcatagtacccgcagggctttttggttccatagagagatacaaaaaactttcctatggaacaaaaaaaatatcccgaacacatttgtttgtattcggaatatttcaatgctctttttcttataaccgctcataatgcgaccagagacttaaaatttttatcgtctgttcctcttcataaacttgatatacaagacgatgttttatattaatacgccgggaaatcaagccatcgaaattccctacaagtttttcatacggaggcggattctgaaatggatccaaagaaataattgtgagtaattgtctggcctttttttctaagcccgcctgttttatcaacttcttttctttagaggcttgctttgtaaatacaattttgtattttaccactcttcatcctccttatattcttcacaatcttcaataggagtcttcattccaacttgcagatgttctctcatccctggtatgttattcaaataaagtgtttcttcaatcgctttccaatcttgctcgccaactaaaactgcattttgtcctttgctatttacaatcgttacaggctcgcttccgttattcactttctctaaaagattatagatatctcgtcttgcattcgtgacatttacaacactcatcatcatccctccttccctctttcatctacttaaatatattatagcgtacgttttggcgtacgtcaaatataaataactatactttattattatcttttatatacgtatttgatccccgtttcggtgagtcaggcggtattctctgggggacatatgatatttttctttaaacttcctgtaaaaatagctgctgttctcataaccgacagccgccacaatatctgcgatggacagatttgtctcggacaacagtgtcatggctttctggaacttctttctctgcaccagttcctggaacgtgtgtccgaaattttgtttgatcatccggctcagcacagacagggactggttcaaatcctctgaaagcttagaaagattcgcctccttgtaatgctggtctatataactcagtgttgtctggagtacgatctccttgtaattctggggagaagtatagtccagcttgtctatatggtttagtatatgaaggaacacaagccccatagacagctggttgatcttttcttcatttttgcccaggttttttaaggaatagacgatgttctccataagattctcaatctctaagataccggaaagcttaaacagcagatatttttcagaaaaggaattttgtctgagcgtatccaccagaaaatcagctaacacattatttccctggagcatctgcagcggaatatcaaaaaactccggcagagcgataaagttgatccccagatcctccctggatgcgcaacagatgctgtggcggacatgttggttcaggatgagaaaatctccctcctccatgaccacttccttaccgccgataaaatgggtgatctttccctggcagacatacatcatctctatataattatgattatgctccggaaaatcaataaatcttgtgtgtgtcctcacctggatcagacgcccgtccctcagaagtttttcggcttccacttcaaacgtcttttttgtggtatataaagttctgcttacatttctcccgtccaggatcttctgttcttcttctgttatgacttccaactggctgatcaggctttccctcacaaaaaacaccctctttctaactggaccggcgtctcttttatttcagacggtacatatggtttaaaggaccactgccctttcccaaatccagtccgtcaagcaaagcgccggtaatatattcttttgcattctgaacgcttgtctccatatcacatcccatggccaggttggatgcaatggcagatgataaagtacagcctgtcccatgggtattttgattatccactcttgtaccacggaacatcttcatcctgccatgacagaacaggtaatcgttggcatcctccaccgaatgccctcccttcatcaggatcgctccgtcaaagtattccccgatctttgcagctgcctcctgcatatcctcttttgtttggatgcgcactccggaaagcacctccgcctccggcacatttggtgtgatgatatccgccagagggaacaaagtttctttcaatgcgccgatggcatcttcactgagcagccggcttccgctggtagacaccataaccggatccagtacaatgttctttgctccatattccttcagcttttcggcagctgcctggatcagttccttttccgataacattccgatcttaactgcatccgggaaaatatctgtaaatatacagtccatctgctgctccagaaatacttttgaaacattatagattcctgcaactttagtagtgttttgcgcggtcagcgccgctatggctgacattccataaactccatgggccgccatagtctttagatcagcctggattcctgcgccgccgctgcagtcagatccagcaatggttaatacagtcttcatcttcgtttcatctcctctgctttctttcgtaactcctttgtctcctgcctgatatcttcagcgccaaaaatggcagagacaacggcaataccgtccacgtggctgccctgaagctccatcaggttgtcttttttaatccctccgatggcgaccaccggtatggacactgcattacacactctttgaatttcctcaaactccacaaccttggcatccgtctttgtgggggtggcctttacagccccaaggccaagataatccgctccgtcagcctgggcctttaatgcctcttccacgttatgtacggacactccgatgatcttgtccgggcccaggagttttctggcattttggcatgccatgtcatcctgtcccacatgtactccgtcggcgccgcactccaaggcaatctccacctcatcattgacgacaaaaggtacatggtactgctgtgaaagttcagccatctccctggcctcctttaaaaatgcatcacggtctaaattcttttcccgcagctgcagaaacgtgatgcctccgtccagcgcatcttttacctgctccatcaatgtctgttttcccacccatgctgcatccgtcaccgcatacagggtcattgccttagattctactttcaacttttgcgcccctttccagctcttcggccttaagacaactcatttcatcaatgagatgcatcctaagggaagatgtacctctgcattttctttttgcgttctccccacagtatcccatagcacataccgcaacggctgccgcctccagtacatggtccttgttggatcccacaaaccctgcgatgataccgtccagcatacatccggtcccggtgatcctcgccatcatcggatctccgtttcttataatataagccctgctctcatccgtgacaatgtcgatggctccagtgatggcaatcaccgcaccggtccgcacagaaagatcctgtgccatccggatcatttcccctatattctcctctgtcaccgcatcggctacattggcatccactcccatggtggctccgcttcctgcatacactgtcttgatctcagaaacattcccccgtatgacagaaaatttcacttcgtcaagaagcctctttgccgtctcagttcttaaacttgacgcaccggcgcccaccggatcaaagatcaccggatgccccagcagattggccctttttcctgccagcaccatagcctctatggtcctggcatttaatgttcctatgttgatcaccagcgatgtacagatactcgtgatctcttctacctcactcttgtcatccgccatgatcggtgatgctcctgatgccagaaccatattcgccacatcattgaccgtcacataattggtcatgcaatggacaagggatggattttgttttacattatgtaagattgtccgatacatacaaaacctcctggaaactttaaaaatccctgcgtttctaattataccatacttcagaaacacagggatttctttttgccgatccatctagcggatctttatcttaattttggctttggatctggagccgtcctttgcataggcataaatcgtaacagtctttcccttccctgctttctttgtcttgacaactccttgttttgagacagatgcatacttgctcttgctggatttccatgtgacagactttttctttcccacagtcttgaccttggccttcagcttatatttattgccagctcttaaagtaagtttcttcttatttaactttacaacggtcttcttgaacacggctgaaaccgtagtagctgccgtgacgcggaaagaatgactgctgcctttgatctttttacctgccgctttcatggtagaaggcttaaaacaataatattttgccgccttaggctttaccgtcaccttctgcccaggcagataagatcctctgcccgtgatcgttccatgctttgccttggctgtgactttcacaaggccggagggcacagagtaggaatacacagggctgctgtcctcaaactcatcatcgtctccgtcatcttgtgccttggactgaactgtctttttccccttgcccagatgcttgagatcaaagtcatactgctgggcaagcggcattaaaagaaatcttgaacctgctgtggtcccgattatctcctcgtcaaaggatgcggtgtaatccatagcctcaaaccgatctttggaaatggaataacggaatacattgccgtaaccgtccgtgtccagtcctacataagcaattccatccttacataccccgacacaggcagagaacgtttcctcatttatattcctcggcgtcagagaagccgacttttttatccaccggttagttctgtcgctgtagacaaggttcttaggaatctgccctttctttccgatgctgcctaaagtgaggagcagctggctgccagactggactgcagcactctcgcagcggccttccgggagtgacgcagctttcgaccactgctttttctctgtatcatagcggtatacactcttctccagagattgattctttttattctgtccgccgatcacatagatcctgccgttataagccgccagggaggaaccctggaccttagagcctcctgcttttgacagataagagtcaactctcgaccacttcttggtcttaaaggagtagcacaccagggaccgtttcacttcatacccaagctctgcctccacaatggcatagacagcttggtcacagtaaacaggcgcggaatccagatcgaactttgcccggtccagttctcccttttgtatgcctgagaatgccttttccatgtccatagaagacattttggaaaactcccgctcttcctcatccattacatagagattcagctccctgtccaagtaataaaacttactaccgtcggaaaagacatctcctccgtctgtgatattttctgtggtaaacacctgtctgggtccgcttttgcctttcacaaaatagaatgacccagcaacggtcttgccctgcctggtcgttatcttcacctctccgacccggtttaccagcttcctgttatccatcacgatccttgtatcactccagctagacactttttctgtattgccgttcaccgacacagtgccgcctgaagctccgaatcccttcccctgaaggaccactcttcctcctgaaacgaaggccttggtgataatcggattgacgtcagccagttttcttccgtccaatacccctctggtgatcaaaggcatgccgttttcagttcttgtcatcccaaggactgtctcccggttggccgcggcattgctgctgttataatacttggatgcattggccaccgccccggccacaagaggcgcagccatggacgtgccgctgtaaaagtcatatttgccgaacgcttcactggatacccctgccttgctcaccgccgcgtcatccagatggattgtgaaatccccgtcacttaaagccatcaaggtgattcccagcgcacgcttttcattctttgtcgagctgcggtctgaatagacaaaatgggtccagtcatctgccttgctgccgatagatatcatagggattccccctgccagcatatttattgcgatatcttccagtgtgagcggatccttgatctgcccctcttcgtccagctgatagtccattacaagaacaaggccggtctcatcctccgcctctgccttactcaccgctttcagcatggtactcaaataagaattcgtatttcctttactgctgtcgtaaggaagaaacaccgtataaatatctccggattttgccccttccacagaaatcttagcagatgttcctttcttatcttttccaaagtaatctctgtccgcagaaaccgtcaccgttcctttgccggtattcccgccaccctctgtcttaacgccagagacattcccatcttcaaatccattgtagaactggcataagctgtttctctctgcgtcactgtaaatcgtgggattaaagcaatcttcatgaacggaagacagaatatcattgcccggcgccgccatatgtacggattctgctccatagttagaataagcggccagctgtccattttcgttggtggctgccactgagatcagataatcgctgtctacgccagccggaattgtcagggtcttgtcattgttctccatttcatttcccgcggcacagacggtaaccgctcctttctttccgaccaggtcgatcacgtacttcatcacttccgcgtactcggtctcatcggtgccccaggagttgttgactgccgccacgttgacgccttccagctgctgtttgtaaatataatagtaggcatcgatcacatttgacagatcaccgccgccgtcttcatcaaagaccttcagtgccatcagcttgatatcactgctctggctgatacctgcaatccccttcccgtttcccgcctgcgctgcgatgatcccggcacagtgggtgccatgtccgttgtcatcggaagggtcgggatcattgttttcaaaatcgtatccgtggcttcctctcaatgtgtgcgacttgttggtccacagacggcccttcagttcttcgtgccctaagtcgatccccgtgtccacaacagccacaactgtttcttttccgccggaactggaggtcttgctgtaaaactggtcatagcccacatccttcccggcagttcccctgttctgtccttgattgctgttggcccactggaaatcataatagggatcactgccactaaggatcttcgtcttataatttggctgtgccgcaatcacctggggattcttgtccaagtccctaagcagctcttccgtctttttgccggaagacactctggcaatggaaaccacaggatccttggactttgaccttgtctttcccttcaagtccgtggaaaaattccatgtcttttttaccttgatacccgaagaaaagggaacggacctgttcttctgccctgacacggttgtccggtacaaaaccagcgcctccccttctacatacccggatttcttcttttctgaaagctgctttttgatgtctgtaacctgatccttatcagaagcagcctttgccgttatcggtgctgccgtagataaaagtgccagggacagcatccatgcagcccaccttttaacctttctcatactctctcctttcctctgttgatctctcattttttaagtatatcacaccacatctttccatttgttacaaatagcttacaattgtttgaccaccactttttaccaatcaagacaaagtgggcaatcccacttcatctccccaatccctcactctttgaggggcttgttcactttgcacgccaaatgcgatttgacgtagtcaaatgatttccttgctcatttgtgtgcatccccgcggagcgtttttgtgtcataggaaattccttcgcaatttcctatgacataaaaaagtttttattttttcatcacacattggcagggaccgaataatataaactgtaaatataatcaaggaggaaataacatgagtgatttagctgctacaggttgcggaacatcatgcaattcaggattcggaggaaacaactgtcttcttcttattctcttattatgctgctgcggaggtgacggtggattcggaggcggagacggctgcggatgcggttgtgactccatcatttggatcatcatcctgctgtgctgctgcggtggtggattcggcggcggaagcggaagcggatgcggatgcggatgctaatctgacatgtcctgataaaaggagggcagcgggtaatttacctgctgctctctttctttttctaaaaaaagcggacaagttcaattcaaatccctaaatcataagcggtttgacaactttgagcgccaaatgcccgcagggcttttttgttccatagggaggaaaggagaacttccctatgaaataaaaaaaagcccggaagactactcccgggcagaaatctatatttacctgatacagcagaacagtgccagaagcacgattaacatatttccgccgtccatgctttgtttactcatcatatcatgtccctgaccggaaacgtttagtttccccttctttctgagacattcctcatccagttcgtagacagtattttcttcttccacaaagatttcactcatatttttcttcacctcctaataatataggatatgagaacgaaacctaaggttgtgacaaaatggatcaaaaacaaacccactgggagcattttttccgcgatgattcgtccaatatgctggaagatgctcttccatatctacctcccaatctaaagaaatccgctgcactttacatcaagtttcatgaacttcagaatatcatggaagattttgacgacgaggatactctctctgcctgcgggctggaccagaacgacgcctctatggaaatgatgctgactgccatgaggatgagagctccgaaggaaaccgccgctcaaattgaccagctgctccagatgatgaaaatggcgaagatgtaccagtcctatcaggattttctgaaagcaaaccccaacgccaatactccgtcaggaaattcatcagctgactccgacatgatggcaaagctaatgccgcttttcatgtcccagtcccagccgggtaagcaggagacatccaatgcacctaacagcgatctgctgaaccaaatcaatcaaattctgaaaaagtgaggtaccccgcatgaatgaacaatggaaaatgaatcccgctgtccagaacatcgatccgaagaaaatagagatcatggaacttctggtcaatcagagccgaggcaaaaatatggaagatattctcccggatctgatggcagcttccagccgtcttgcagaacagggaattgcatttaccaacgaagagaccggcatcatcatcgatgccctgtcagaaaccatgaccgtccaggaacgtcaacggctggaaatggtaagaaacctgatcctataaatgttaaaaatccttccgggcctaaatgtggcagcaattcccggaaggattttttatttcatatcaatcagaaaacttatacccagtagggcatcccgtgtcttatacccttcgggtaggcgtgctttgcacgataaagtatgcattttctacatgattggagtgaggcattctaagagccgaacggaaatcatgtggaaaatgtcatgctttagataaccatagccctcttcttccatcttttcatagggaatgaacctcagggatgcactgttgatgcagtaccggaggcctccgagctccctgggcccgtcatcgaacacatgccccagatggctgctccccacacggcttttaacctctgttcggcgcataaggaaggacctgtcgtcgtgttccgtcactgcatcaggctcaagaggctttgaaaagcttggccatccgcagcctgactcaaacccttgacctcagctctttttcgtcaaagacaggatcatcgttcttaaactccccggcagcgcttaaattaatatggcagtaaccgcctggattcttatccagatagtcctgatgatattcctccgccggataaaagcatgtaagcggcaggacctccgtcacgaccagtgccttatattgtttttgctgtttttctacggccttcatagccagatccctatcgttttcatcaacataataaatcccggagcggtactggctgcccctgtcattgccctgccggtttacgctggtcggatccaccaccttaaaaaagccgtccagcagccgttcagtggaaattcgtgactcatcgtatactgcttttacagcctcagcgtgaccggtgtttgcgttacatacctgttcataagttggatcttttaccgtcccgttggcgtatcccacctgggtatccaaaaggcctggaagctcttttaaaaaagcttccagaccccagaaacagccgcctgccagataaatggtatgtgttttattttcctgttccaatgttttatccatgctgactccttttctttttataatgagtttttctccattgtttccagtcggctctggaaaggcctccttccaacaatgaagaaaaacgatcttaggatggcaccttttgtttttttgaatttatctgtcaacagatattacacctagttttaatgagttgccaatgagacttaatgaatgtgcaacattaaaaaaataaaccaaaaagtaaaatgatgtaagtcaaaaggtgccacttttcgaaagttctttaccactattggaggagcgcatttcaaaagcgcgacggaaatagtggtaaagaactttcttaatgatacgtagcatgcccatctgaaggatataaaatgcggtgtgccctatgagtatagcataactaatccgcggctattcatcataccgaattctttctaccacggattctttctggaattttctgctcatgaccgcggagaggaccatctgcagaagcagcaggatccctgccataaccagaatctcagacagcggcagatgatagtcattcagtccgatcattcctgtctccttgcacttaagaaacagataatatccaatcacatttccaagggtgagtgcaatgaccagagtacctccagtaaaaatgagcccttccatctgaagcattcttctcacctgttttgccgtcataccgatggcctggaaaatccccagttcctttttccttgtgacaatgcttgtaatcagagtgtttgccatattcataaacccgatgagcccgatgacaaacagcagggcgtacagagaatccctgagcaggccgatgctaagctgcacctcctgataagcatcgtcataagatttaatatgataaaattcactggtatccataagctctttcagcttcttttccactgaagcctttttctccggcctgcatgtcacataaatctcgctggtcagatccgttttcgtaccaagcttttcaaatgtctcctccgtcattgcccatgaggcatccatatggccattggcagatccgacaacagttgcggaaaatggaatttttttcgttccatccagtatctccatatgaagcttgccgccgatatgatacccgtagtcttcaaaaaagtgatcccaaagatatacaaccccgttgttattcttcatcgtatcatagtccgcacttccccgctccaattctttctttacaaaagcgtcaaaatccttctttgagagaatctggatgacagaggttccttcaccaccctttttcttcacatttaccaccgcccattttccggtctctactttggtgacaccgtcgatctggcggatctgatccgtcatatttttgtccatcagattttgttgctgcacacggttcagattcttctccgggtacgttttgtcatctaatcctgtatccagagtaatataaaagtctccttttttcacatcctttccggcctcgtatgccggattcatatttcctcccaggttcgcaatgacaatgaacataacacagctgagtcccatggtgaggatggtggtcactgtccgttttttatttctcgccagatttgcctgggtgatcctgataagattgatctgccggcagcctttccggttctgtctctttttccctgtgccctcctggtaccgtacggcttctactggagagaccttggctgccacctgcataggccgtttcatagacagatacactgtgagcaatgccagaacccctgccccgatcaataccggcaggctaaacagcggtgtatttgagatcacttcccccacagtcttgttggtgcctccgatccctgcaattttcacaaagaacagctttgttacgataaatcctatgaacaggcccagaggtatgctgatgcctgacaagatcattccttccctgaagatcatctgcttcatctgtttcctggtcataccgatggcacgcagctttccatattcctgtaccttctgcaccatacccacataaaaaatattatagatcacaacgatgctgaacaggatcacaatggcagccacaaatgccccgacagcaaccgtctgcgtccccggatctgtatcccacatgataaagattttatttaacgaaatattacgttcggggatggatagggctttccctaaatcctggatactttcttccatttcattttctgtcatcttctgatcgttcttcattttaaaacatactgaatatgaccgcttttttacagggaccgtgttctcataaaactttttagacaccaccgcaccgtaagtctgctttaaatcatttatctcattatccggcaggaaaccagagatcttaaaagccttttttataactttgccttttgcgccgatcctgtatggaaccgtgacactgtctcctatctccggttttttaagacccaggtttttaaaaaatgccttttgggccatgatttcgttttcttccacaggaatcctgctatgtccggtcatcttaaggttcgacatagctcttgctttttggtcatagtaggccaggatcccactggcttttcccagatctgccgtggcggcattggccataactcctgctttttcaatttctccccggactatgatctccttcattttttcttcgccgacgttcataaatgccccgtggaaatctccgtagagcgcagaactatttgccttgttggcctttaataaaccattgcagctcagtccgatgatcgtaagcagcgcagttgtcagaataatcgaaattgcgatcaggatactgcgccctctgttctgcctcaggtttttttcggataactttgtgactgtcttcatctacctcaccaccttgccgtcttcgatcaggatgatccggtctgccatctgtgcgatctcctcatcgtgggtgatcattaccagggtctgtccatatttttttgccgtcatcttgagcagggagatcacctcatccccggtcttggaatccagattccctgtgggctcatctgccagaatgatgtctggtttagaagcgatagcccttgcaatggctaccctttgctgctgccctcccgacagggtattcggaaggctctgcttcttctctgtcatttccagtgtctttaggatttcttccacgaactcttcattcagtttccttccatccaaaccaatgggaaggacaacattctcccacacattcagagaagaaatcagattaaaagactgaaaaataaaaccgatctttctgcggcggaaaattgccagttcctcctctttcatacagctgatatccttacccccgatcagcactttcccgcttgtgggatggtccagccctcccagcatatgaagcagcgtactttttcctgaaccgctttttcccacaacggcagcaaactctccctgcctgatctcaagagaggtgtggtcaatcgcccttacctcgttttctccctctccgtaatatttacataaatcttttgtctctaacataatattttcactcatgatcttatacctccttgttatactgacaatgataaccctttactctttcatttggctttcaatcaaaaagaaaaagccttacaaatctgtaagacttaaatgtaagataaagatactgccctgtttgccggcagaaaccgaaaccgttccgccctgggcctccagtatttttctcgtgagatacagtcccactccggatccctccgcttcttttaccctgtcctcgtttcctctgtaaaatctctgaaagatcttggaataattttcccggtcaatcccgatcccttgatcctcaatctcaatacgcagaaagctggtccgttccatcatccgtatttgaatgtccgtgccttcattactgtactttacagcgttttccaatatattggcaatggcctcccttgtccacttcgggtcgtggaaaatctccaggttctctatggaactgctttccttgataacctcaatctggatctgtttttcctgagctttcacatatatggtgctgactgcctgagcgatggtatccatgatcggtttcatttccttttggatcgagatcattcctgtctccattctggaaatgttgatcaaggcttttgtaaggctgtccagcctctttgtctgtcccactgcctgcttaatgaattccttctgttcctctttcgtcaattcctctccttccagcagttccaggcatataccaagacttgccaccggtgtcttcaactgatgggagatatccgtgaccagagactttgtcccttccttttcctcccaaagtttgttctcattgaccataagtttccttcccaaagaatccagccggctcagaagctggctctttgttccctccgcttcctcataggaaacctgatagttccctaagtaaaactgttctgccatggcccggagttcttcaaattcctgctccctctgcgctttcgtctttttcatccagagaaacgctgcccctgccaccgcaccatagactccaagaagcagtgcagccgaccagtgcatgtattgtctcatctcggtgcgcaggctctgctgcactgcctttttatatccgtacttcccaaggatctcccttcccctcgctttcactgtatcctcccctttttcccggagcatatgatacagtgcgtcctgtgtcttctccgtctccaaaaccccggcagcctttaagatctggctctccttttccatcagccttctgttttccctgacacatccaaggccgaagagaaaaaggaagatcgccgctgtaaagatgctgaagaaaatccacctgttcttttctgttatctgtctcaagatcctgtacactccttatcccagagatacccgatgcccctgatatttttaatgtattcaggctttgacggctcctgctcaatcttctccctaagccttctgatattgactgccaccgtgttttcatcgacaaactccccgtccatatcaaaaatctgttccaggatctgtcctttggaaaacacctgccttggatgagtaataaataagagaagcaatttccactcatttttggtcaaatttttctcttcccctgagatcagcaccttcatcccatttttatggacacagactctccctgattcaatcttttcttcccggacctccatacgagcaaataccgcatgaacttttgatatgagcaccgccagactgaacggttttaccacgtagtcgtcagctcccgcttcatatcccatgacaatgtcaatttcctggtccatggctgtcaagaacataaaccgcacgttgctggtcctgcgtatctccctgcagaagtccagcccgctgccgtcctccagtgtaatatcacagatgatcagttcaaattcattttcattccagagttttatgccttcctgtatccctgcgcatgcttctgtctcatacccctccttttctaatttaaaacaaatccctcgtctgagactttcgtcatcttccagcaataaaatccttccgttcatcctgacctccgctttcatatcccattcatttcgtctttaaaaacatactgcagaaaatttttatgcctctgaaacccataatctgaatacagcaaaactcccatgtcagatgcggtcacatggacagctccgcatccataattttttgcctcatccatgaccatatttaataaaactctagcgatcccttttctcctgaactctttctttgtatacatgctggagagaataccaatcttccccgatggattcgcataatacggaggtttctccgtaaacgacattccactggtgtccacgatttccctaccgcacaccccaagccatgaaatgtaccggccgtttcccaggttcttatgataaaatccagtcaaatagggggtgagatcaaagtccgcctgtgccccctcgtcctggagctgctccactctcatctggacgatcgttggtatgtcatgtatgtccatccttcggtatgatattattttttctttctccatagagggtcccccttttctatagatctttcagctttgtcccatcttttgttttccagtctatatttccattggaagtgtgccctaagacaactgccgaagcggccgacggcgcgctgaattcgtaattctttataaaggtcctgtcaacaattgttccatccgtctccagcttatttctcaggttaaaataagtcttccctctggtttccagtgatgggacaatatgatcggaaataacagaatcctttagcacggtaaatccttctgagctgacaaatcctttcgcagaaccgccggatcccttacagtacagataaatcgtatcgtctgttgcctgcggagccggcactaacgctttatagcctaaaatactgatcaaaacttttacattctctatgaattcctccatcacagcggtctgtgattctttcataactgtatttttcctgcatgataatccctcaaatgttgatttaaccgttccacaacattttccgcttctcctatatacggaatcatccccgtcatcgccctgacagaaaagaaaatggacacccgcgccctttacatcctctctgtcacatccaggaacttctgttcttgggattttaatcgattttccatatggcattttatcatctcttcattttcacacatttttatcacccaacattaaaacatcttatataaaaagaaaagaaacattcctgcctgacacaggataatgaaagggatcccataccggaacaccggtttcctcgtcttatgccggaacacctgcattcccgtaaaggctcccagggacccgcctgccactgccagcaggatcaatgtcttttccggtattctccactgattcttttttgccttttgtttatcacttccatacaagaaaaacgctattacattgataaaaagcagatagatcataattgtctgcatagctgtctcctttcccttgatcatttctaaaactaagattcttttttattatagcatatgacgtccagtatttttatctattcatccgtagagatccgtgatatctttatcatactattaaaattcccagcgatattacatactgttcgctgggaatttttatgaaacctcttatataatttttagtaaccttcctgttcaccgttagaatacccttcaagataaccatggaactctatttgattccggtcatttatgatgtttgaggatatttttttctggctgcaaaaactgtaaatctcatcttccgcagtgtaaactctcaagatcgtcaattgatctttcctggctgtttctttttggttttctcctttatattttgttgtccctgctgaatagatgcttcccctcagctcaagaacagtctctgatccatgcactccattcctggttatctctacagatcccagtgcagtatattgttcttcaggtgtataaattttaatcaaagttttcttgctgtcatccagtaccagttcactttcgctatcttgtttcttaatatcataggatctgtctcttgcctggcaatgttctctccagcagtaagcgagtgtaaagataacacacaacatcgataccgatatgacagctgctcctgtaagtatcagttttttcttttgtctcaatagcttcctccttgtcagtatccgatatcagaaatccaccctttgatctctccctgtacctcggaaatattatctctttatatttctatgacattttctttaacctcagaatcctttcatgcatctgcagtatgcttcacactgacgaacagtccttctgtgccgctatcgtaatttctcatagtcttcatccgccatcggctccagccactcatttgaagcctcgtctgccggtacttccacagccagatgggaaaaccagctgtttttcgccgcgccatgccagtgtttgacctccgccggaatggacaccacgtctcccggctgaagcttttgcgcttcttttccccattcctggtaataaccacaccctccggtcaccagaaggatctgtcctcctttgtggtggatatgccagttattcctgcacccaggctcaaaagtcacgttaccgatcccaactccttttgtagtaagcattttaagataactctgtcctgcaaaatactgagcaaaggcatcatttttttctccaacagggaaaaccgcccctgatcccagctgggatttcatcacattggtactctcttcctccttccagacttcttttgcaatgttaaatgccgcccaggcttttggccagccgctgtagaaggccagctgcgttaatgtttcagcaatctcttcttttgaaaggccgttttcctttgctttttccatgtgaaatttcagcgaattgtcaaaaattccactggtcataagcgccgtcactgtaatcaggctccggtcccttggtgacagcttctcttctctggaccatacttccccaaataatatatcatcatttaattctgcaaactgtggcgcaaatttccccaatgcttctctgcctgctgttactttttgcttcttcatattccttacctccacaaaatttgattttgccttatgactgattctctttttcttcttgaatcttaaatctgagataatccaatcgttccagctgcttttcccggaagtgaatctcgtccagggccctccttcttttttcctccagcatctgcattcttttattatccgttgtctcacccgacagtaaaagcttcatataagtttctacttcatccatatcaaatccaatatcatgcagtgtcatgatcagactcaggcgttccaagtcctggtcatcatactgccacactcccatgacatttttcaccgcaccgcataggccccagccctcataattccctcaatatttctaccgggattccataattttcacttgcttccttaatggtcaatcgatcacctcactccttatagaattaaaataaaagtgctcctttctggaacactttttattttaatctgagccgaattttatgtctaatacctatacttaatgatgaggaatgtgttttaagcatttctgttaaaatactctttggcatgatcgagaaacgcagaggtagtctttgaaaagatctggtgctttttccatgccagaacagagcctagctccagctgcggggaaaagggtacaaaacaaagagagtcaaacttactttccaatttaatacagagcaaagccccggcatttttttctgccatgatagcggcattgtagattagattatgcggcgacctcaatctgatcggcatactcaccaaaccagttagatagttcattctgtacaagctcccgtttcgtagacagcagcgggatgccgacaagatcctccgggtggatctcctttttatgagccagcggggagtccttacgtaccagcactccccattgctccttctgggacatacgaatgaacccgtatttcccgatatccaccggctccagcaaaagccccagatcgagaagacctctctctatgcggtctttgatattgtccgcatttccactgtatatttcataatggataagaggatatttatcccggaaagaaacaaggaactccgaaaaacaacccatgctgtggatctctccgcagccgatggcgatgtctccggacagctgccccttgtcagacagctcctgttttgttttttctgcaagggagaccagctcctgggctctgcgctttaacagcatgccctcttctgtcagcatgatcttgtggctgctgcgttcaaataacttcacccccagttcctcttccagctgcatcagctgtctggaaagggtgggctgggtcacatgcagaagattggcagcttttgtgatattttcttctcttgccaccatcaaaaaataagtcaacacacgaagttccatagtgtttcctcccttatttttctcttataagcctgcaggctgcttcaatttctctgtaaagtcagccatggcctcagaaatcttcagctgctgcggacagaccgcctcacatcctctgcacccgatacaggcgtccgggcgtttctcctccggcagagcttccacagccatctgtgtgatgattgttgtgttaaagcggctttcattatatagggaaagcaatgtaggaatatccagcttcttcgggcaatgggaggtacagtaccggcagccagtgcatggaaggatatccagcatactatctgccacttccatcagtgccgtcatttcttgatcatccagaggtttttcttcggcatatgtagccacattttcctccagctgatccatatttgacatgccggataagaccatggtcactccgggaacggtctggagaaaacggaatgcccaggctggaatcccctcatctggacggaggttcttaagtttcttgctgttttcttttgaaagcgcggacagttttcctcccctaagcggctccatgacccagaccggcatctcatattcattgagcagttctaccttcgccttggcatcctgaagcttccagtcaagataattcagctggatctggcagaattccagatgctctccgtaaacatccaaaaagcgctttaacgtgtcatagcggccatggcaggaaaatcctaaatgtttgatccttccggcctttttctgttctaagagatattccatgatgccgtacttttcgtccacatagggatcgatatttttttcataaacgttgggaaacagataaaaatcaaaatgctccaccccgcatttattcagctgctcttcaaaaatgctgtccactttgtccatatttgacaagtcataccctggaaacttggttgccagataatagctttctctcggataggcactcagtaccttacctatcacagtttctgactgtccgtcatgataaccgtaagcggtatcaaagtaattaatcccgtgtttcagggcataatccaccatctgtgccgtctgctccacatcgatctgggtatcccctccaccttttatcagcggcagtctcattgctcccagccccagtgcagaaagtttagttcctttaaaatctttataaatcatacaaatcctccttgacttcatctctaaatcctcgttgtgcttgcttcctactattaagaatactccttgtagttaactccaagtcaagggaaatttgatcattctcataaatttgtttactataacagttttattctttacttacatgcttttcttcaatattttaagcacatcctcctgtgacagaactttatatccaccttccatgatcaaggtcgcttttactaaaccatccatcatgtcttccgttacaccaagtttttttaagttcatgatcaggccaagttctttcatccatgcctccatggcatctaatccttccccagctatttcttcttctgtttttccttgtgtgctgatgtcccacacattttctgcaaaacgtctgaatttggcaagtccatatggcatgatatgccggtaatatggcagagacactgccgcaagtgtcattccatgcgttgcgtctgtataagctcccacagcctggccaagcatatgtaccatccagtctgtagatttgcccatcgccactaatgtatttaatgcccacgttgcagtccacataatgttgcttctggcttcataattttcgggatctttgactgcaattctggaactatggatcaaagatctcatcaaaccttccataatgtaatctgatgtactatcatcctctcctgaaaaatattgttctgtaatatgatttaagatgtcataaaagccagccaccatctggtacttaggcaaagaaaatgtaaaagccggatttaaaattgagaatttagggaataccctgtctccgaaaatatggccgattttcagcttgctgtcatggtttgtgatgacagcaccgccgttcatctccgagcccgtgccaaccatggtaagtacgcagcccacagggatgatctctgtacctgcatctacatcttcaaatttcatataatatttttcccacggatcttctttacagtggacagagacagagactgctttagcataatcacagcaggagccgccgccaaccgccaagatcagatctgcatttccctctctggcaagcttcacaccttcataaagcttctctactgttggattgggcataattccgccatcctcaatgatctctttattgttagcctttaatatttcgactactttgtcataaatcccatttttcttaatggaacctccgccatatacaagctgtacatttttcccgtatttgggaagttcctcattgagataatttaatgaatcctctccaaagtataatttcgtcgggtttgaatatataaaatttcctaacatttcttaactcctccttctgaatcttgtatttttcctgtaaaatatcgtaataaactcatctcaatcatggctgtgcaatattaacaatcttatttccccatccttccagcaccggattattttttaccgctgtcacaaacttctgtgtaggatcaaaatagccaatcttggtatactcacctttgatcgtggcatccttatagaatagaacaatccggttgggatcagaatagtacacctcccctgctttttcggcagtgacagtttctggtgctgacgggatctcatagctgtccgggatgtcataatactgcatgacatcatagtcggccgaatcgtcatcctcatagatcggcagccgccagtccgaagtccccacataccctgcgatagacgcagctgtctcattgttatataaatgcatttcaaatggctcgccatcgtccccgaaacgcacttccagtttggaaggaacactgttctcggacttctctgtatccaaatctttgctgctgctttctatttttgtatctcttacggcactgtctgagcgtctgcacccgtttaaagcaagcccggccatcattgccaatgtcaacacacctgtgattttttttattttctttctcatatctctttcctttctgccttttcttgtggcacataaattgttttattctgtgatcaataccgtcatatctgtctttttaatcttacctgcactaagataagcaaagcctgtaaatagcagtgtcactgcggctgccggaaacaggctgtttccaacagaccacacagacgaaaaattactgatccctgcaaatctcataactgccgatacaaccgggtcagtcactaaggctgcgagcaggactccggccgctgatccgatagccgaagtcaccccaaaccgcagggcaaagttaagccttaagtctcttgacgaaacccccatggatttaaaaattcccatatcctgtttctctgctgccaaaattttgccgctggtcatagccgtcacaatcgaaacaaacaatgcggtcatgccgtacatgaaaaccagcagaactttcatggctgaaataataccccaaagtcccggccatgaattttcatggacatgcacatcgccgccataggcagctgacagtgctttcgtgatctgtggtttcagggacggatcttccagaaaataatgatggcaccacagctgtctgtgatcagttccgatgctcagatacccttccctgctcataccaatgttatttcccatcccattggcacactgataaatgccggagacccgatagtttttactgtccttatctccccggacagtaagggtgtccccaatggaaacacctaaatctgaggcggcagcttccgtcaacacgatctcttgcccgcctgtgcaggtctttccctgcaggatgtgaaatcgttctggttccgtgatcacatttgccgtgtagtttctgccgttcactgaaacatcgggcatagccagctgataactgtctttgatgcccgtaaaagagagtatcgtttccctgactttttccggctcctgtctccccaatgcctgtacaccgatatcatgttctgcggggttaaaagcatccatcattcctttcccgtccggtccaagccatgtgtccatacgtcccaccagagaaacagaaaatgccagcagcactgccaccgaaacaatacccaggtatcttcgccttcctgtataaagctgtctcaaggcaagacgtacttttagtccctctgcgcctatggagaaacggattcccggctgtttccccgaatcctcagtctctccccgtatggccttcatcggtgtgacacggctgatctttctcaatttaaaagcggctgatcctgctaaaagcagcaaaattaccagaaaacaaaaaatgcagaacctcaccggcaatgtggctggaatcagaactcctgaggcagtgaccgtcatgccgcccacccttttgctcaaaggtatggcagcaagaagccccgcccccatcccgggaacgatcacagtaaggtactggatcagctgtatccatcgaagcctttttccagtcacacccatagtttttaaaattcccatattcacgtattcctgctcgatcaccgctgaaatgctgtgtcccataatcaatgctgctgcacacaaaagcacagctgcaaaagcagcaaacagtccgcagaaggcattgtgaaggatgagcataaagcctgccacagcgtctttgctgtagataaactctgtgtatttcggaagttctgtctccttgttcagaatctggtttaagcctgaaactgacaacttactgccctgttttttctgaatatgcagcatggctccgtcacgagccagtgcattcatacctgcatcccttatcaagccatggatcatgctataatcttcctgtgagaccagaaaacctttcatgccaatcatcgagcttcccatataaggatcctcataataaccgctgacagtcagacttatttttttgccgtttctggcgatcggaaaggtaatcttatcaccaatctgtacttccatcacagataccatggacggggacacataaacctgacctggtttgatccgatctggaggatctctgtagccggacaaatctccgtcaaaaaatcgataccggttctctgaccgattccagcgaatcagctgtccgtcgctgtcagactgttctttcgctgcttcatattttgaaaaaatcagttcctgagtccttacctgttctacctcattaagactctctatgctgcttttcagttctttgatctccggtacctttgaaacccatgccgttaaatctccgaagccggtccggtccatttccgttcgtacataatgtcccgcgttggtccacactgccgctgcggtagaaagcgctgcggatatcataaagaccagaataaaaatcccggccagacttccgcggtgccggtgcatgccggcttttataagaattcgattttccatctgcatccctcctaccactgcagggcggagagccatccgctgacctttatttcccggtttctggcctcttcctccctgtagggaggcagaagaagttcatccaggaccatcccgtcctccagatataacagcctggttcccctcatagcagcgaaaacatcatgggttaccatcaggatgctctgtccgttttcattcagttcccacaaaagttttaataccttctctgtattctcacggttgagcgctcctgtgggctcatcggcaaagatcatccccggatcatggatcaccgccctggctatagccgccctctgagcctctcctccggaaacctgggaaggcagtctgtccctggcatctccaacctgcatctttccaagcagctgttctgctttagaccggacatcatccggatctttgggctggttcagtaagcctttcacaagcacattttcatataaggtcaggctgcttaccaaatgggtctgttgaaacacaaaaccaaattcccggcttctcaatgccgccatctgcttttcactgctgccactgatttcctgctgcctgtaaaacacctgcccgtcggttatgccgtccatgccgcttaaagcatacaaaagcgttgatttccctgcaccggaggggcccatgataactgtaaaatcgccttcatagatgtcaatgtccactccgttcagcacttggacttttgtgtctccttccctaaaaactctgcatacatttctgcctgacaacatcgcgtttttcatcctgccctccttttctccagggtctccataagccgtttcttaccagtctgcgggtccggcaggatttcctccacaaaacggacatagaacttcacctgatccagatgcttctctctgaggatttccttcataagcctcatgatttcctgccggatccagtcctgtctgccttcttcgggtacttctgccaatatctcaaaggaattctctccgaatttccggaactgatagtccagaagtccctcaatacaaaagccctccacggccagtggatggagaaattctctgcctccctgctggtcctcaaaccacatcagatcctcgtttctccccagaaggctttctgccctggaaaatggatatctctcctgtcctgaatctgatttcagctgcagctgatcggaaatccggtagcggatcagcggttgtacaaagttatagagagatgtgagatagatgcatccatcttccacttcgatataattcagatcgtcaaacagaaacattccctcctggctgcgcagctcaactcccagcgccagtgattcactggccccgtaaacattgaccacttcagtatcaaaaacagtctccagataatggcgcagtccggttcccagcggctccccgcagcagatcacccggcatagatccatttggatctcgcctttttccttcaactcgccaaggatttttaccgcagatggatatccgatcactatatttggctgaaactggttgattttctcactccattcactcatcggttccttaatatcaagaaacagctgatctgcgcccactccgctgattccgtctcctgccgccatggcaccaccgtagcgtccgtctgtagcggcaatatagacgattcttggcccccgaagcagcagttttataatctggggcatggtcatatcccacagagccgccctgatgatcccaagcagcatctggctccaggccttctcatcgtatacgaaatatcctggtttccctgtacttcccgaagaatgcactacgtgaaatcgatccttatatttgttctttccggccggggcttcctgatcgaatctttgaagttcctctgctgacagttcaggattcgtgaccagttcatcaaaattttccataaaagccgctttatccatagcaggaaaagcagacagcggcattcttccgaaattttcttttgttatgcctgccgctttaaatgtcctgcggtaatactcggaatgttctaatgcataaccaagcatggtccttaacttcttttcctgcaatttaccaagttccttttttgattttttcgtatttctcttcagcatgtataagttccacaataaacggatgtatttcattgcaaagtctcctttcctcatttcattcgttatttcacataaatccgatagctgttatcataatcttccctgtgataatagcggacctctttgcttttttgattaaatacaatgctccattccgtagattcaaattccccgaaattctttttgctcacgctttccagagcatcccggacatgttccatatccatggccggagttttagaaagctgttttgtcagaatatcataccgtgtgtgggactgctctgtgccgatcccttttttctctccttctgccaggtaaaaatttgtaaccacaggagtatctgtcactgtcatctgagcgttgacatattctgctgcaacacttcgcccggaggaatccgctattgcaaagtggatcatcatcccttttgatgcatgaagatcatattgatcaagaagttccaaagcctctttcacgtcagccgccttgttcagcagcagacggaccgcagtcgttgtagtgatgtccggtttctccgtattttgctcaatgctgtctgaatcctgtatcatattcactgacacacaaagccctttttcattcatcccatccaggggtgcatagagagccgccatggcctgtatcctggaaggcagcctggaaacagaaaaacctgatcctgcattgataaagtccatattgactgtagatacagaagcgtatccggtgtcaggttttgagaccgtgatcatggcctcacagctttcccagtcaaagtttcttccaaacagtgcctcattttttggactctttacagatatagtgctacatccatatacgtttttcctgaaacccagtcctgtgggtccgatgcccagatgcccggttataaatttaatcacctctgagtctgaggatgcacctccctgtctcaggtaatcctcaaacccgtagtcaccatcatacctgacagccgacagacccttttccagcttcacaatcttatgccccgggtcgacctccttcgtgcttcctcccttcgtatttcttacctgtttgatgctgtcatctttttctgtacggccgcattttgtaatgaccagtactgctgcagccaatagagctgccaataaaatcatgactgttgtttttgtttttttcaattctgccattctcctatcctgattccacttttatagtttcttctttcctgccccaccctttggtaaaattatatctatctggcgcttcgatatcaaatacctatagaaaatacataatcatgcttcttaagcattgtttagaaaagtagaagtagaagtcatgaaatcgccgctgcggccccatgacttctacttctacaaattgtaactgcaacacctgatgttacgtttcgttttttaattgactctattcagtgacagatcttccaaacatcttaaattcctccagatgatcctcagccttataattctcttcattcactgtcatcactccaagatcttctgtcttatagtactccacgacagaaagctggtattgccgtactgccggtccgtacacatccggggacccagagcttaaaagcaaggctgtttttcgtaccttcttcggaaccttcagcgcataagtccggtggagtgccgcctgaagctgggccgaaaatgaatagtagtagattggagatgccaatacaagcatttctgcatgttcaagagctttgtagacttctttctcgtcatccttctggatacactgaccatttccttttgtatggcagtattcacagcccagacatcctgcaattttttttcttcccacctttattatctcaacagaatgacctgcttcctctgctccctccgcaaatgcttctacgatggctgatgtgcttccatttggccgcggactgccgtttaagattaaaattttcatgtttccctccttaatgaaatgcctgtttccacagcttttccctctttcccggaacaagaaaccttatcatataaagcaccgccttggttatattgtctgcgatcatacaataccatacggcaccaagacccagctgccagacctttacgcataaaaggctcagcaggatccgtattccccacatacttccggtttccacaaaaaaagcatacccggtctttccaaggccattgtaaatcccctgcatgatgatcataagaccgaaaaagggttctgacactgcaacgatcctgagcatctgtgctccaagcgacaccacctgtggactgggggtaaagatccccatcagtgcatctgacacaaaatacagaactgccccggcggcacacatgagaatcatagtcaggcacacagcctgtttccacaacacgtcaaacttctccctgctgcgttctcctatggagtatcctaccattgcagacaccgcagtactcataccgtatcctggaatataaaaaatagtctccgccgtcaccgctatagaatgcgccgcaaatacagaagtacccataccggataccagccccgtaaacataatctgtcccaggcaggatgcagtgtttgtcatcatgacaggaatgctgatcctaaaacatcttcttaagacagccatatccgggatccgcttttctttcctccaggaaaatacagactttttcttgaatatataaaacatgctgattccgccgaatgtataggaaactgcagacgctgccgccgcccccaatacccccagtccctctgtgtatatcaaccagtagtttaagacaatattgatcccgttgacaaacacattgaccaccatcggggtctttgtgtcacctgatgcacggacagccgctccaaagatcacacttcctgcccggaagatcatgggaatgctggtgatggtaaaataaagggccgcatcctcccgcactccgggtgctgctcccatccagacaggaatatagggacttaacagaactgcccctgtaccttctatggctccaaggatcaaaaccagccagacagtgagcactgccagctttcctgttaattttttatttttttcacctactgccctggcagtcattgcaaggattcccacaccaaaggctgacatcagactgtgaatcagccagttaattgtggttgtgacactgactgctgcggttgcctgttctcccaaatgtccaaccatagctgtatccacatactggacgactgtttccaacacctgttctatgatggtgggaatggacaggtgaatcattgtacgcaaaacggatatcctctgcttgttctgcccggttctcacagtacggtccttacaaatattgccgtgccaaacaataccaggacagcaccgaagcaccgatggactttttgaatcatttgttctcctatcttagcttttaacctgactacccctgcggcgagcatcccccaccaaaaaaaggttcccatgaatactcccgctgccagctgaattccccttgccgcctctaccttgcctgaaattccgaaatatgaaaatacaaacagaaatgacaagatagaggccggattggtgatggccaccgcaaaagaggaaagaaacatggcagcacctgcttttgcgtctgcctttacactgcctgtctctgcttttttcctgatgattccaactcccataaaaaggattaagatgcctcccaaaatatggatcacctcttggttttgaagcagacaatcagacagaaaagacagcccaaaaacccctatacaggcataaatacagtctgccactgatgaacccatgccggacagaatcccggctcccggcccaaacttcagaatccgctgaacggtcagggcaccaacagcacccacgggcattccaaacagaagcccgacagccaatcctttcaagaaaaaattttcccacatattgactccttccttttcatcattcttccataactactttctctgtcagactagtctctatacttgacaggcataaattgacttactatactcagactatacatgaaacaaattgggaggtaactattatggaattacgtgtactgcggtattttctcgctgttgccagagagcagagcatttccggcgccgctgagtctcttcatatcacacagccgactctgtccagacagctgatggagctggaagaagaacttggcaaacggcttttcatccggggcagccggaagatcaccctgacggaagacgggattcttttccgcaaaagagctactgaaatccttgaccttgtagagaaaacagaggccgaacttcacgcccctgatgacatcatcaccggggacatctacatcggaggtggtgagacagatgccatgcgcctgattgcccggatcgcatccgacctgcgaaaaaaacaccctgggatccgttatcacctgtacagcggcaatggggacaatgtcacggagcgtctggacaaaggactcctggattttggagtgcttattgaatacggtgacttaaaaaaatataatcacatccatctccctgttgaagacacctgggggcttctcatgccaaaagactgtcctttggccaaaaatgatgtcatcactcctgaggatttatcagacgttcctctgatcacctccagccagtccatcggaaatgattttttagcctggctgggaaaagagattaatactctgaacattgtcagtacctacaatctgatctacaacgcttctctcatggtggacgagggatttggttatgctctctgcctggataaactgctcaacacctccggtgacagccgtctgtgcttccgccccctttctccaagatatgaggctaaattagaccttgtatggaaaaaatatcaggtattctcaaaggccgctgaaaaatttctggaactggctaagaaagaattttcagcgggaaagctctaaatctcacagtccggcatctgccagcctcctttgtccaagtaccctgaacatgatggctgcgaatgccagcagaaggaataaaatccctccaatcatcagataaggagtccccatgccggacaagaaaaatccgcagactgtcgtagccgctgtggtaccgagattggtggctgccagaaacagaccattggcaaaatccggcgcttttggcgctgctgttgtcatccaatactgattaatatttgccgccgcccctgcaagaacaccccacacaaaggtcagcacagccataataaaacttaaataccccaggaaaaataacactatatagaccgctgccaaaagaaacggaaatgtggtgatgaatcccatgggcctgctgctgagcagccggcctgcaagaatatttcctatgatgtttgacaatccatacaccagcagcagaatactgatccactcagcagaaagtcctgtcactttttccatatattcagaaaggtaactgtacacaccaaacacagaaccgtttaacagcacaacccccgcgatggaaatccaaactgaaggctcttttaaaacctttacctgcgaaccataggacattttctcttttaccggaagatccggcacaaagaatatcgtggccagcaaaacaaacccattgaccgcagcaaaaaataacatgccgatccgcagggaggtcagtcctgtaatatagctgaccacaggtactcctaacaccatgcctgctgatactcccatcatgactttagcaactgccttgggagcctccttcttttcaacagatccgcccgccacagaaagtgccatagatacataaataggatgaaaaaatgcgggcagcacccgggccgccaggaccaccgggaagtgctgggcaaatgcagagattacattgcacacagtaaatacccccagcacaaggatcataaccctttttcggttaaacccggaaaacagaagcggcatcgtgggacctgaaaccgccacggccagggcaaacatgctcaccaaaagccctgctgtggagatactcacctggtacctttccgcgatcatgggcagaatgcccacaacgcccatttctgtattgatgatactgaacactcccaccgtcagtataaaaatcatttttttattcatgagtttttccctccgtttaacattgggatgccatccattgttcatagacaggaatcgtttctttcagcctcaataaaccgtcttctaatactgtgcgtggacatgccaggttcatgcgcagaaacccttctccgtttctgtattcattgccgtctgacacataaagtccactgtgtttcctcagaaaacggctgaattccacagaacttccgatcacatctttacactccatccacagcagatatgtggcatgggcaggcacaggcattatggatggaatttctcttcctatatattcttctgcataggttctgttttcccacagatagcttcgcagttcctcaagccaggcttccccgtgagtaaacgccgacacagcagcatctgcggcgaacacattgggctctgcgacttcatctgtatttaaccccctgctcactttatgacgcagatatgggtccggcactgccactgccgcagtctggagtcctgccaggttaaatgccttggtaggggccagacaggtgatgctgttttccctgcattctctggatacagaggcaaacggcacatagtcataacccggttctgtgagatcacagtggatttcatcagaaattacgatcacatgatgtttgacacacagttctccgatgtttctcagtgtttctctgtcccatatctttcctaccggattatgcgggttacataaaagcatcatagaggtctgaggatctgaaagtttctcttccaggtcctcaaaattaatctcatatccgctgccgtcatatcttagtctgctctccagcacatttcttccgttattcataatcgagttgaaaaagatattataaacaggcgtcaataccaaaatattctcacctgccgtggtcagtttgcgcaccatactggatatggccgggactactccagtacaaaatatgagccattctttttccatggtaaatccatgacggcgttcccaccagcggatgtaagcttcataccaatcttccggcaccacagaatacccatagatgcccagatttgttttccttctcattgcctccatgatttccggtgcagttttaaaatccatatctgccacccacatggggagttctctctcaggcacatcccacttcatggaccctgtgcctcttctgttgatcactttattaaaatcatacggcatctttcatttcctcctgaagaatgatgtttgtctctttcggatccactttgtcctcttccatgatcagctctttaatatggccggcctgaatcaccccgccggatgggttgaacacactgtcaatggttccgttgatctgagcttccactgtggaatattcaaaagccagtgtggtatttaacagtttgcagttttccataaccagatggtcgatataacacattccctgcagactttccactgtacagttgaccagagtcagattttttgcgttccatcccaggtattcaccggaaataaaggagtcatatacggtcacattttcactgttccaaaacgcatcctttgacaacatcttcgcatggtgaatctccacatttttagctccgtcaaaggagtaattaccaaccaaagtaaagtcagacagcaccatatccctgctgttcatggcaaagtaatctccttttgccgaaacatgctccatggtaatatcctcacagttccaaagggtctcttgtgcatttggcatcgttacatattttaaggtgattcctttcgccctgcggaagtttttcggcgcttcaattgtagtatcctccatagaaatattttctgtataccagatgcccgcccttcccatttcaaaaatagtacagtccttcatcctgatatttttgctgtaccagagaggatatttccatttaaacatactgccgtacaattcaatgttcctgctttcctttaacggggactccccgtctgcaaatacagtatcataaatctctaaatcattttctttaaaaagtgccctctcgcctgttaaaaactgctgtgtaatctgtttcattctaaactctcctttttccctgatttctaattttcttccagccggaatgtcaccgttatacttccctgaccaagggcggaagccattccttctggatcctctatatatcctaattttgtataagcgtaggttgtcttaaaatccatataaaataacaccagacagtcggacccatataacatgaaatcaccggtacggatctccttcactttctgtgaatcttccggaagtttttcatctaagtactgatatttctcatttccatttagttcctccatggaaattgtcatgggaagcatttttttgaaggacctcacagattgattgtcgtataagactgcccggaatattctttttccaatctcaatgttcaaaactgtctcctccttcttctttcgcccgttctctgtattggaagacttctctttgttttctgatggccgtctttcatccgcctgcttttgacatgctgtgacagatgccgtcagcagcaaagccagcgccgcacagacgatacttttcttcataggaagttcctccatcccctttctatctctttcttaattgatacatcagatagtcaagacaatcgatctgccgctgctttgtatgcatcatgtcaagtaatatttttctgtgccccgataatacctgaatctgttccttcctatcatccttgttccattcttccataaaacggtcgatcatttcctccgcgcatccggcatccttcagattctgtaccaaggaatcatagtcctgatcctctgccacctcatcacctcctacgatcgtttttctccattatctccagtcggctctggaaaggcatccttccgacaataggaaaaaagtatcgtaggagtcgccttttgttttgcaacagcacgctctcccgaaggggataagaaacaatgtgccctgtagctttactatacaactgcgttctatcaatatcaaatacctatattaaatagaaattaatgcctttaaagcatgttttttagggtggattcctttcgcttttgtattccatagggagtttcggagaactgtcttatggaaggaacaaagtgggcaagcccacttcatctccccaacccctcactctttgaggggcttggcaactttgcgcgccaaatgcgatttgacgtagtcaaatagtttcctcacgcatttgtgtgcatagtacccgcagggcttttttgttccatagggaggttcgcagaactttcctatggaacaaaaaaactctgcactatgcagagtttaaaaaaggaagttatttttttattcagatcgttgtttcttcaacaggaaaagacataggattactgcggttataaagatcagcagaagcggaaagatgattgaaatgtcaaactttggaccagaaagcagctggtatccccaggctgctggaaatagttttcccagtttattcaaaattccagggagcagttttgctggaaacataattccggacagcatgatggatggcaaaaatatcagctgggaaatcatcgttagctttgcctggttttttacagatagccccaagacaccggcaacacttaaggatacagcaataaatgctgtcagtgttgtaaaatacaacggcaggtcagacggtattttcgcatcgaaggcaatcggagcggtgataaggatgatagcactcatgatcagcagatggacaaaagctgagaaggccagtgagacaagtccaaaatacatcggtactccgtttgcccgatacattttctttatatctgtgccgtaaatctcggacagtgaaggcggcatcccgatcaacgcacccatagatacccccatgaccgtcatagattgtatcaatgtatccttcgcttccggcattaaggacgtaaagattcctcccatgaccgcaaagaacaatagagggacaacatagcaggtaatcagcaatgccctgctgcggatatccaatttccactgcaggaccattccatacagaaacgccttcatagtttattccccctttgcgatattgataaaatgctcttccagagttcccctgtcaatcttaatatcaagaaccgtaagatttctcttcttatagccttccaacaggtccagcatagcttcaccgatgttctctgcagcatagtcttcttcaccggctttggttatgatcttaatgttatatcgtcttccgatgcttgcagtcagttcatctacggtgccaagaaatgcgagatttcccttgttaagaatggcaatgcggtcacacaaggcttccacctcagccatgtcatgactggccagcaggatcgtttttccttgttcttttaacagtcggatctgtgcatgcagagagatccttccctccacatcaagccctgctgtgggctcatcaaggaaaacaagatccggattgcccaccagggcaagtgccagatgcagacgtctcttttggcccatggatagttccctgtattgctttttctccagttcatggataccgagagccgcaagtatggacggatcagccgctgttccattccagtttgcaaacagcaaaaccgcctcctggggctttatataggcagggagagaggatgactgtaactgaattcccatttttccgtttaccgtgatccggccgctgtcatattttcttaaaccctcaatgcattcaaatgctgttgtttttcccgctccatttattccgagaagaccaaaaatctccccctcttcaatcctaagattaagcccctttaataccaggtgctccccgtagctttttctcagattttcaatctgtatggcacagcccatattcattcctccccaaatggatcaatccctgatcttgaaaaatagatagataatgcaggttccagataggtactgatctccgcctgtctctgcccccagcctttctcaatatccccttggcctgcaaattccataaggctgggcagcatgctcatatccccgtctgtaaaatccaaaaccagattccaaaacttttctgctagtatctgtgctttgggggcttgtggagggacaccattttcttttagttccatggcttcatcgttcagctgttgaaaccggttcataaaagccataccgccttcgatgtcaaaacgagttctgatatggtccagcatcttattgtcaaaatgtttgataagccaatagtactcatttcccatttgcagattgatgatgatatccgcatactttttaaaatctacggactgcatgctcagcacttccgattttaatgcttctattgcctttaacgattctgtaaggctttgaattttctctttcacggcgtcagcctgatgggtcagagcatcggcgacatcctccggtgtctcaagcgacaccagcttatttttaatgtcctttaatgaaaatccaagggactttaaagacaggatctgatgtagcctgatcatatccctataggtataaagccttcggcccccgctgctttcagcagaaggtgagaaaataccttctctgtcgtaatactgtaatgtgcggaccgtcgttcccatttttctagcaagttcgcctacggtcatataattctctggaattgctctttctctcttcattgatccccctcctgcctaccattatacttcgttacgctgcgtcacaagcaagaccttaaatagaacaaagtggtcaagcccaactcatctcccctgaactgatccccaaaagttagacctatgatatgtaccccctttactggacaaaaccagtgaagggggtacatatcattgtgtgcatactgcccacagggcttttttattccatagggaggttcgaagaactttcctatggaatgaaaaaagccttgctggggccgccgcataacggctcctttcacaaggctcttcctgttttgtttcattctttttaaaccttcagctgaaattctacggctgcatagggggtcctatcttcatcacataactcggtaatgatcttttcctctgcggtccatgtccttgggatcatcacatctcccagctttgctgaattcttatactccaccctgacctgctttatttttgtataaaggggcagagcgttccatgcctgtctgacatactggctgttattcacatgatgattgctgtcaatccatgatttcggaaccgtcaggggttccttttccttccattccttcggaagtttgatctttctcggctcatattccatcaaaagagcaggttccggctgatacaccgcaacttcctccggtgttgctttcacaggtcttcccatttccagatccatatacacccagtaggaatttgcataggcaagcatttctccctgttcatccttcatcgtaaaatttctcagtccaaaaagccgttcaaagcctgacgcccaggtgctggtcctcaccagttccccctccagaggatgtctttcgatgacaacctgccaagagttcagcatccaagcccgatttttggatgccagatactccactcccacacccagatcctctgactggaatacactgcagtcctgaaaataatcaataatgcccggtaccggaagctttccctctgcgtctacttcactgtatcttattctgctctcaaatgtatacatatctactcctttagaatcaataatctgtccctgcataggagatattggtcaaaaaacctataccctctggggcatcccatgttttgacagaagtccttctccagcagacattacgtccattttctacatgattggagtgagacattctaagagccgaacggagatcatgtggaaaatgtcattacattttcaccagttctccgccttgctgtctcagggacgtaatgtctgctggagcaggctgctacaagacaaaaggctccacctctaagagtttttcttcattgttggaaggaggcctttccagagccgactggaaataatggagaaaaactcatacctgtgctctggtagaattgtaacataagttagagtttttcagcaatgtctctatccttcttccactgcgatccagacctctacatgcccgtcctttccatagtattcaatatccggtgccccagatttcatccttccggttatataacctttattcaacggcttgtaattggattttggaagccattttgtaattgcctgggcctctgtttttcctatcgtttccattatacacggaaatacagcccacgtcacagcaggcatagtaaattctacaagttcctcctgcacttcacagccgctggaaacccctatcaggtattcaaattttctggagtccgctggattggtgttgtagatattgataccaaatagtccacggtgttcctcatctgccagttttaacagcggttcttcaaggtgctccttcttgatcctggcccaatgcataggaactgcctttcttgcctctctttttttgttcgttgtctgaattgcgtagcccacaacacgaaaactgtcctttttcatgatacggaaaggtaaatccatttttatgtcctccttgtttcctctcttttttccctgtctcattataatccatcctgctgaatgaatcctctcttttcaggtactgttcggatagccaggtctataaaaaggaacaggatgcccgcaggctgtgtgcagtcagtgttttggcgctcttaaccatatccgcaggggtcccggcaaagactacttcgccgccgttttttcctccatcgggtccgatatcgatgatccagtccgcctgcttcatcacgtcaagattatgctcgatcactatcagggtattccctcgggacacaagcatgtcaaacagctttagcaggttttcgatatctgacatgtgcagtcctgtggttggctcatccataatgataatgcttcccttttttcccaaattcttagccagcttgatcctctggcgttcaccgccggacaatgagctgagcggctgccccaaagtcagataggataatcccacctgctgcatcattctaagccgcttcgtgatccttgcatcttcaaacacttccaaagcctgtgatgcagtcaatcccagaagctccactatattcttccctttgtaggcgcaggcaagcgcttcctcattataccgtactccgccgcaggcttcacactctgtgatgatcggatccataaaagccaactctgttacgatgacaccctttccgccgcacaccggacaagctcctgtggagttaaagctgaacaggctgaccggtttcccattctcctccgccagcagtttcctgaccgcatcaaaaaagcccagataggaagctggcgtggaacggctggttgccgtgatgggcccttggtcaatcattacaacatcgttctcatattggtttgcaaataccttggagatcagggtactctttcccgaaccggccactccggtcacaaccgtcatgatccccagaggaatgtccacatctacattctttagattataaaggtttgctcctcgaaccggcagacttcccgacggccggcgcagttcctgttttaccggaagagactgaagcattgcctttcccgttaatgtaccggacttttgcagatcaccataacagcctgcaaaaacaatttccccgccgtcctgtcctgcctgaggtccaacgtcgatcacataatctgcaatcgagatcacatccttgtcatgttctaccacaaggaccgtattgcccttatcccgaagctgctttaacagattgttcatacggtagacatctcttggatgcatccctgcgctgggttcgtcaaaaatataggtcatcccggtcagactgctgcccatgtatcggaccagtttcagcctctgcgcctccccgccggacaacgacggtgtttcacggtttaaatgaagatatggcagaccgatctctatcatcctgtccagcccctctattaatgtctggaccagtacccccacggtctgatctgtaatctgtgataaaacttccctcaactgagtcaattccatctcgcaaagatctgcgatggaatacccattgattttgcagctcagggcttcctcattcaacctttttccgtggcactccgtacattccatttccgtgaccagatcctgtgacttcttttgtgtatgcttacttttgctgctgaggtcgcggtttaacagagttttcgtatatttatgaaagataccagttacttttggattctccggttctccctttccgttccgtgaaccatacagaaggagattgtactcttcactggagtaatccttgacaggcttgtcaaggtcgaacagcccagactcggcatactgtctccaataccaggaaccgcggcggtaaagggaatctttgatgcatccctcattccatgatttatcgggatcgatcacggcttctatatcaatttgggagaccttcccgaggccggaacaagttttgcacattccattgggatcattaaaagaaaaataagaggccgttcccacataaggttttcctattcttgaaaacagaatccgcaggctggagtacagtccgcttatagtccccactgtcgagcgggcgtttcctcccagaggagattggtccaccaccactgacgctgtcaagttgtcgatccgttccaccaccggctttggatactttggcagtcttgagcgcacaaacgccggataagtggcattcatctgccgctgtgactctgcggcgatggtatcaaaaactatgctggattttcctgagccggacacacccgtaaacacggtgatcttctcctttggaatcctgaatgaaacatgtttcagattattttgagtaagtccctgcactataatatctgtcatttgtcaatacctcttttcgtttttagatgtctcctatgtctagtataccgaaagagtacaaacagtgcatgatattttttgcggtgttacgtcactttttcatatcccggaatcctatcaaaacggtccagacataggcacatgtttttggaatcatcagcatacctgctgccggaaatctgtctgccagcagaacaacagggatatagaaggcaaaactcagggtaatggtaagccacatccactgaaacggcctgtctttgccattccgtgtcttctggtaaaacaggataatgatcaaaagccccaaggctgcaaaaggaaggttcctataaataccccagacaagcggcggttttgcgctggtccatccattttgcggaaacaggcataaaacgatccttgccacagccaggatatatacaaccgctgtcagcccggctctccccttttcccggtatctcatctgccatatgtgatacagcaaaacataaaatatcgtcattgttatggaagtaaccaactttccgattcccagggcttgtgtatagtgatcaagtcccgtagtgcacagagccaccgcccggggcacaagatgaaaggagtcccctgctcccagaactacagccataattccaaacagccaatgctgcctgctgcctctgctctttgcgatcatcataattcccactgaaatcaccgttgtcagatatacaatatcaaaaatggtttccataattgcctgcatagtcattctcctttcctattcaagctccgctgctgcattcacagcgttgccgcgcaccttcagataatttaaaagaaaagctgctcctgccagaaacaacgccgtccccagacctgtgtaaaatacagcaatccatgattctggccagattcccgataatctgatccctatgccggcggtcatcataaatcccatgatacagaaagattttacatcaaaaaactttaagataaactgtttctcttcattatattccatgatcctggccgtatgcttcctgacaagcttaccaaacaccataacctgaaataccgcaaatactgccaaagagcccagcccgtttaacacagaccaatgcccgccgtaggccataaggccgattctcaggatattaaatcccgcaattccccacacaattcctgctgcaaaaagcagctgttttttctgtactttcattgtttctccttttctgtccaacttcaacttgaacttcgttcaattttattattaaaagatcctgccctacatttcacaggacaggggttgatcatagttcatagagcacacgctttatcagttctagaagaggccggcagtccccccgctcttccagaagggaagatgtcacattaaaaaataccatatctacaaagctttccggtgtcagtatctcattaaagactcccggcttcacgttctgatcacattccagtacatgcaggaggccactcttcatatggtcaaagtaatgttccatcatcttttgaccctgttctctgttccctgccgcaaaactcatggaatgcagcgtaaaaaaacctgggtatttcctggagccttctctgatccgctcaaacaaccaggcgacacagtctgcaaaaccagaaaactccacggaccgttcgggcatatgaaatatttctttccacacttcttctactgttgctgtcaaaagctctgactttgacggaaaataattataaacggagccgacagccacaccgcatacagatgccacagaccgcatattcactgccggaagccccttctccatcaccagcttccggctggctgccagaatggcttcttttgaggtcactgttttattcaaagaattccccctttcatactgaacatcgttcagtatagatcaaacagaaagaagtgtcaacctatttcccttcccctgctttgcgcagaatatactgttcatattttgtcctgaaataccatccggtgcataacatggccagaccgaccaaaaatgctatggtccttctgggagagtccggagaaaaaataatagacaccaaaatcccagttccgccgccctccaaaaaatcaataaatctccttttcttccagatcaccttctctctctttaaagaatcgatcacgttgtcatccgccttctgccggaattcggtgttattgagccgttgtccgctcagaagttcattgagggttttgtattccccacagacagcgaatgacactagctttcgtatacagcagctatatcatggattctccgcttcatttccgcgcggatatgtaacggctctaaacactcgcatttattcccaaaacccaaaagtatatcgtagtggtattcattctctatgaaaggaaaacgaacaatataatactcatcaccgtctggcgaaaaatcttcataagaacaaaaatcaagcacccggtccatcacagatttatgaatacggattttaatttttgtctgcatcgtttccagaagatcttcaaagtctaatgtcggtttttcataatcccgcagctcaaaagtatcctctttcatttgaaggtttgacatgcgggatagtctgaatagacgaaaatcatttcttttatggcaatacccttgtaaataccattggctgcttttcagtacaagctggtacggctcgaccgttcgtgtggttttctttccgtgatgggctatatattcaaacgacagcagcttcttttcctgcaaaactcctttgatcatttctaaatatggctgaatgttgctgttaccagtccacggacttaaatctatccatatctgattcgcctttaattcgatgtctttcgctctgtcggcagggataaaactcttgactttcgcaagagcgtgtaccaactcatcacccctcactatattggaaagactggaaagtcccatcaagagagcggaaaggtcatcggtagaaaagacctttttatcaattttgtattccggcataatttcaaagccgccacccacgcctgacgccccgcggacagggatacccgccatgttgatggcgtctatgtcacggtagatcgtgcggggtgaaacttcaaacatatccgccagttcctgtgcgccgattcgttttttatcaaggagtatcataataatgctgacaagcctgtctactttcatttcatagccgcctttcgatttatattatggccatactgttgtcagtaatcgcatggtacaatac

SEQ ID NO: 10 - DNA, 110944 bp, Anaerostipes rhamnosivorans
gcacgccgccagcgttcatcctgagccaggatcaaactctcatgttcaatcttggatctaaaaagcgctagctttcttatccttgttcttactgttctatataaaagaacgtccgttgtatctttttaaaagatactgaaaatctcttagaattttcaaggttgtcttattgtttagttgtcaatgttcggctgtcgttttttgtcttgctcttacgagcgacagctttattatattatcataactcattttgtctgtcaagcacttttttcatttttttgaagaaatttgaatgactgacatttcttgtgctgtccgatctccgtcagcaacttttatatcatatcatggtgaaccatgaatgtcaacaacttttttcaaaagttaaaagcagttaagaaacaagatgaagttgtgaagcgctgctgttttgtcagcaacgttgataatcttaccattgctgtcggcaaatgtcaacagctttttttcatttttttaaaaattcctgtaatgctgctgatttaaccaagtttttgcgctttttgcatactctctgctataataactctatactatttatagaagtattctaacaaacattataacggaggttttcttttatgcaaaaaatcgcaagtttcacagtaaaccatttagatctgctgcccggtgtatatgtatcccgcagagactcactaggtatggagacattaactacttatgatcttagaatgacggcgccaaataaggagcctgtaatgaacactgctgaaatgcatacaatagaacatctggctgcaacctttttaagaaatcatccagattataaagaccgtgtgatctattttggacctatgggctgccgtaccggcttctatctgatacttaacggtgaccagacatccagtgaaattcttggccttgtcacagaaacatttgagttcatacgggattttgagggtgaagtccccggagcatcccccaaagactgcggaaactatcttgatatgaatcttcctatggcaaagtttcttgcggataaatacttaaccttttccctttataaagcgaatgaaaagaatttgaattatccagaatagattcgtcaatactgataaagtaacttttattttataaggaggctttatcagatgtcagatcaaaataagatatatgaagaagtagcagttaactgcagccaatactgtccatgcggacgcgatcattccataaagaacgtcagcaccggtgatgataccaaatgtgagagctgtctcaattgttctcatttctcggaagaagaatgtcattgctgcctggacttatacgatcagatcgtagacaaaatttaaacatgatataacaaggaaatacctcgaatactcccagtttcgtattcgaggtatttttaatgttctttacttaaacctttttttctttctatagtaaagtgtcatagttccaatgccgctcaatccaatgatcccaaataatcctggtatttcggcttcatctccggttctgggagccgttttatcctttgaaccgttttgggtattttctatctcatgataattccatcttttatccgggcttttcttcttttttggatctgttttctttccatcgttttcttcactgtccccgccattggatggaatcctcttccacttggcaattaatttcaaatcttcatgcaccggtgtcccaaagtcccatcggacttcctttccagtctcatccttgtagtaccagccttcaaaggtatatccatccctttttggctcctttggttctattgccttctttcccccgctcaatatctgagtttccggtatgtaatctcctccgtttggatcaaaagatacattgtgatttccagtgagactgactttgaccgtcacttttgtcccgtctgacagtgagaatgtcagatcaaagcttccggttttacccgcagtttttgctttattaataagggacatttgtgtttcatcggccttcacctgagcattgttacggcttgcatcctttccctttgctttgcacagagcaatcagttccgcctcactgaaggcttttcccttggtttcatggctgatgttattggcagcgatcaaactttgaggtgtttctttatcagcttttgcaccgtcgctccctttttcccgcaaaaagactgtgactgtcacctctgttttatttggtgtctgaaaggataacaaaaaatctccaatttcccctgccactttcgcctcattaatcctgcgagcctgttccggatcagagatgaccagatcttctctcggaatctcatctccatgttcatcaaatgccctcacaatggacaactcttttagctgctcttccgtaaaagcttcccctccagttttgctgatgatatgcattgccttgatgatctcatcattttctggatcttctgtcacttcatcataatgaatcagagaaatcttcactgtaaccttgcttccgttgtctgccgtatatgtcaggtcaaagctgcctgtttttccggctgtcttggccgcattgatctgttgaaattgtcctggatccagagtaaatccatccaatggcactgtatttccgtctttatcctttcctttgacagctccataattcttaagctcctcctcagtaaaaggattcccccctgtctccttctcaaaaccattggccccgatcgacggcgttgggtgttctggatcaaattctgccgcatcggtaccgcagtctctcaagaaaatgctcacagttacctctgtcccgtttggggtacaataggtcaacggatattctccgattttcccctctttttttgctttatttataacttctacttgtttaggatctttaaagttcagttcttcaacattaaaacttgttccgtcttcttcttttccgttaaccttggtcagtttcttgagctggctctgagtaaactcttctcctccggtcttgctgataacatgattagccccaatttgatcctttgtgtccggatcaatctcattgacatcccggtatgggccaaaatatactttagtacagaattgtcccagggtaattgccgtagtggatgcaaatggtgtcccctgcataaaggtatagtggtccagcgtagttccatcctgaatgtacccttgataaccaagctccggcgatgcaagaacattggaaactttggaattaccggctccggaacctatgcccggcatggaactggccgaatcaccaactgcaataacaaccgtatctccaccgctgatctcaatgtttgttgtgatcatggactgattagggaagactggggagttcccacacttggaagccccgattccaggagcatatgcacctcctgttgcatttactgttcccccggatatatagattccgtcaactttgtttccataaccagatccaatccccgaaccatactcagtcccaactgcccttatatttcctcctgtaatgcggatattttttgtatatcctccgccctgatgttctgatatgcagatagacccgattcccggagaatgctttcctgccaaggcctcaatattgccgcctttcactgttaagtttgcaaatccacattcacttggagtatttatttttctcattgcattgctgatcgctccggcatgatataaatcagggttcccttttgccagcaaagagccacagttatcgtcacacttatggcctttttcttctgtcctgtcacactgtattgtcagttgtccgtccatcccgtcttttgcaagtgccgctccataagtcgggccgcctgttgcatcgccggtagtacccgcattgcagattaattgattcgttccttctaatgtcattgttacattggcgtgggatacattaatacaatccatttttgtcgtatcgcaggtaatgttcacgttgtccaatgtaaggtccaccgtcacatccttctctacttgaacattatattgtgttgttgtacccgtaatccggtaccccttgacatttaactctgactcattgagaatttctgatcctccggatgctgtcaccacggctccatgaagtgttattgtaatatctccctggcttacatccagcagagtctgtcccgtatttgtttttgttcctatattcttcttttggacttttcggttgtctgtattttttaaggctcgcttctgtctttttgctcgcccccccccccaatttctggaagtctcgctttgccctctattttttcggaaacagaagctgccatgttttctgtcgtcctctcattaaccaggccttcttgatgtttctctgtcccagtaacggcatctgccgccactgcttctgtgctgactccattttctgaactatctttagtttccttttgatccaaggcaaataaaacatggttgcccgtaccgattaccaccaatgccaaaaagacagcaagacgtttccacttctttttcatgataaattccctcctaaattttatctcgtattgttattccataaaataaatcgttataagagaaggacatttgaataaaagttagaataaaacatgtgaaatatcttattcctattggttaaatatagacaggcagctttgttctgaataaaaaacataccaagaaactgtgaaaatcttgattgtaaatgatacaatatgaataaattttaatgattagggggaaatatcatgtcaccacaacagattatcgcagttgttattttcttaatcaccatgactgcgatcatttcagacaaaattcacaacaccgtagccgcaatcacaggtgcggtccttttaattttggcgcatattctaaccatcgatgaatgtgtagaagccgtcgacattgaaaccatcggcattctggtaggaatgatgcttttagtagcgattgtcaagaattcaggtatctttgaatatattgcaattaaggccgcaaaactggccaaaggacgcccgtggccaatcatggtcacttttatttttatcactgccattttatccggacttttggataacgtaactaccgtactgctggttggccctatgactttggccatcacaaacattttaggtgtcaatcctgttccgtacatcatcacacagatcatggcatccaacatcggcggtactgccaccctgattggtgaccctccgaatatcatgattggcagcgcggcaaatctcagctttgtcgactttatcctgaatacaggattcgctgttgtctttgtcattattgcagctctgatctgtttccgctttatatatggaaacagcctgactgtagaagacaaaaatattaaggaagttatgaagctggatgaatccaaggccatcaaaagtaaaaagctgctgatccagagcgtgatcatcctggtgatcgtggcgctgtgtttcatttttcatgaccagctcaaaatgcagtccgcaaccatcgccctggctgccgcctgcctgatgctgatcatcggcggacaggatcctgaagatattattttaagtgtggaatggccgacgatccttttctttgtaggactgtttattgtagtaggcggcctggagaaagtcggagtcatcacagtactggccaatggactgctctctgtgaccgggggaaatatgaccatgacaatgatcctgatcctctggatctccgcagtggtttcatccttcctggacaatatcccgtttgtggctactctgatcccgatgatcataacgatccagtcccacggtgtggatgtgacacctctttggtgggcactctctcttggagcgtgtcttggcggaaacggtactctggtaggtgcctctgccaacgttgttctatccggcatcagcaaaaatgcgggatacccaatctctttcggcaaatactttaaggttggatttcctatgatgatcttatccgtattgatatgctctattttcctgttgatcaggtttgcataagtttactcgtaacatattaaaaagatttttatattaaggagggttttatgtctgcagatcaaattcttgcaattgttatttttcttattacgatggcggccattattacgaacaaggtcaataacacccttgctgctgtttctggagccatcctccttgtcctgacccatattctttcaatagaagactgcgtgggctttatcgacgcggagactatcggaatcttagtgggtatgatgctcatggtctctgtgatcaagacatccggtatttttgaatacatagcgatcaaatccgccaagctggcaaaaggacgcccatggccgatcatggttgtctttattatcattaccgcggttttgtccggacttcttgacaatgtcacgacgattcttctcgtagggcctatgaccttggctatcacaaatatattggaggtcgatccggtgccatacatgctgacacagatcatggcgtccaatgccggaggtactgccacactgatcggtgacccgcccaatattatgatcggtacagcggctaatttaagttttatggactttatccagaataccggggctgctgttgttctggttatgatcgtctctattatctgctatcggtttatctacagaaaaagcctgacagtggatgaaaagaacatacagaaggtcatgcagctggacgaacataaatccatcaaggataaacgtctgatggtagagagtattatcgttctgatccttgtggccgtcgctttcatcttccactcacagctgcatgtgacatctgcgaccattgccctcactgccgcatgtcttatgatgtttcttggaaaagaagacccggaagatgttataataaatgtagaatggtccacgatcctgttttttgttggattgtttattgtagtaggtgctttggataaagtaggaatcatcaagatcctggctcatggcctgatgaacctgaccggcggaaatatgatttttactatgatgctcattttatgggtgtccgcattgatttcttcattcttgaacaatattccgtttgttgcgaccctgattccgatgattctgacaatgcaggccagcgggatccaagcagagcctctttggtgggcactttccatgggcgcatgcctcggtggaaacggcaccctgatcggtgcctccgccaacgtggtattggcgggcatcagcaagaatgccggatatcccatctccttcggaaaatattttaaagtgggatttccaatgatgctggtttccatcgtcgtttgctctgcctttttactgattaaatttgcgtgacattttccacatgatttccgttcggctcttagaatgcctcactccaatcatgtagaaaatggacgtaatatctgctggaaatgggcttctgtcaaaaaaggagccacttttcgaaagatattacatctatttactaatgagttaccagtaagcttgaacgaatatgtaacacttagagaacacaaaaaagtcaaataatataagtcaaaaggggccactttacggaggtgctcttttgggtataacattaccagcatatgtactttataaggaggatttttatgaatgaaaacacagtaaccggcgattttattaatatcaacctgcgccagctgggcgccacatccatcaaagaatataacagcatcatgcatatcgctgaatttgacttaggggacggactgatcgtatcctatgtctttaacatcaccaggcacaacaaatactttctgcaacgggtgcagccttatgctatgatccacggaaagtttgccagcgaccgtgaaattcttgagtttatcaaaagtgacttaaagcgttttgtaaatgccaagaacagcaaaaactttgataccttcctgatcatctcgcacttgggacaccatgtgacagaaaatattgaaaaactgtttttgaattacaatgtggaaccagataaacttgtaggcatccaggaaaaaatggaagaatcattaacagatatcattaagctttatcaagcttcagaaaagatcaatttggaagaggccgattaaagaggaggctctcctgtacatattacagggagcctcctctttgatttattgcagccgcacctttaaccggaccggctgatggtctgtatattgaaaatgatagtttatgacattcacctgttccacttttacattcggcgaaacgataaatccgtctattacataaacctgtgaatctttttcataaggtttgtttaaaagcctgcaggtgggatatgtatcgtccaccgcaaaacgaaaaccttccggaaggatctcatttccgatagcacccgggacccagtcctttttattgcggatcggatactttgtgatcccctcaaaggtctggttaaagtctccacccgcaatcacatagtttccctttttatattcttcctccaacactttcaggagcattttgctctgtgcctcttttccttctccggaatcataggcttccagatgcaggttgatcagtacaagctcagcttttgacccttcgatgggcagcctggtcttcaaaaggcatcgcttcaggttgcacgttttcagcggccatgaaaaagattccggcagggcaattctctccgctctgtttactttactgtttgtcagcgtagtgagaccgctttccacatgaccgataggaggccatggatatggggcatatgccactttaaaattataggcaaacatcccgcccagccccaatgcattctcatagtaggtcttctggttggtggaataggatcttttagaattcagatctacctcctgtagaaaataggcatctgccttattttctttgagcataccggcaatcccggccatattttcttccacctgttctttgctgtccggccgtacctttgtgcctccgtccatgaaaaaatcttcgtctcttccaaggccggcatagccggtattaaggcttaacagcgtaaaaggctcttctctggtaatcgtcttgtttccatgggacttttttacggtctctttcttttggggccgatactcctttactgtgacaaagatcagcagccctaaaaacacaaaaacaagaagggtgatcaccactgccgctgccttcgccgctttttttagcgtcatcattcgcctcagtcctttctcttattccaaaaacagccccacaggacaatggtcggagccaaaaatatctgtgtggatcactgcctcagccagtcgctcctcaagctcctcggatacacaaaaataatcaattcgccatcccgcattcttttctcttgctttgaaacggtatgaccaccagctgtaagcctccgtgatatccggatagaaataccggaacgtatcaataaatccgctctccaaaagcttggtgaacttctctctctcctcatccgtaaagcccgcgttcttccggtttgtttttggattctttaaatcaatctctgtatgcgccacattcaggtcaccgcagagcaccaccggtttctcctcctccagtttcagcagatactccctgaagttgtcttcccagtccatgcggtaggacagccttgcaagctcactctgggaattcggagtatagcaggtcaccaggaaataatcttcaaactccaatgtaatgactcgtccctcatggtcaaattcatccactccgataccgtttctcacagacataggctttatctttgtaaagaccgctgttccggagtaaccctttttctcagcatagttccaatattgataatagtcgtcaagctccagatcaatctgtccctcctggagctttgtctcctgaatacagaaaatatctgcatccagctgctccatcacatctaaaaacccttttttaacacaggctctgagcccgtttacattccatgataccaactgaatcatagtctttctccttttgtcatcatatatttatccacagggatacctttcatatggaataaaaaaatcctgtaatctcagtataacaccttgattacaggattttaacctttattgtatatctacaacaatctttttgtcgcctttatcaacggaagccttgaccacagtccgaatcgcttttgcaatccttccctgtttgccaatgacctttcccatatctcctggggcaacatgtaattccaagattaaagcatcttcagtctcacgctcgattactgttacttcgtccggttgatctacgagggcttttgcaatcacttctaacaaatgtttcatgcgttttgcctcctaactatttttcaattccagcaactttaagtaactttgcaacagtatctgttggctgtgcaccctgagataaccatttttttgcagcgtcttcgtcgaatttgatcacacttggatcctggttcggatcgtaagtaccgatttcttcgatgaattttccatctctaggagatctggaatctgctacaaccactctataaaaaggagactttttctgtcccattctttttaatctcatctttactgccatctgtttcacctccataaattttattattaatatctataacaaagcgttaaaaaggtaatttaaatcttccttttttgccgcccttgccaccaaacatacctgacatttgtttcatcatcttcttctggttctggaactgcttgcagagcttattgacctctgatatctgcacaccggctccgtctgcgatcctcttccttctggaaggattgatgatctcaggattggcacgctcttcctttgtcatggaatagataatcgatgctgtcttatccatcatgctgtcgtccaggtctgcaccttttaactgattcccaagtccagggatcatagacagcatatcggaaagcccgcccatcttcttcacctgttccatctgttctaagaaatcatcgaaagtaaaagaagctttacggagcttttgctgcatctccagcgccttttcctcatcgacggtagcttccgccttctcaatcagtgtcagcacgtctcccatgccgagaatccggctggtcatgcggtctgggtaaaactgctggaggtcatccaacttctctcccataccaatatataaaatcggttttccggttacggagcggatcgagagagcagctcctccccgggtgtcgccgtccatcttagttaagataacgccgtcaactccgactttttcattaaaatcttttgccacgttgactgcatcctgtccggtcatagcatcgaccacaagaatcgtctgatatacatcgatggcgcttttgatggcaatcagttctgtcatcatatcttcatcgatatgtaatcgtcctgccgtatccagaatgacaatgttgttgccgttctttgctgcatgttccatggatgctttggcgatgtccacaggattcatcttatctcccatggaaaagaccggcactccctgtttttctccgttgacctgcagctgcttgatcgccgcggggcggtaaacatcacatgctaccagaagcgggcgtttgcccttttgtttgtattggcccgcaagcttggccgtggtggtcgtcttacctgcaccctggagacctgccatcaggatgactgtgatctcgttgccgggctttaactggatctccgtggtcgtggagcccatcagcgcttccatctcttcttttacgatcttaatcaccatctgtcccggattcagtccgtttaacacgtcctgccccactgctcggtcctggacagctttgatgaaggtctttacgactttaaagttgacatcggcttccaaaagcgccctttttacttctttcatggctgcttttacgtcattctccgtcaaacgtcccttgcttcttaaattcttaaatacgttttgaagtttctcagataaactttcaaatgccataaacatcctcctgaatccgccgcagatgccggcgacctgttacaaatcttccagaatcccgttggatacctgctcaatctttctgatctctatcttgatctcctcctgatcatccgcatgtaaaatgcttttggccagaagatgaatctctgttaccttttctttcgtcctcaaaaacttttccacaaggtgcagcttcttctcatatccagcgaggatcttgttacagcgcctgatcatgtcataggcagcctgtctcgtgatgccgtgttctccggcaatctcgctgggagacaaatcgttcagtacatggtcttcgtatatttctttttggtgctcagtcagaagctctccgtaaaaatcatataggagcgtctgttctacaatccattccatgtcacatctcctgtaaagtatttttcctttaccgtgattcagtttatcggatatcagcctgtttgtcaagtatttttccttgcacattttacggttacaaagaaatatcacttgaaaaagtttcactttcctgtaaaatagaaaaaagacgatcccaaacgaaatttaaataagaaaggttttatttacatgatacaagcaatcaacgttactctgcgccttggaaaacgcgcattatttgaagatgtcaacatcaaatttacagaaggaaactgctacggcctgatcggcgcaaacggagcaggtaaatccaccttcttaaagatcttatccggagaattggagccttcccagggcgaagtggcgatcacagatggtcagcgcctgtccgtattaaagcaggatcactaccagtatgatgaatatacagtgctggacgctgttatgctgggaaatacccgtctctatgagatcatgaaggaaaaggatgcgatctacgcaaaagaagactttacagaagaagacggcatcaaggccagcgaactggaagctgagttcgctgacatgaacggctgggaagcagaatctgacgctgcaaccttattaaacggcctcggaattgaaaatgacctgcactatgcaaaaatgtcagaactgaacggatctcagaaggtcaaagtacttctcgcccaggcattgttcggcaatccggacattcttctcctggatgagcctaccaaccatttggacctggaagccatccgctggctggaagacttccttattgactttgataatacagtcatcgttgtgtcccatgaccgttatttcttaaacaaggtatgtacccacatcgctgacattgactacgctaagatccagctttacaccggaaactatgacttctggtacgagtccagccagctgatctccaagcagatgaaggatgccaacaagaaaaaggaagacaagatcaaagaactccaggactttatcgcccggttcagcgcaaacgcttccaagtctaagcaggctacatcaaggaaaaaagcgctggataagatacagctggatgagattaaaccttccagcagaaaatatccttatatcaacttcaaaccaatccgagacattggaaacgatgccctgtctgtggaaggtctctccaagaccattgacggagtgaaggtccttgacaatgtctcctttaccatgaatccagaagacaaaatcgcttttgtgggaccgaatacactggctaccactacatttttccgtattatctccggtgagatggaaccggatgagggaacctacaaatggggtgtcaccaccacacagtcctatttcccaaaggacaatacaaaggatttcagcgaagatatgtccatcgcagaatggctcagccagtattctgaggataaggatgtcacatttgtccggggcttccttggacgcatgctcttctccggtgaagaagctttaaagaaagtttctgttttgtccggtggagaaaaagtccgctgtatgctgtctaagcttatgatcagcggggccaacatcctcatcttagatgaaccgaccaaccatctggatatggaatctatcactgccctgaatgaaggcctccacaagtttaccggaggactgctgttcagttcccaggatcatcagtttgtacagaccactgccaaccggatcatcgagttgacagacagcggtatgttcgacttcctcggaacctacgatgattatctggagagcaatgcatctgcaagaaaacgccaggtagccaattacgacgaagaaaaccaataaataagtgaaaacgagcaggctcaaatgattgaaatttgagcctgctcgtttttcagcgcttctgcttcatttctgccatatctccgaagataggcgttgcttttccaaaaccgccggatacatccatgatctgccctgtagtataagcggactcatctcccgcaaaatagactacagccgccgcgatttcctccggttttcccatccttcggatcggtgtgtgctttaaaaagaattcccggaactcttcacttaagttgtcctggactgcatcagtagctgtcatccccggcagcacagcattgcaccttatgttatgccttgcctcctggactgcagttagtttagtcatatagttgatcgctgctttgctcgtaccgtatgcgatctgggagatatccggcaccaatcctcccaccgaagaaatattgataatactacctccgccttgggcttccatatgccggatggctgcctgggatgaggcgaatacactggtcagatttgtattgacgatttgtagaaaatcttcacattccgtgtggccgatatccagatccttttttggatctgaggtgccaaaattgttcacgagcacatcgatacgcccctccttttccaccacttcttctaccatgctgacataagtttccggtttatatgcatcattatatacatacttgaccctgaaacccttctcattcagttcctccgctctctgtccagcacgttccagatttcttgctgccatatatacgatagcgccttcttcagcacacgcctttgtgacagccagcccgattcctcttgtggatgctgttatcaatactaccttatcctttaatctcattttacatactcctttctactacaatatatttatatcctttttagcgtaaacaaagcggacaagtccgcttcatctcgctaaatccctcaatcatgagggacttgctccgctttgcgcaccaaatgcgatttgacgtagtcaaataatttcctcacgcacttgtgtgcataatgcccgtagggcttttttgttccatagggaggttcgaggaactttcctatggaacaaaaaaccgcagaataactttccataaaaagctatcctgcggcattggctcttgtatttatgcgtactgtactttcaaagcaacattctcaaagctgatcttaatgatatttaagatactcattaccactgtggtgcatacttccacgatatactggatatcgtctgctacgctgtgttcacggcgcatgtattctgcgtggatattcttgataaactcagacaatccttttgtagaattcagcgggacaatcttgtccttacgctccatagcttcttccgtggacagatattctttcagttcatgcttaagatctctctcataaatgcagtgatcctttacattaccttcataagaactgttgtggggataagtgaaatagtcagcaatataatgaataatcactcccaacttcgcacagcgccgcatgttcatcccttttagtgcatcatagtctgcgacaaagtcatcaagttgattctctattttatcatacgtgatatcaaaagtatgcggcgttgttataaaggatggtctgcaatccggccagatacttccgatgtagaacggtaacttatagtcaaatacttcttccagttgtagtgagtccataatttgtccagccagtgaaatgtgtgattttttcctcattcgatctccttaaaacacttgacatgtaaactcaggttctaatcttattatatcccgatttttagaaaaatcaactctattgctctttaaattccttaagattttctaaaatctcatgaaatggaaatcctttcctggcaaaaaacgctagggttttttgaaaatttgcctctgttaccggacctttttgccggatcctttttttgatctgctctcttaggacatcttcctccgacagatcaaactcctcccatatgcgttcaaaaagctccgggcttatacccttctgggacaattcctgcttgatctttaaacggctctttgaggctcccctgaactctatgtaatgtctcacataggcttcatcgtcaatataatgatatccttctacataagagactgctccctcgatgcatgtgtccggtagctccaggcatttcagccttgagcgtatctcttcttttgtcctgtcggagacctttaacagattcatggcctttaacttggcccggtggagcagcaggctgtccagttcgttcttctgtacttctgaaagctccatattctccttaaggccaagtcttctggcctccccggtatagaggagacaataacgctcctcatcgagataaagcctgatctgttttctgcccactggctccagcattgtcactctcatatctgtggcttactgctgtggctcttctggctgtgtctcctccggggcggcttctgcccctccgtcaagaccgtactccctgcggaccgcagcttccacttcctgcgccacttccggatgctcttttaaatatgtcttggcattctctctgccctgtccgatcttctctccctggtatgcataccaggccccgctcttcttgatgacatccactccggctgccagatccaggatatctcccactttggagattccttccccgaacataatatcaaactctgcctgcttgaatggaggtgccactttgttcttgacgaccttaatcctggtacggttcccgaccatatctcctgcctgcttcagcgtctcgatccttcgcacatccaggcggatggaagaatagaacttaagggcgcgccctccggtagttgtctccggattcccgaacatgactcctaccttttccctcagctggttgatgaagatcacggtacagttggacttgctgatgatggctgtcagctttctcagagcctgtgacatgagccttgcctgaagaccaacatgggaatctcccatgtctccgtcgatctctgccttcggaaccaaagcggcaacggaatccacgatgatgatatccacagcgccggaacgcaccatggtctccgtgatctccagcccctgctctcctgtatccggctgggagatgtagaggttgtccacatccactccgatattctgcgcatagacaggatccagggcatgctccgcatcgataaaccctgcaatgccgcccctcttctgtacctctgctaccatatgtaatgccacagttgtcttaccgctggactccggaccatagatctcgatcactcttcccttcgggatccctccaacgccgagggcgatgtccagactcagggaacctgtcggtgtcgtctcaatgctcatatctgcctggtattctccaagcttcataacggctcccttgccgtaatctttttctatcttggtaagagctgcatccaatgcttttaacttctctgtctgttgcatcctgtattctcctttaatcttattatgaactggttttgattatatcatagcacaaagagaaaaacaagtgttcgtcgaatatttgttcgtacttgtcttcctcttttagtttaacatatatttacatattcttcaatcagtccgccaaagctttccttatcattgtcagtgcccggcatacggaaacttccctaatcttttcacggtttcccttgagatcatactttttcacctctgtatggcctccgcggcatacaccgatatataccaaccctggttttttcgttccggtctctccgcccggtccggcaagccctgtgataccgacgccgatgtccgcacctgaggtctttaagacaccttctgccatctccctggcggtttcctctgagacagccccgtgctctttcagtgtctcttcttttacactaagatacttcatcttcgcttcattagaatacgtgataaagctttcattcagtacatttgaagcgccgggaacattgataagtcttgccgccaaaagtcctccggtacaggattcagctgccgctatggtctccttcttctgtttcagcatctttaccaccacttcctccagagtctcctcttcctcgatggtataaatcttattgccgaacctggacctcagttcctcgaccataggcataaccagttcctttgcttcctcttccgtgtctgccttggctgtgactctcaaatggacctccccgagttttgcatacggagctactgtgggattgctctgctcatcgatcaaatccatgatctgggtttccacatagctttctcccaggcagtcaatctttacgactttggaatataaaattcccggttgaagtttagaaaggatcggctctacctgttcatggaacatcgggatcaactcactgggcggccctggcagaagaacgacttttcttccctccggtccgttgattaccatacccggcgcagtaccgttgccattatacagtacggtgcagtcttccggcaccatggcctgttttaagttattgtctgtcataggacgtttgatacttgtaaaatatgacgtcagcctctcttttgcctctgcgtcctccacaagcttctgtccacatgccttagccgcgatctcttttgtcaggtcatccttcgtcggtccaagccccccggacaagatcaggatatctgaccgtttcatacctgtctttatcacttcctccacacgctccgggttatctcccacagtggtttcaaaaaaaacgcttataccgagggcggctaagcgttctgacaggtaggcagcattggtgttaacaatgttgcccagtaatatttctgttcccacacaaataatttctgctgtcataatggtctccttctatttcaggacattcttatttttaattaaataatctaacaatgatatgatggtcaacacaagcgaaatgtataccaaaatattttcaatgatcactgctgtgcctgttcctaaatcgatgatcagcataatgatcataaacatctggaaattggtcttaaattttccccagtagctggcagcgatgacgactccgttgtccgatgcgatcagacgaaaaccgctaatgataaactctctggcgatgatgatgatggcgatccaggaagccaggcggttcatacccacaagggcaatcattgcagagcagactaacagcttatctgccaggggatccatgaactttccaaaattggttacgagattatactttcttgcaatgtgtccgtccagaaaatcagtgaggctggcaatgataaagatcagcacagcgatccatttactgatatccccaaacggttcggccagcagcacaaagataaaaaccggtatcatcaatactctcaatattgttagtttatttggtaaattcatagtccatctctcctatcaaatcgtactcatttcctttggtaatctttacatatacatagtccccggtcaacagttcctccggcgatgtcacaaatacacagccgtccactttcggagcgtccatgtagctgcggcctacatatacgtcatcctcaaacaggtatccttcgatcaaaacccggatggtctttccgaccatctgttgtgtatgctcacgggaaatctgctgctgcagagccatcagttcatcccttctggcttccttcacctcttcttcgatctgtccctcaaattctgccgctttcgtgtcttcttccggggagtaggtgaatacgcccagacgttcaaatctctgtctgcttatgaagtctaccagctcctggtgctgttcctccgtctcacccgggaatccagtgatcagcgttgtacggatggccatatccggaatttctctgcggagctttgcaatgatgaattctatatccgccttggaagtcctgcggcccatccttctcaaaatgccgtcactgcagtgctggatcggcatgtcaatataatgaacaaccttttcttcttcctttatggtcttaatcagttcatccgtaatctcctctggataacagtacagcagacggatccactggattccttccaccttgcacagttccctgagcagtgtaggaagctcctttttgcccgtaaggtcctttccatacagagttgtctcctgagctactaaaaccagctctgtaactcctgaggctgccagctccctggcgctctttaaaagttcttccatcgggacgctccgaaatcttccccggatctttgggatgatacagtaactacatctcttatcgcatccctcagcgatctttaaataagccatatggctgcccgtcgtgaccacacgatggtgtccggaattatccggcagatagtcgatgctctcgtaatgtacatatccattgcctgcaagcgcttcatctaccgcctcaacaatagagtcatagctggtagtccccaatacagcatcaatctcaggaatctcctctaaaatttcatccttgtatctctcagacagacatcccgccaccacaagggcctttagattctgctccttataggccgccatctcaagaatcgtgttgatgctttcttctttggcatcatggatgaagcagcaggtattgatgacaatgatatcagcctcttcctcatcgttggtcaaagtgtatcccctctccgtgagaagacccagcatcacttcactgtccaccaggtttttatcacatccaagagaaataaaaagtattttcatctgttattctccaaataattttttagactgtacgcagtttttcatgagcatagcgatggtcataggacctacgccgccaggcaccggagtgatggcagacgtcttttccttcaccgcatcaaaatccacatccccgcacagcttattgtgttcatttctgtggatacccacatcaatgatgacggctccctgcttcacataggaggagtcgataaatttaggttttcctacggcaaccacaaggatatccgcacggctgcacacttcccggagatttctagttctggaatggcagacagtcacagtgccgttttctctgagcagcagcatagacataggtttccccacgatattgcttcttcccacgacaacacattcttttccgctgatctccacaccggagcgtttcaaaagttcaatgataccggccggagtacatgggaggaatccgtcatttccgatcaccatgtttccgacactgaccggatgaaacccatccacatccttcttcgggtcaatggcatggatcactgcgtcctcattcatatgtccagggagcggaagctgcactaagatcccgttgatctcaggatctttgttacacttttccacaaggtcaagcaattcctgctgtgtagaatcttccggtatctcgtaggatacggatttaattccaatatattcacatgctttcttcttattcctgacatagacagaagaagccgggtcttcccccacctgaatcactgccagagcgatctccttaccttctgccttcatagccgccacttcctgtttcagttcatctttgatctccgctgagatcttttttccatcaattatctgtgtcatgtctcttccctctcgtgaattctagaataatccggtgatagcaccgtcgtcatttacgtcaattccttctgcagccggctttttcggaaggccaggcatggtcatgatatctcctgtcaaagcaacgataaaaccagcgcctgcattcacatagacctctcggatcgtaatgtcaaaatgctccggacgccccagtttcttcgggtcatcggataaagaatactggttcttcgccatgcagaccggaagactgccatatccaagttctgaaagctgtttgatctgtcttgtcgcagccggtgcgtagaccacattgtctgccccgtagatcttggaagcgatggtttcgattttttcttcgattgtagtatcttcataggagtacagcgggtggtattcactctttttggtctccaatgtctttaacactgcctttcctaagcttaaaccgccttcgcctcccttttcccatacttctgacagggcaaagtcacagccgcgctcctggcagaaatgtttgataaagtctaattcagcttctgtatccgttacaaactggttcagcgtcaccaccacgggaactccatattgcttcaggttttctatatgtttctccagatttacgattcctttactcagagcatcaatgttttcttcgctcagatcctctttaagaacaccaccgttgtactttaaggctctgactgtagcgaccagaacaaccgcatccggtttgaggcctgccatcggacatttgatgtctaagaatttctccgctccaagatccgcgccgaatcctgcctccgtcactgtgatgtcagaaagcttcagggccatttttgtcgcctgcacactgttgcagccgtgagcaatattggcaaacggtccgccgtggacaaatgccggtgtgtgctccagagtctgaattaggttcggctttaacgcatcctttaagagggctgccatagctcccacggcatttaaatcctccgccgtcacaggttctttatccatattataagcaacaatgatcttgcctaatcgtttctttaggtcttccatatcgtttgccagacaaaggatcgccatgatctcagacgccacggtaatgacaaaatggtcttcccgcacaacgccgtccactttgcggcccagccctacgacaatatttctgagagcccggtcattcatatccaggcaccgtttccagacgatatcccttgtgtcaaccttcagtgtatttccctgctggatgtgattgtcgagcatagcagccaaaaggttattggcagaagtgatggcatggaaatctcccgtaaagtgaagatttaaatcttccatcgggactacctgggcatatccgccccctgccgctccccctttgatcccaaagcaaggtcctaaagagggctccctgagtgctaccacggtcttttttccaagcttggtcagcgcctgtgccagtccgatgctggttgtggtctttccctcacctgccggagtggggttgatcgcagtcacaaggacgagtttcccgtcctcgttatctttaatctcattcataaatccggaagacagctttgccttatactttccgtacagctccaggtcatcctctctgatcccgagagttgctgcgacttcctttatcggatgtaactctgcttcctgtgcaatctgaatatctgttttcattggttggttcctttcttctataaatactcatctttatattgttcaaattcttcctggctcatgagaaccttgcggggtttggttccttcctcttccccgacaattccggcttcacagagctggtccataagcctggccgcccggttgaatccaatcttaaagatcctctggaggctggcgatggatgccttatccttgtcaatgataaatttagcagcatcctcaaaatactcgtccctgtctgcggagactgtggcctttacgctggccgtctcgatcttttctttaatctcactgccgtaatcatcctctatattctggctttttaagaattccacaacacggccgacttcctcatcgctgataaatgccccctgtatgcggaccggtttctggtatccggccggataaaagagcatgtcacctttgccaagaagcttctcagccccgttcatatcgatgatcgtacgggaatccaccccggaggatacggaaaaagcgatcctggaagggacattcgctttgatcaatcctgtgatgacattgacagacggtctctgagtggcaatgatcagatgaatgcctgcggctctggcaagctgggaaagccttacaatggcatcttccacctctcccggggcaaccatcatcaagtctgccagctcgtccacaatgatgacgatctgcggcagcggctgaaagtcttcgccctccatgcctttttccttcatctcttttactttctcgttataaccggatagatttcttacattgacatccgcaaacttcttgtacctgtcacccatctccatgaccgcccagtttaatgcactggatgcctgcttgggatccgtgaccacaggaatcagaagatgagggattccctgatatgtactgagctccacgaccttgggatcgatcatgatcagttttacatcgttggggcttgccttatataaaatactcataatcagtgtgttgatacacacagacttaccggagcccgtggcgccggcgatcaataagtggggcatcttggcgatatctgagatgatcaccttacccgcaaggttcttgccaaccgcaaacgcgatgttggatgagaaccgtttaaaatcattattctctatcaggtcgcggaacatgaccacctgattggtcttattcggtacttctatccccactgccgcttttcctggaatcggcgcttcgatcctgatatccggcgctgccagattcagcttaatatcatccgatagcccgacaatcttgctaaccttgactccctgctccggctgaagttcaaaccgggtgacagaaggaccacagctgatatctgtaatcgttacattgacaccgaagttcctaagggtctgctccagcttgagcgcagtcttcttaagctccgcctggctgttgcctcctgctttctttccctttttcagtaaagtcactggcgggaacacatagtccccctcctccagtgcggcaggatgtatagcgatctccggaagcggttctggttctgatttttctttgttcacaaatgaccgagtccttggctttggctcaggttcttctgccgggacttcctcagcatgtccgatcatctcatccaggtcaaaggacttcacagattcctttgccggttcctctggcatcagagtcaggtcgtctaagacctgaggctttttctcccgtccatgaagcttcaactcagggaatttcggagccttgatcttggactttggtttttcttctttttcctttggctgttttttcttagacggcctgcttttcttctctggagaccgttccggtgtaaaaaatgcgatcacacgcttcacaaaggaaagcagtgatctctctgtaatcagtatcatggaaatggctgttaagaaaaatacaacgacataactgccggccagtcccaattccttatatagaaaagaactgatgacacctccgaccactcctcctccagcatggtttaaggaagcataccggtaaaggacaccagtatccgacatgttgatgtctgtgcccatctgccatatggccgctgtcatgcacaaaagcagaacaataaaaaaggatttttttactgagatgctgttgtactgattggaaatcagcagaaggatcatgatcaatataacgataggggcaacataatgaacaccacccagcactccgaacaaagcggaacttacagtgctccccacttttccgcagagcccaaaattactcaaaaataaaaaaagacaaactgcaaaacttaacagaactgcaatttcctgatagaaccctgcaaaatctttttgctttttcttctttcgtgccgtgcttcttttcttgctttttttagctgccattcttctggaatctcttttctacttaaatttaatgctcaataaccctttcttgaaagagttatatgcctattttacaattaacctaaataaatgtaaagagcctgaacagaactctttggttcctttcaggctcttttgtatgtttttatgagtttcttaatgctgtgtacataccgctttcaatcacggttctttcttgatgccggccttaatatttggctgtctcaggcggaataaactgctctgcttcattcacgaacttcttaacctgtacgcctgctttaaccaccggaatattggttcccgctccggccacacatccgccagggcagcccattccttcgatcaggtagccgttcttcttgccggcctttgcctgaagaagcatcttcttgcactctgccagaccttctacgtgatcgatctttatgtccactcccggatggtactctttcacacatgcctcgatggcagcggcaactccgctggcaaccgcatatccacgtcctgcaccgaacgcatcgttcatctcttcttctttgtcgtagttactgaaatcaatgttcttggctgagaacattccatccagctcttcaaatgtaatgacaaaatctacttcacttctgactgactttctggaagcttccagctttttcgccacacaaggtcctacgaatacgatctttgcattctcgttggtctgccttgccgctctggctgtggcaaccataggagtcagagcattggagatctggtcgatcacctctgggaagtactttttgccaagcatagaccatgatggacagcaggaagtcaataagaacggaacttctcctgttgcaactccatgtgcatagtggtccgcttcctccagtgctccggcatcagctcccactgccacttcccatacatctgcaaatccgatatctaacagggctgcctttaccttagctggtgatgccttagggccgaactgtcccacaaaggcaggagctaagatggcgataacctcattaccctcattcattgccttgatcagctgatagatctgagacttatccgcgatggctccaaatggacagttgaccatacacataccgcatgaaacacacttgtccggattgatggtagcacggcctgcgtaatcagtctcaatagctccaactccacaggctacttcacacggtctttttctctcatggatcgcgctgtatggacataccttctggcactgtccgcacttaatgcatttttcttggtcaatgtaggaatatccgtccacaaagcttatggcattcttcggacatacttccatacacggatgcgccatacatccctggcactctcctcccacgataaaagctctatccttacatgcgttgcaggctgcagggatcacctgtaaaagaggcggctcatagtacttctccgctatgttgctctccttgatcccttttgtgattcttgcaggcttatcagcaggccttaaagacatccccatggcaagacggatcctctctcctaccactgccctttcacgataaatactgtcgcggtatgtcggcagttcacctttcactaattcgtatggcagatcctcgatttcttcaaggtctcgttgttcataggcaaattttgcaatctctgtaaacaccttttttctgatctctcggaccggggtctcaattcctctcatagctcctcctttaatgttcgttaaaataaaaacaatctatgtttattctacactacttttaagcgaaattaaaggatttttttgctttttttgtactttattctgtacacaataaccagaattgttcccttattttccctgagtatcctggatcatctcctgaagctttgcaaaggcctggctcatgcctccgatttcgttgatcaatccaagctccactgcctgttctccctctaaaatggttcctgcatcttttacctgctcaccgatatggagcatcagttcctccacctttttctcaggaacatcggaatgatcgctgataaaccgcgtgatgcggtcctgaatcttttcaatattgcggtagctctgcaaaacgccaatgaaggtaccgctggaacggaccggatggatcatcattgtcgcacttttaacaataaatgaataatcagaggaaactgccaaaggcactccgatggaatggctccctcccagcacaagggttaccgtaggcttacttaaagaagcgatcatctctgcaagtgcaagcccacattccacatcacctccgatagtgttgagcagaatcaacacacccttaatatcatcagaatactccgccttggccagggccgggatcatatgctcatacttggttgtctttgcattctgggcagacagctggtggccttccacctctcctatgacagtcatcacatggatgccgcccaagtctaattcccctgtatctctcacttcatttctttgatcttcgttcatattgtcatcctcactttatttaatttaaaaaagagaagaagcgcaatgcttcttccctttattctctgtcattatgagaaagattattcttctccgatttcaaaagataccagcaggtcttcctggttgacctgttctccctctttgacatagatcttatctacttttccgttgaccttagatacaactgtggtctccatcttcatggcttccaccgtgagcagcggcatattcacagtgaccggatctccctcttttacaaggacctttccgactgttccagggatggtagagcctaaatgtgccggattgctcttgtctgccttgatcctgtggtcagccttaacctcaaggttgtggtctaagatcttcacctcacgcatggaaccgttgacttcaaattccagcaggcggtaaccgttttcatccggctctgacatatccacaaacttaatgataagatcttttccagctccgatggtcagggtcgtttcctcacctttcctaagaccatagaagtacacatgactttccagtcttgtgacatcgttataagcttcaaaatgtctgcagtaatcctcatatactttcggatacatagcatagcttaaggccttgcggtgaagggttttctcgtcctccatggattcattgtagaagaactccttgagtccttttttgatctgatcaaagtcttctgacggaagcaggcttcccggacggactgtgatcggtttcttgcctttcagcacaatgtcctgaagttctttcggaaatccaccttccggctgtccgatcataccttcaaaatattctaccacagaatcagggtaagataagcccttgccttcagtcagaatattttccttggtcaggccgtttttaaacataaagattgcaaaatctcctactaccttagaggaaggcgtcaccttcacgatatttccaagcaggtcattggcatctttgtacagacctttgatctcctcaaagtcttccgcagctcccatttcttttacctgggctaacaggttagagtactgtcctccaggaatctcatacttatagatctctgtattcggagcatccattccactttcaaactgcttgtagactggtctcaatctctcataatactggctcagttctgtgagctgatccggtactaatccggtatccctatctgttccgtagagagcctccaccagagagttcatggaaggattgctggtcatagagctcatagagccaatggcacagtctacaatatccactcccgcctccgttgcttttaacagagtgctgactccgttgcctgtagaatcatgggtgtgaagattgactggtatgttaagttctgacttcaaggctgagataagcttctctgccgcatacggcttcacaagaccggccatgtccttgatggtaaagatatggcatccaaggctttccagttcttttgcctttttcacataatattctaatgtgtattttgtctcattcggattcagaatatcccctgtatagcagatggcaccttccacgatctttccggtctttaaggccgtctcgattggaagcttcatattctcaacccagtttaagctgtcaaagatacggaacacatccacgcctcggctagatgcttcttcgatgaaagctttgaccacgttgtctggatagttcttgtatcccactgcgtttgatgcccttaaaagcatctggatcagcgtattcggcattctctctctcagcagtgcgagtcttacccatggagattcctttaagaatcggtatgaggtatcgtatgtcgcgcctccccatgcttccacggaaaatgcattctccatatattggttggctgctttggcggcccctgcaagatcctttgttctcatacgggttgccatcaatgactgctgagcgtcacgcatcgtggtatccgtgacgtaaagctttttgtcctgtaaaatcttctgcgtgaagccttcggctcccagttttaagaattcatctcttgcgccgtaaatctctttctttttatcatacttcggaagaacacggtcttcaaaaaacggtttttcttccgctttctgttcgttgaccattttattgccgaggaattccaggatctttgtggcacgatcctgactctcaggcagaaggaacaactccggagtatcttctataaacgtagtgtagcactggccggtcttaaaagtctcatggttcagcacattgatcaggaacgggatattcgtcttgatcccacggatccttgtctcttttaacacacgggtagacttcatcacagcccctaagaaggtgcggtcatgggaacatgcctttacaagaaggctgtcgtaatacggtgtgatctcagcacccgcatacgcatttcctccgtccagacggattccgtttcctgctccggaacggtaaaccgtaatctttccggtatctggcaggaaattattagacggatcttctgtagtgatacgtgtctgaatagcatagcctgtggtctcaacactttcctgggaaggaatctggatctcatcagaatccaaggcatatccctgagctacctgaatctgggtctgcacgatgtcgattcctgtgaccatctctgtgacggtgtgttcgacctgtactctcggattcatctcaataaaataagggttgttatccgcatccacaaggaactctaaggttccggcattgcggtagcccactgcctttgccagtcttaaagagctgtcaaagatggtctgccttgtctcttccggaatactgaaggcaggtgcatactcaaccaccttctggtggcggcgctgtacagaacagtcacggtcatacagatgaaccacatttccgtaattatccccaatgatctgtacttcaatatgttttggactctttaaatacttttctataaaaatctggtcgtctccgaatgcctttttggattcgtctctggcttccgcatactccttcggcatctcctgtgcagtgtggacgatacgcattccgcgtccgcctcctccgttggatgctttcagcataacaggatatccgactttttctgcaatctcaagaacctctttttcactatgtactgcatggtcgacacccggaataatcggaacatccgctttgatcgccatttgcttggaagagatcttgtctcccatcgctctcatgatgtcggaagtcggtccgataaatgtaatgccgtgtctctcgcaggcatctacaaattccggattctcagataaaaatccatagcccggatgaatcgcatccacattcttctctttggcaatccggatgatggtcttgatatccagatatgcatcgatcggccctttatccggattcagctgataagactcatccgctttggagcggaacaatgcatagcggtcttcttttgaaaagacgccaacagtcgtaatccctaactcattcagtgcacgaaatacacggattgcaatctcaccgcggttggctactaatacttttttaaatttctttatttgcattggtaaactactccttatataaaatttgtctttcctggcaggacaataatccgcgccagtaagacgtattagaaatcattatagcttaaaacaaatcatattacaatagtagattgccccacaaccttcgatcggtcaaaaaaagacggcttcctatatcggaaaccgccttggcaatatcttattctgcatcatctgcattgtcagtgatcaatgctttcatgctcaagctgatcttcttttcatcctttttgaagtcaacgactttggctgtgatttcctgtccaacggataaaacatcagatggcttgtcaatatgttccttggcaatctgagatacatgaagcagagcatcaatgcctgattctaactcaacaaatgctccgaaatcagtcatacgcgcaacttttccgtctacaacgttgccaactttatatttctcttctgcctttaaccatggattctcttcagggaatttcaggcttaacgcaatcttctcaccctggatatccttgatcagtacggtaaccttatctccgatagaaaatacctttttaggattctctacacgtccccaggacatctcagagatatgaagcagtccgtctgcaccgcccaaatcgatgaatgcaccgaagtctgtcacgttcttgacaactccgtcaatcttcattccaggctcaatcttctcgaataattctttctgtttttctttcttcgcagctactaataactgcttgcggtcaccaatgactcttctctttctcgggttaaactcactgatgacaaactcgatttcctgtccgtcatatttctttaagtctctctcgtaagaatcagaaacaaggcttgcagggataaaaactctcgcctcatcaataatgacacttaaaccaccatctaaaacctgtgctacaggcgctttgagtacttctttgttttcgtaagcttcttccaggcgcttgttgcctttttctgctgccagtctcttatatgtcaacaacacttgtccctcaccgtcgttcactttcaggacctttgtctccatcgtatctcctactttggcgattgttgttaaatctaagttagctgcatcattagagtattcgctgcgtgtcaggataccgtcagctttataaccgatgtttaagatgatctcatctggctttacgtcaatgactgttccttccactacctctccgttacgaatcgtaactaaactttcctctaataattgttcaaaactcttttccgtcatgctagcatgaacctccttgataattttctctggggtggatgcccccgctgtaatacctaccttaccagtcgattcaaaaagtttcaaatccaggtctttaagtgtctgcacaaaaaaggtgttcccacactccttcttgctgatctcatataacttctggctgttagaactctgtctgtcgccaatgacaatcattgcatctacatcgtgtgctatagattttgcttctagttgacgctcttctgtggcattacaaattgtattacatacttctatatgataactcttttccttgataatttcaactatatcttgaaatttattgtaattaaatgtcgtttgcgaaacaacacaggtcggtttgctctccaggtcgacccctgagagctcttttgcatcggatacaatatggacttctccgctgcaccatcctctgatcccttccacttccggatgctccgcacttccgatgatcaggatctgttttccttccccgctggccttctccacgatcctgtggatctttaacacaaacgggcaggtggcatccaccagattcaggcccttcccgcggatcagctcataaatatcctttgccactccatgggatcttatgatcacagtaccctctgagatcttctctaaatcctcccgggattttaggaccttgacacctctcttttccaagtctgagacaacttccgagttgtggatgatcggtccgtatgtatagaccttttctttcccggcttcttcatataccttgtccaccgcacgtcggacaccaaaacaaaatcctgctgttttcgctaaatttacttccatctcttatttcaccttttcaaattcccggatgaccgtgtccaccacatcttcaatggacatgaaagaagagtccacaagaaccgcatcctccgcctgtttgagcggtgcgatatctctggtcatatcctggtgatcccttttcttaatatcgtcttcaattatagcaagatcagcttcctgccctttctcgatcaattcatcataacggcgctttgccctgacctccacggacgccgtcagatatatttttaaatccgcatccggcagcacattggtcccaatgtctcttccgtccatgagaatatccgcagttttggcaagatctctctgaagatccaaaagagtggccctgacagaaggataggcagaggtcttggaagccatatttcccactttttctgttctgatctgtcctgtgacattatctccgtttaagatcacctgctgcatgccgtcctcataggcaatgcggacatgaatgtccttgcacgcctcatcgatagccgcctcatccttctcatcgatgtgatggtgtataaaatagagcgccatagcccggtacatggctcccgtatccacatagataaactccaatttctttgcgatcgtctttgcgatcgtgctcttaccggcccctgccggcccgtcaatggcaatactgtacatagtatgatatcctcctaattcattcctgctaaatatcctgtagaccacgcgatctggagattataccccccggtcagcgcatccagatccaaaacctctccagcaaaatataatccctgcaccttttttgactccatggtgcttgggttgatctcctttacatccacgcctccatgggtgatgatggcctccttaaatcccctggtactggtgacagacagaggtactgcttttaaaagttccgcaagcctcatccgctccttctttgtaatctcatggatcttcttctctccgggaatctccgacagttctaagataaccgggatcagtttttttggcaacagctttccgagagaatttttaaattccttgttgatgttttcctgaaaatctttaagaagtctctggtccaactgttcttctgacagcgccggcttcaggtcgatcaagaatttcagctgttttcctttatgctgtaccgcatagctgctggcactgatgatgatgggaccgctgactccgaagtgcgtaaatagcatctccccaaactccttataaatccttttgccgtccgcatagagggatgcctccacatttttaagggaaagcccctgtaatcttgaacagacagtaccatccacgttaaacggaaccagcgccgggtaaagatgcgtcaccttgtgtccctctttctttgcaaatccatacccgtctcctgtggaacccgtggaagggtaggacatgcctccagtggcaatgatcaccttatccgctctcatgactcttgagcctttcagttcaacacctctggttctcccgctctctgtcaggatacggcgtacctccgtattcagtttgacagtgaccttctgatggcgaagctctctctccatagcgcggatcacatccgaggacttgtcagacagaggaaatacgcggtttccccgctctacctttactggacatccccactgttccatccactccatcatctgctcattggtgaaggaataaaacgcgctgtataaaaactcccggtttgtaaccacatggcccatcaggtcctcgatatccccggcattggtcaggttacatcttccttttcctgtgataaaaagctttttccccagcttttcatttttttctaataagacaacctgattgccttctttcgcggaacagatggcagccatcattcctgccgcccctcctccaactacgattacttgactcataaaactcctttatatctttaagattgtttacattccaacaaaagccgtttcttccggcagccaaaatacaaaagcccgaacacatccgccaaagcccatccgatgggaactgcccaccaaatcccaatcaaacctatggcaggaacggctgacaaagcataagctaacagaactctgctccccagggagatgactgtaagccagatggaaactgcagagcgtcccagaccccggtaaagtccgtagagcagaaatagaatcccaatacccgcataaaaacagcccacaatatgaagatactttaccccgatggcaatgatctccgtctcctgcggtttgatgaagatcagcataagctgcctggcaaacgccaccacgatcatagatgcagcggcacaaaaacagacagagatccccactgccaagcggagaccatttttgatacggtcaggttttcccgctccataattctgcgcaatgtacgtggtaaacgcattgccgaaatcctgtgccggcatataggcaaaggcatcgatctttactactgctgcaaaggctgcagaggttaagaatccaaagctgttgactaatccctgcaccatcaaaattccaagattcatgatagactgttgtatggctgtcaaagtggagttattgatgatcattcccaaaagctcccggctgtagtacatatgacagcgcttggggcacaattccccttcttttacaaaaaaatagaccgtaatcagggctgcggataccccctgggcaatgacggtagcccatgccgcccctgcaatccccattccgaattttaagataaataccatgtccaatatgatattcaggactgcggaaacagcaagaaacatcagaggcgccactgtatttccgatactgcgcagtacactgctaaaaaagttatagatgcagacaaaaaatatcccgaaaaagataataaacaaatattcccgggtaaaaggagccgcttccggaggaatatgaagccaaagaataatctcatccagaagcagaaacgcaagccccgtgattacagcggccactgcaaaaataaagacaaaagcattgaccaccgctgtcttcatccggtcttcctcccttcgcccataaagctgggcaaataccaccccgctgcccatgcagagtcccaaaaggatcgacgtcagcagcaccatcagcgcataagccgatcccaccgctgacagagccgcagccccgatcgtccttccgacaatgagcgtatcggcaacattatacagctgctgaagcagattgcccaagatcataggaaggctgaataaaatgatggagcggccgatcctgccattcgtcaagtctactcgcattgatacctccattatacactgaatgctgccacattttcttgagatttgtttatagataatctctaaacaaggcacaattataaatcttatttatacgtcctggcagccttgttttattatatagtatcagattattttaagcaattgcatatctttaaattcctaacctgaattccgttctcttgaggcattgccggactttatcattaatgctatactgtttgaaagaattataagaaagcaggagcatttatgaaaacatcagattttacgtttgaactgccggaggaactgatcgcacagaatcccctggctgaccgttcaagctcaagattattagtattggacaaagaaagcggggagatcagacatgaggtctttaaaaacgtggtcagttacctgaaaaaaggggactgtctcgtattaaatgacaccaaggtcctaccggcccgtctgatcggagaaaaagagggaaccggagctaaaatcgaggtcttgctgctaaaacgaaggcaggacaatgtctgggaaactcttgtaaagccggggcgaaaagcgaaacccggaaccaggatctcgttcggcggcggaaggcttgtaggagaagtcactgacattgtagatgaaggaaaccggctggttcgttttgagtttgagggaatctttgaagaggtgctggacgagctcggacagatgcctctccctccatacatcacacatcaacttgaggataaaaaccggtaccagacggtctacgccaagcacgagggttccgcggcagcacctacagccggcctgcattttactaaagaccttctgaaagagatcgaagaaaaaggggtaaggcttgcctacgtcaccctgcatgtgggactgggcacattccgtccggtaaaggtagaagacgtgacggatcatcacatgcactcagaattctattctgtggatgaaacagctgcccaggcgatcaaccaaacccgggaggacggcagacggattatttccgttggaaccaccagtaccaggacgctagagtccgctgctgatatggacggacatattaagcccaagagtggatggaccgatatctttatctatccggggtatgaatttaaagtgattgatgccctaatcaccaacttccatcttccggaatctacacttttgatgcttgtttctgcattggcaggcaaagaacatattcttgccgcctacgaagaagccgttagagaacggtaccgctttttcagctttggagatgccatgtttattcaataattagtatctgaataaacccacaagacgcagaaatactgcgttttgtgggtttttctggtcaatgccgcaccttagtggtcaggaaatccagatttcggttataagtaaattttttattccacaatatgacgccaacagtttaaaagccgttgcaaataccaaggtactagagtaaaataaagacaaaaccagacggaagaggaggttcccattatgaaaaaagatgtattagattttgttgttgcaaaaacccacgaactgatcgattcccctacctgcagccaagagaccaaggaggctgccaatgcctggctgaatgctgtggataccgaaaatgaagccgaagagacaaaaaaatacattgccgagttggaagaagacattatgcccattgacacattgatcggttttgcagagtccgaagcaggagctcaggtttttgggacagataaagcgaaagatgttgcggcacacgccaaagagatcaagtcaaacggagctaaatactgcgactgccctgcctgcgcagctgtagccgccatcctggaaaagaaagaccagctctaggaaaacaaaccaaaatacataactccaacaaaacccggatatgcagcataacctctgcatatccgggttttgttctgttctgaaagttcttaatcctggctgtaccaataattcttaaagtcatattttaatacacggtaggcatatttatccgcgtcataggtaaatttcccgatcagattccctttgctgtcgtattcaccgtaggatttatccatgccgctgctgtaggtaatgtttccgtgataatgctggacactgctcacaatgctggaataaggcagtgtaaaggagctgacaagcttgtaggttcctttgctctcatcgaccaggtacttatagtacatagactttgtgccggattcaaattctccagtccctggatacagactccagtcaaaacttgtgtaagcggaggagcttgcgtaattgttgttaaacatatagaggtaatactgtccatctgccagggaatcatccttttcataagtaatcgtgtgctgtccggcctgggccacaaatgtgccgctctttttcagctggtatttttttagccctgtaccttcatagaggctgcccccgtggattagataatcgatggatggacttttataaatattcttcatcttgatcaccgtgctctgttccctgctgcttaatacaaggcttccgtcctccagcaggtcaaaagaattcagatgaagccagtcaagctccgtccccccatatgtgttttttccaccttccctttgcttcgccgtctttctgatctccttaaaatagtcttcaaaatcgataagtttctccaccttcccagtttttacatccaccgcgatcaacacatcttctatggtatccttattcttgtcattaaccaggcagaggatcttttgactttcctcgtcataggcaaaatcgtggtgtaactcgtatccgtcgatagagtaagtcttcgtcacctttcccagtccgttgacaagcgcgattttgtcctcctcataggaataggccatctgtccgtcgatgaacaaaaggcggtctgaccggtaggaattcagaggaatctttcctctgatggtgccactgttgtcgtatagataaatattggcgttgtcggttttatcatgtcccagcatggcaaacagtccattggacagcttcgtggtcccgcttccgctgtttaaactggaaaccgcaggaatttcggaatccgccgctgttgtcacccggaaagcttccttgtaataaatgttttgattcttgtcataaaaggtaagcaccacttgattcgtcttgcccggcacaagccctgtgatcaagaactcctgctcatctttcttgccgctgttattcttcagggtatacgaatagtcatctttcccctcggcccggaccgtacactttaccgtgacttctttggatgaagtcccgtaaaaatatagggctcccgtattggtgccgtacggattcataacgaggagcggatccttaacggtatacttctgttttgttttccacttggccagctgctggtctgtctccttctgataagcctttgtataaatattagtttctttatgtttgacagttttcaccttgctgcttatctgttcaggcgcaggttctgcccaaacaagaggcagcaggttccggctgaacgcgaaacctgctgctataatgagtcctaatagaataatataatgctttttcttcatgatactccttcctttcctttgatctgacaggaatagaataccagaaatattttgttaaactttgatggttttgtgataattttgtgtatgtcttagtttagtcccggaataaatatccttcaaaattatacttcatcactctgtaggaatacttatccgcatcgtagccaaaggaatagatcagctttccgtccttgtcatattccccaaaggttttgcttgttccgcttccgaaagaaatgttgttcttcatgtgttccacgctgctgacgattggggagtaagggatcgcaaaggactgcaccagcttatacgttcttttgttttcgtccacaagatacttgtagtacatagacttttccccttccttcattgttccggtccccggaaacatactccagtcaaagcttttgatcgttgcggaataaccatagttgttattgaacatatacaggtaatactgtccttgtggaagcgatttatcatgctccactgaaattgtatgctgccctgcctgtcccacaaagctaccttcttttttcagcatatatttctggtagtccgttccattgtagaccgtacctccatggatcagataatccacttccggtttctcaaacacatttttcatcttaatgagtgtgctctgctccctgctgctgaatatcatgctgtcgtcgtcaatcatattcatagagtttaaatggagccaatcaaggcctgttccgccgtaagtatttttctttggacggtaggccagattcctcatggtcttaaagtaatcctcaaagtcgatcagctcttttacctctcctgtctttacatctacggacactacaacatcttcgatcgtatcctgttccttgtcgtttaccagacagatgaatttattctgcttttccgcgtacagaaagtcatgatgaaattcatatctatctcccaggtcataggtttttgtgaccttgcccagccggttcaccatagcaattttgttaaaatcataggaatatgccatgtcatctcctacaaagagcagacggtctgtacgatatttattcaaaggcatccggccccggttcactccattgttgtcatagagataaatattggcgttttgcgccttgtcatgcccgagcagcgcaaacaggccgtcctccatcttttgtgcagaacttcccttggtctttttcagaattctgggtatcacatcatcttctgggatatccacataaaaatattgcttctcaatggctcttttatcctcattaaaaaattccatggtcaccttatttcttgtgcccgctgaaagtcccacgatctggtactcatgggttgtgctgtatttctttttagctttcaaagtatgcttgtacacggcagcccctgcatcgggagcctccacggtgcacacggcataagatgcgcggtccgtctttccataataatatagagctgtagtgttggtcccataagcattctggaccaccaaaggtttttggatggtataatttttcttcttttgttgatcaatctgttcctgtgattcttgttgataagcttctgtaaacacatccttttccttgtgttccaatacctttggcgtaaccttgatctgtcttaattttacaccctttaaaaattgttcttccttataatctgcgtagatacggtatccgaagaaccccgctgccataagaatcagaatcgccagaatgcatatgatgatgtttttctttttatttttttttgtctctgatttctgcatttcttcaatcattcctttcaaatagctcatttctttcttatcctcctgtgacattttcaacggtattatatcatatcttcacaatatatgtaactattttgtaatatttttaacacaaatgaaaagaagagtagaaaaactgcagtaatcgcacttcctctactcctcttattattgcccctagtggcttacttatgccctaagctcaattcccaatgtttttaattcatccagaatcttatcgacaatcttgttgatctccgcttcctccagtgttctgtcctgggcacggaaggtcagtgaatatgccacagatttatatcccttgtcaatctggtcgccctcatagacgtcaaacagttcaaagccttccagaagctttccgcctttctccctgaaaatcttctcaatctgtcctacaaagatttcttttctcacaaccatgctgagatccctcttcatagccgggaattttgccacgcctgtatatttgcggtcaaaggtcgccttctcacaaatcaccggcatatcgatgactgccacatagacttcccccttcatatcataattttcaacagcctgaggatgcatctgtccgatatatgctgctctttcccctccgatcagcacatcggcctggcgtcccggatgcataaatggatggtctttgaccggaacatattcagcctgtccgccaagtcccagatctccaaacaaatcctccagtgcccctttcagtgtaaagaagtcacagtctccgtacattcctagtgtaagctgcatccgttcctccggaagctcagtgagcggcagttccttcggaagatagatattcccaaactcatacaggcgcacattttgatttctgtggctgtaattgttagccaaagatgtcatcataccgtttaatgaaactgtacgcatgatgctgaaatcctctcccagcggattggaaatcttaatggctttcctctccccagcgtcttccggcagcagaagcagatcaaaaacttttggactttcaaaagaatagcacataccgccgctgaatccgtttttctctacagagtcgcgcgcaatatcctccacacggattttaaacggctttttacccgcggtggcctctcctctcggaagagtgaccggaatgttatcatatccgtagaatcttgccacttcctctgccagatccgccatgcagtttaaatcctggcggaaagacggaatcagcagtttgttggtatccacatcatatttcacgtcaatccgtctgaagtactcgatcatatcttccatagaaatctttgtgccaagaagggcattgattttgtccgtctccaatggaagagacaccggctgttttgggtttggatatacatccacggctccaccgatcacttctcctgctcccagttcttcgatcagctggcatgcacggtccatagcagccatggcattttccggatcaagccctttttcaaacttgctggaagcgtccgtcctaagcccgattcttttggaggaaagacggatattggtgccattaaagcaagcagcttcaaataataatgtcttgatatcatccgttaccatggaattctcgcctcccatgattccggcaagtccgacttccttttccccgtcgcagatcatgagtacatcgctgtccagatttctctcctcaccgtccagggtagtaaacttgtcaccgtccttggccctgcgcacaatgatctcatttcccgctatggtatctaagtcgtaggcatgcataggctgtccatactcttccatcacatagttcgtgatgtccaccagattgttgatcggacggatacccatggccgcaagccttctctgcatccattccggagacggtgcaagcttgatattctttacgactctggctgtatatcttggacaaagatctgtatcgtttacggtcactttgatatagtcattgacgtcctcatcgttgcctgtctcttttactaccggcggatggaactctttgtgaaatgtagctgccacctctcttgccatgccgatcatactgaagcagtccacacggtttgaggtgatctcaaattccactacctggtcacgaagacccatggcctccacagcgtcatctcccggttttacatccttcttaaatatataaatgccgtcttccggtgcctccggatacatatctttggttgttcccagttcttccactgaacacatcataccgaaagatgccacacctcttaattttccttttttgatcttgatgccattttccgggttcgggcttccatcgtggcctccggccactcttcctcccactaaaaccactgggactagatcaccctctgatacattgctggcacctgtgacgatctggatggtctctgttcccacatccacctggcagacgatcagcttgtctgcatccggatgcttttcaacggaaagaatttttcctaccacgatcttttccaggtttttatctaattcctcataacattccacatttgatccggaaagtgtcatcttgtccacatactcctgaatcgtacagtcaagatccggcacatatgccttgatccatgaaattggtgtattcattctctattctccttcaatcattataagttatttaccactatttccgtcacgcttttgaaatgcactcctccaatagtggtaaataactatcgtaaagcagcacatttttttgacagaggcccttctccagaagacattacgtccattttctacatgattggagtgaagcattctaagagccgaacggaaattgccgctttagaactggcttaaaaacctcttgtcattttcataaagcaggcgcatatcatcaatctcatatttcaggagcgccacacgttccagaccgattccaaaggcaaaacctgagtaaatctctgggtcgatcccgcatgccctgagcacatttggatgcaccataccacagcctaagatctcgatccagccgcttcccttgcacatacggcagccctttcctccacacttaaagcaggtgatatccacctccgcgcttggctctgtgaatgggaaatgatgagggcggaatttgacttttgtctccggtccgaaaaattcagtggcaaactgttcaagtgtccctttcagatccgcaaaagtgattcctttgtccacgaccagcccttctacctgatggaaggacggagagtgggtagcatccacttcgtctgagcggaatacccttccaggcgcaatcatacggattggcattttaccagtctccatcacacgggcctgtaccggtgatgtctgtgttctcaataagatatcttttgagataaagaaggtatcctgttcatccttcgccggatgattctccgggatattaagcatctcaaagttatacttatcgtattccacctcggggccttccacaacctcatagcccattccgataaataccctctccaggtcttccaaggcaatctggttcggatggcggtggcccttttcatgcacctttcccggaagcgttacgtcaatgacttcctttttgagcttttcttccatgatctttttcttaagaacagacatttcctgctccagtgcctgttcgatgacggcacgtgtatcgttgaccatttgtcctacgataggacgttcttctttggcaacatccttcatgccctttaatacctgggtcaattctccctttttgcctagaaccgctaccctgatatcattcagagcgtccatggcatctgctgtgttgatcttctccaaggcttcttttttaatcgcctcaagtttctccttcataatcacttctccttgttttatggaattaaaaaaatcccatcccttatatataagggacgggaatcatctcgcggtaccaccctaattccaggtacaaaaacaacctggctcttagtatcctgcgtaacgtgcaggcggcgttatcccctactggtctttcagggatacgactccggtgtgaaattcgggaaagacttccttactgtgcaccttctctgtctttatcattccttattttatcacacaaaagcggaatgtcaagacggaaaaccgattctttatctccccatcagccctgcagcgcactgtggaaaacagcctcatacaaaatctgataatccttcatggtaaatgccgatacatgaaaatcaggcgaggacagcttctgtatcttctgctggatgacctctaagacagcataatcaatatccatgtgatccatgacatttttggaaaaatcaaaatcatgtttcttctgaaataagatacaatttgcatgaaaaaggaattctaagatcaggctgttatttaacttaatattaagcttctttgcaattgctctcagagcacggaaaaacagttcattcgttgtaaacgtattgattccgggggtaagcttggacgcaaacaagagatgtttatccgcggatcttaaagtataactctttaactggttatcttttaatatctttatctcatcattctggcttattaacagatttgggatgatggaaataatgctggcatttttcttcacagacagccttaaaatctctttcaccagaataaaggaatgaaactggacattataagacaataccttcgtcttaggaaaaaagtaattggtaatggtttgtttcatatctgcgtctgataagatcaggaccccctgcccccgattaatactgaccgcaaattcatataagttctcaaggttcgttcgtgtctcatttctttttccggataaaacagcaggaaaggtatgtatgattctccggtcaaaaaataaattgaagatatttgcgtaattgcttgccagcaaatgatatttggaggtaataatcacaggtatatggatatcactcatgatgaagtgggcatatgtcagtatagattgaatcattttttcttgggtttttgacagtttgcagtggtttgtctgtgctaattgaagcagattgttgaacagtgatttcatctgcggtgtttgaatatccatagaagaggtttccttcacaatatccagacttttatctttccggaatacagataggatcatatgttccactttttcttttaaaaatgggtcctggcagaatacacttttattgaatgcctttgtgatgcccgaaataagcctatcgccggaataactgttctcagatacaacgccagtcaccctggaacagatcagcagctgctttgtaaaataatctgaaactatattttttgtttcagctaaaggctcatgggagttaagaaacaatttattaaaatcaatttctccgtttggtctgatctgtatcttgtcagggatttctgcctttagttcaggaatggattttataaaatcatccctttcattatcaagcaggaccgatgcatctaacataagttcattgtttttgcctgcagtacttgatgtatagagaatccttgaaattgtatataaaatctcattttctaattgatgcaggttgctgcacttatgtaaaaccagctgaatgaattgggaagataccaacattgttttatctaaacggttgctctctttttggatcatactcaatagaatcgaaatcaactctgtttgcggacggtcttttgcggaaggaaagttcaggatgacaggactgatggaatgaagcaggtccgactgtaattctgatgccccaataaaggcgatcatcggcgcgtcttttttatttttatattgaatttcaagagaatgtacaaaaccgcttaagatttcaaagtctacgtttttttgaacaaactcgattgccaggataaaaatattatgatccttttccatcatctctatgctctgccttagattgacgtagatatcgctgaattcaatataataaaccgatgattcccgggcagccaatcccaacgtttttgcacggtttaacatttcttctaagaaaaacttcttccccgtcccagcttccccctgcataaaaaagatcttaaagaaatatttagggagataaaacacaggcaggattctggttacagcttcatataaggacccattttgctgacttccgaccatagaaaacgactggacgatggtctgttcttttgcaggtacgtcatatcggatgaagtctgaaatggtttcatttttattcaatgtatcagggatggatacaaaaggaaaagagttccggatgatctctcttgaaataaaagtggtggggcgtcctgccttcttgattaattttccttctttgtgcagatcatttaggatacgtgacacatttgtcctgtcaatatataactccatcgacaggataagcgcattgcatttttcaaaggtaaaattatgatgattgatgcattgcaaggtttcttcttttaaataggataaaatcttctctttattcgtagacatggccatatctcctgcgtatatttggtgctgattacggtgtttctataacacacataaattaaatcagacgtaattaatatacacttatcatacacgaaacttaaaatttatgcaaaatccacagtaaaaaactcaaatagagtgtaaatcaagtgtgtatatagaaaatttgcgtatataaagattgtgggttaggatatgcccaagtgatgtaagcgcatacagaacgaattaccatttaacggataaaggaggatgtagatgacagacattatagtggcgacacacggaggacttgcagaaggtatgatcgatgcattggaacttatgatagggaaacaggaaaatatatggtttcttggattgcggcatgaggatagtattgatacttttatcaaaagggtcgattctttcgccgcggacacagatcacgatatcttattcatgacagacttattaggagccagcccatacaatgccgcagcccaggcgattcatcataacagggacaaacatgttatctgtgtgtcgggaattaatttatctatgctggtggaagcagctttgaaaagaaacgatatgaaactggatgatctggcagattatcttgttgagaccggaaaacagggaattgctaaattatcattaaatatggagagaggagggacattatgagcaaaatagtattatcacggattgatgaccgtttaattcacggccaagtcatgacagcatgggtccagcatgtgggagggaatgaaattgtgatcgtcgacgacaaagtcgcaaaggatccatttttaagcgcagtcattacaggtgcagtaccaaagcacctaaacgctcaggcaatgactattgacgacgccgcagagtatttagaaaagataaaagatgaggataaaaacattattattttagcaaagggacccaaggtttttctggatttgcttgaaaaaggtgtccaagtaaaagaaatcaatttaggcggaatgggttctactcaagaacgaaaaaaattatataaaaatatttctgcaagtgatgaagaaagagatatgttgaagcaattgtcagcacagcatgtacatgtctatattcaggtcgtgccaaatatggaaactgtagagataaataaaatactttaatcggagggagaatcatgcatatttcaattttacaggcagttttgattggcctggtctactatttgggagcaaatgggacaccatggcttactgttaacatgagctgggcgttgagaaggcctttaatatccgggatcctggttggtcttatcttaggcgatcctgtcaaaggctgtatggtcggtgcggcgatcaatgtaacctatcttgcacagattacagcaggcggcgcccagaccatggatgagggtctggcgggaactgtcggaacagcactggcaatcatctcaaatgcgtccacaggagtcgcagtaacacttgcagtaccgatttccttactgggcaacttattatggatgatttatatgacaggggatattttcattgtccatagaaccgataaaatcgcggagacaggagatgtaaagaaaatcattttctataacatcgttccttcccagatttttaagtgcatcatttataccattccggtggcaattgccgtatacagtgggtcaggtgttattacaagcatgctgcaggcattaaagggaacacccgtgattgatgtattgactacgatcgggacaattcttcctgcccttggtattgcaatgaattttaaagccatcttatcgaacgctggggcaaaagcatacttatatctgctgttaggttttattttatctatttatatcaacctgccattggtggtcatcggtattttagcagtgattatagcacttttacagaacagcgaaagttcagctttaagttagggaggaatcaacatggaaaccatagaaaaaaagagattaagtaaaaaagatatcatcaagtcctatctgatctggacattcttcagccattcaacctacaactatgaacgaatgcaggcctccggggtactgcataccctggcgccgagcctggaaaaattatacggaaaagagacacaggaattaaaagacgcatgcaaacggcacatggagttctttaatacagaacctaatgtaggaggctgtatcttagggattactcttgccttagaagagcaaaaagcaaacggtgaagatgtagacgaagaaatgatttcaagcatcaaaacaggtttgatgggacctctggcaggcatcggcgacacaatctggcagggaacgttatcccccatagcattgggtattatccttggaatggcaaaggccggaaacttcttaggaccgatcatctacctgataatcattggcgttgtgttattcggccttggttacttatcctataccaaaggttactatatgggacgcgaaggaatcggaaagatcatcggaagcggtttattaaacaaagtaaccgaaaaagcaaccatcgttggggcaacggtactgggaggactggtggcatcttatgtaactgtgtcctgcggattaaagttaaatttaagcacaggtacactggacgtgcagactgcagtatttgacagtatcttaaaaggtatcctgccgttgggaatcaccctattaactgtatttatgttgagaaaaaaagtcaatgtcaacatcatattactggtgctgatcctaattggcacagtgggaacactgatcggattcttttagaggataaaccatgaagattatactaaatgctgacgattttggattgactcatgaagcaaatctgggaatcgcaaaagccttcgatgaaggtttctgctcccaggcttctgtggtgaccaacacgaattattttgatgaggcagtgtccctggcagaaaaaaataactttaagcacaaggtcggcttacatatcaatctgttcgatgggaccccgttaacctccgggatcaagaaactgaaacaatatgccagatcagatctgtttgattatcatccagactttcttcacagagtgactccaatctatacagatgtcatcgcagaggaattagaagcacagatccaaaagtatctaagcggaggtttttctctgatgaatatcgactcccaccactgtgcattttatgatattccggttctttacggattgatgcccttggtaaaaaaatataaatttgaatctgtccgttacattggaaacagtttttttaacgggagtaaatggcggcatttctacggcgcccagtggaagaaaaaaatggatcagctgcatcttcgtcatgcaaactattccagcagtgtggccacctttgataaaaaccgcaaaagccggaatcctcagcttatgaaggcaaagaaggcagaggtatacgttcatcctgttttagttgagggatattttattgataactacacaggcggtacgcatcttgaagatagttttaaaaaggccaaattagacaaaatgaaatttattacatccagagacttataaaagaaagaagagataaaaatgaaaaaggaagaaattattttaggaatcaaaaaaaccggcttaatggcaatcgtccgggtggaaaccgtggaacgtggttatgagatcgcccagggatgcctggatggcggagtcaacgttcttgaaatcagctataccaacaacaacgccggagaagtgatctctgctttaaaaaagaaatataaggaggatctgctggtcggcgcgggcaccgtcctagacggaacaacggcccgccttgcaattatgagcggggcacaatttatcattgccccttgttatgacgaaggtgtcgcgcaaatttgcaacttataccagattccatatgcgccgggatgtacttcttatacggaaatgttgacggcactaaaggcaggcgcatcctttataaaggcatttccaatctccaattactacggccccagcttagctaaagtggtaaaagtgccatgcccccaggtgccggtcatggcgtcgggcggagctgacttcgacaaccttgcagagtggtttgaaaacggagctgactgcgttggcctgggcggattacttaccaaaggttccacagaggaaattgcggcaaacgcaaaaaagctgcgtgatattgtaacagacgtaagaaaaggatgagcctatgaaaacgattctagtaacaccgagagggtatgcaaaatacggcagtaaagcaggaaaacgtttagaagcacttggctatgaaatggacgtcaatcatacaggcagaccacttccaaaagacgtgtttgcagaaaaagcaaagcgggcgtccgggatcatcgcgggtgttgacgaactgaatgaagaactcctccgggaatgcaggcacctaaaagccattgtgaaattcggggttgggaccgataatattgatcttcctgtctgcgaagaactagggattaaagtcggccgctgtattggaacgaattccaatgcagtcgcagaactcaccatcggaatgatgtttgcggctgcaaggcatattgtgagtaatgctataaatgtcaaaagtcacggttggaacaaaccaacaggactggaactctttcataagaaaattggaattatcgggtttggtaatatcggaaaacatgttgcaagaatagcaaatgggatcggaatggaagttctgatctatgatatgtttgacgctgcccaagatgtactggctgaatacaacgcacaacaaacatctgtggaacaaatcctgaaggaatgtgactttatctccatccatgtgcctcttacacaagagacaaaggacatgatctcaaccaaagaatttaaaataatgaaggacacagctgttttagtaaacgcagcccgaggcggaattgtaaacgaatatgcactttacatagcattaaaaaacaaagagatctacgcctgtgcatccgacgtcttcacctcagaacctccccagagggaaccttggattgatgagctgctcaagatggatcactttatccagacagcccatatcgcatcccgttcacaagagtctgagatcaataccgtaaatgcagcaaccgacacgatgatacaacttttacagaattaaagtaattaattctccagaaaaaagatcttcctgcagacatctgcagaaagatcttttttacatataaattctaattctatttttttaatgtcagcacttttgttccggcttccaggtgcccggtattttctatggtaatgcttgtatactcttcactgttgctcaccaccaccggtgttgtgacaaaatagccctcctgtttgatctcttcaagatcaaactctgcgatccggtccccttttctcactctcatgccaggctctaccttcacatgatgatatttcccggcaagtttcaccgtatcaattcccatatggaccaggacctcagcaccgcccccggacgtgatgcagatggcatgctttgtattaaacactgcagtgaccgtgccgtccacaggcgaaattacctttccgtcagaaggccttatggcaaacccctgcccaagcatcccttccgcaaagacctcatcttccacttcatctagttctactacttctccattgaccggcatacagacagtttccgctgccacttcgggcacctcttctgccacagggactctcggtgcttccgccactctgtcagataagctgcttgccagataatcttctaggttggactttatcacagtgaccagcggtccataaatgatctgaaccccgtcacctttctttacgataccccgggagccgctctctctcaagattctgtcgtttaccttgccaggatccgagattgtacacctaagacgcgtcacacagcagtccacatctttcacatttgatttaccgcccaggccggcaacgatcagagccgatatatcagacccgtcaatatctatgtcaccctccaaaggtttttcagacacatctgctctggtatataattttacattctgctcttccttttcccgccccggcgtcttcagatccagcttcctgatcagaaaactgaacaaaaaataataaactgtacaatatacaatccccaccgggatgaacataagccagtttgtcttggcttgtccctgaaggatgccgaacagaaacatgtcgatgatgcccccggaaaatgtcaggcccacacagaccttcagaatatgcatgagcatatatgcagctcccgcgaaaacgcagtggatcgcatacaatccaggcgccacaaataaaaaggtaaactcaaggggttccgtgatacctgtgagcattgacgtcaacgccgcagaggccagaaggccggccaccgcttttcttttttccggccttgcacacctgtacatcgcaaatgcggcacccggcagtccaaagatcatcaatggaaatttgcccgtcataaatctagtagccgaaaccgcaaaatgagttgtcccaggatccgccaactgggcaaaaaagatattctgggcaccgtcgaccatctttccgccgatctccattgtaccgcctaacgaagtctgccagaatggcagataaaacacatggtgcaggccgaacggaatcagtgcccgctccataatcccgtagataaacgtgccgaaatacccggaagcgctgaccatgccccctgccgcgtacattgcatcctgaatgggaggccagataaaatacattaggattcccacaaatacaaatacgaccgtacagatcacaggcacaaatcttgtcccaccgaaaaaggacaatacttccggaagcttgattttataaaatctattatgcagcgcagaaactccaagtccaacgataataccgccgaacactcccatctgcagggaggtaatccccagaacagaagccgttgcaccctcacgcatggcttctgctcctccgtttaaagaaatcatagccgatatggctgtgtgcatgataaagaacgcgatagctcctgccagtgcagctacttctttttcagctcttgccatacccacggctactccaatggcaaagatcagcggcaggttcccaaacacagcatttccgcagtctccgcagactttcaagattgcgtacggaatcgtatctggtcccataacccccatcaggccataggcattcagcattgtttcatttgtcagtgattgtccgattcccagcaacagcccagccaccggcaggattgcgattgggagcatgaaggaccgtcccacacgctgtaatacaccgaatattttgtctttcacattttccctcctaaaatacctcatatcaaagacatacctgattttcggctttataattcagatcacagcgttgcgatcataatatccattgtcccgtcgaaaacagtttctttctgatccgaacagatcaggaaatgatctccctttttaacactctgtccatcgatcatcccttctccttctatcacgctgaccatctggaacggcacatggttttctactgtatttttacccgtcaaccgatagcagtccactttaaaaaattcactctcaacatatcttactttcgttccgttttccagctgagtttcacagaaggatttgctgctgccaatctgtgcaggcacattggtaacatctatggactgctgtacatgcagctgtctttcatttccgtcctgatccttgcggtgataatcataaacgcggtaagtgatatcggaagactgctgagcttcatagatcaaagatccgctgcagatggcatgcagtgtcccggaaggaatataaaagaaatcccccttctcgatggcaaaggaattcaggagattgtcatagtcatcttcctcgattgcttttataaactcatcttttgtttttgcgtgatgacccatgaccatcttagtgccctcatctgcctgaagcacataccagcattctgtcttgcccagagagttttcgtgaacccttgcatactcatcgttgggatgaacctgtacggataagtcatctctggcatcaatgatctttaccagcagaggaaattcctctccctctatattgccgaacagttcccggtggtgttcaaagagccatgacagtgtcttgccggcaaactcaccgttttcaatcgtacagtcaccgtttttatgggcagagaccgcccagcactcccccgtatggtcactggggatttcgtatccatacacatccttaagcttatgtccgccccagatcatttctttaaacaccggtttcatttttagaatatgtcccataatcttgttccccctaattcttactttccgaatttagatttcagtttctttttgatcaccccaaaaaagctcaaagaacgtaccatatggtcagatgccacatattgactgatggcacgcagtacctttttcggctcttttgatgcaaaagaataagttccattttctttcgtctgtattgcataccgcggaatatgttttcccttgaacataactgaggcaatcacataatcaacttccttccagggtatctgaatataatcatttacattccggtcattataaaattcaaaacccttatccccgatcatgatctttccgtaactgttgagaccgtgataggaagttccgttgatcaccagatctacttttgtgtttattgactgagccatagcagctaactctccatttctatatttattcctcacgcatactgcgcagcttttgtaccttacacattatatcatgatattgttcaccggagaatattttcttccattaggaaaacccgcagaactttcctaatggaagaaaaaaagttcggattgctccgaacttttttcattggcctataacaatccgataacgtgtccgccaatacctactaagaataatgcaatgatgataatgattggtgaaacattcttcttcagcagccacatacagaataatgttaataacaatggaactaatccaggaatcagtgaatccaagttgttctgtaaggttgtaacctttgtcgctgacagtgacaaacctgatgcgtactgctcaaatgcctgctgaataccttttgcaccttccggaagcttagaccagtcgatgtacgctccatcactcaaacttacctttgatactaccggttggaaactaatggatacccaccgctgaaccagcgatccaaggataaacataccgaggatagatgcaccttttgtgactttctgtaacagtccgccggaaagatcttctgtgatctttgcaccagctttgtatccgaattcctgtgtgtaccacatgaatccccaacggatcacgttccacagtacgaagaataagatcggtcctaagatgtttcctgtcattgccagggaagctccgagagcaccgagaattggacgtacagtaaaccagaataccggatcaccgacaccggccaaaggtcccatcataccgactttaacaccctggattgctgcatcgtcaacctctgctccgtttgcacgttcttcctccaatgccagtgtaacaccgataaccggagaagccacatacggatgagtgttgaagaattccaaatgacgttttaatgcctctgcacgttcttcatctgtcttgtataatttcttgatcgccgggatgattgagaatgcccagccaccgttctgcatacgttcgtagttccatgatccctgaaggaaggtagagcgcaatgcaacggacaaacgttccttcttacttaatgtaactttttctgccatttttcatacctccttcaattaataattatttaagatgtcgccaagcggatcacctgtattgcttcctcctccgttggaagaaccaccgctctcagacaatgttaagtagatcaatgccagagatacaccgattgctcccaatgcgatcaaagtcagatctgaaagtgcggctacgcagaaaccgatcgcaaagaacggccatacttcttttgtagccatcatgttaataaccatcgcataaccaacggctacgaccattccaccaccgattgccataccgtctgtaagccatgccggcatagatgtcaggaatttctgaacggttgttgccgggataaacagaagcgctcccgctggaatcgcaatacgcagaccctgcatagcgatggcaatgatatgccaaagctcaacacctttgaaattggctttttcagcagctgcatccatacggtgaacacatgctacggaaagtgtacgtacaaccattgttaagaataaacctgcaactgcaagagggattgcaactgcaatagcagtgctgacacctgctgtaccctgtcctccgagaaccaggatgatagcggaagctacagaagccaacgcggcatccggggcaacagcggctccgatgttcgcccatcctaaggcgatcatctgtaatgtaccacctaagatgatacctgcctctaactgtccggtcacaagtccaattaatgtacaagcaaccagcggctgatggaactggaattcatccaatactccttccataccagctagaaaggcaactataataactaatactattgatataactgacattataattcctcctctataatctgaatgtgtgaagcttatgataactcagcttcagcttttttgatgatctcatccatgttttctttggaatcgctcggtaccttgcggacatcaaaggtaattccttttttctttaactctgcaaaggtctttacatcttcttttcccaaggaaactactttgctcactgcaacttttccaacagagtgagccatggaaccaatgttcagctctttgatatccactccgccttcgatggcacgcagggcatcctgaggtgtttcaaaaagcaacagtgcttttgtatttccaaaacgcggatcttttgaaacctcgatcattttgtcaacaggtacaacgttggcgcgtactcctggaggtgcagcctcctgaattaattttttacgaagatcatcatgcgctacagagtcagacacaacgatgatccggttcggctgggttgtctttgtccatgcagtcgcgacctgtccgtggagcagacgggagtcaatacgggcaagcacaaacttgatatgtccgtcccctaataccgttccttccggaattgctccctgaggctgtgcaggctgcgcagccggcgcttctgtcttaggttccaatgattccggataaatccggaccccttctttaccgcttcctgcgatctgaactgcaatctcatgagcagtttccattgtcatacgtgaagcataggcgtcaatcagcatcggtaaattcaaaccggctactattgcccatttatcctcatgacctgataccaaaccgttggcctggttgaatggagtaccaccccaaagatcaactaagaacaacacttcatcctgattctcgaaagaagcgattgcatcttccatcttctttttgacatcgtttggcccttcgcttggctgcagtgtaacagctgccacatcaggctggtcaccgaagatcatggatccagactgcatgattccagtcgcaaatccaccatgcgtagcaagaataattcctaccatttaaacattcctccttttctagttatctttcggaatctttgttcttctgtgttccccgagaactccaatcccatttataaaatcccccgctgggggtgatttcctatgtaagcacaaagcggacaagtccgcttcaactccttaaatccctcaatcatgagggacttgttccgctttgcgcgccgatgtgcggctgcaaagcagccttccttggcacatcgtgtgcatcatgcccggagggcttttttattccatagggagaactttcctaatggaataaaaaaacccgactcaaacaacgaatcttttcttgatccatacaccccgacaactattgcgaaacatatggatttaaaaaatcctttggtttgaatcaggtttagcctgcattaccagtaacaatccttattctttatcaatatgaacttttatcttgtgacaacccgcttaatatgtacagtgagatacatcatctcttcatccgtgatatcgtggttgcatgtgttttttatataaatcctgatcttctccacacagtccaggcactcctgatacttgttccggatgatctcctggaactccgtatcatcactttccacttcgttgcccgtaaaaatcctctgggcaaaaaacttcaagtgtgtgatgaaccgctcgtaaaagacagattctttatccatctggtccgggaaacaatcatctacaatcttaagaatattttgtgtcagcttggtcatggaaaccatctctgtcatatccagatccagttctgcgttgacgatatgaagtgcgataaacgccgcttcatcctggggcagagtcaccttaagtttcctctcgatcataccgatcgccgcctgcccgatcaaatattcctggtagtagaatttcttgatctcccataaaaaaggattctggaagggaactcccatctctacccgttcaatggcaaaattaatatggtctgtaagagaaatataaatattgtcattgatattcttttgcaaagtgtctttggcatattgaataatttcattacatatttccaatcgctctatgggaatgtcctcgaccagctgctgaaagcggtttgtcatcccatggtctttcataatataagtcttttcaactttgtccgggtcgatctcatctcccggatgtccttgaaagcccaatcctcttcccattagtaccacttcacgatggctgttatcttctgaaattacaatattattattgataattcttgtaatttgcacagttccactccgtattgtaaaatattcagttaagaaaaaaaataaaccacacctattgaaatctatctctaaaaatcccataagttggtttagcctgcattaccagtaacaatccttctttctttattcccttaacttatttccaattttatcaaagcggccactctatgtcaaccactttctttataatttctttataaatttttaagatttattctctatcagacaacaaaaactctctcaaaagttcgggaatcctttatacatgcggtttacggcaattgtcagtctgccagcattttttcttgagtatttatagtgcttatggtaaaatatatgaactatttgcataaaattaagctttacccaattaatatgatctgagaggtattcatatgttaaagtttattgcccttctgaattcggtcatagccaaggcccagaaggatcacatcactgccttttctgcccaggcggcattctttacggtactttccttttttccgtttttgatcgtcgtactgagcctgatgcggtttgtgcctgtgacaccggcagatctgatcggacttgtgaactattatctgcccgaacagtacagtgaaagtctcgtggcggtcattaattctttatatggaaagataaccacaacttacatgtcattcacgatcatcaccttgctctggtcagcatccaaaggaatcctttccatgatgaccgggctgaacacgatccatgagattcctgagaagaggaattattttgtactccggtttatcgccacattatatattgcgtttatcgccgtagccgtgctgatcgggatcatcgtgcttttattcggaaataccctgctgaaccagctgtaccagttttatccgattctagcgacacagcacattgtatttttgctcattcggtttggcatcgcattttttattttctttttagtgttttttatcatgtaccgctttcttccaagcgaacactttaaagcaaagcaggtaatgccgggagtgatcttcagctccgcgggatggatcattttatcctcccttttctctatttattttgataactttaagtttttcagcattatgtacggcggtttgaccggtattctgctgactctgttctggctctatttctgtatgatgattctgttcatcggagccgaattaaaccagtacctcatgaaaaaccatagataacaaaagagaaccttttcttgttttgttcaagaaaaggttctctttttatgagttatttaccactatttccgtcgcgcttttgaaatgcgctcctccaatagtggtgaataactttcgaaaagtggctcctttttgacagaagcccttctccagcagacattacgtccattttctacatgattggagtgaggcattctaagagccgaacggaaatcatgtggaaaatgtcataccttatcgtgcgaagcacgcccaaccgaagggtatggaacacgggatgccctgctgggtatggttttagagcataaagtgctgcggtacaccgtctttatacggtatctgtacctccccctggatcagcggtttcagatagtccaccaactcctgtgtgatatcatgaccgtcttctgtaatccactcaatgggcactgttttctccacattagcgatcttagacaggtccgcaagtacaatatccaccccatatgtttttcccggcagccgcttgagggcggacatctttccgctctccccacggatagcgctgacagctgcataagctccaagattcctggattccataatgtctgtttcgctgagcatatatccggcgcagcgttgaagaatattcagttccacagagcgaaccttacagcctatctgatccgtgaccacctgctctaaatacttcccgattccggacagatattgatgtccgaaagcgtcttcctttccggacttcatctcttctccaacatatctgccctgggcatctttcagtccttcgctgactgcaataataatgttattttcttttttcagtgcttcttttacatcttccacaaactgttttgtactgaacgccttctcgcaaagataaatcagctgcggaacgttccgctcctcatttctcgcaagcgctgcgctggctgtgagccatccggcgttccttcccatgacttccacgatggtcacagacgggatatcgtaaacgtaacagtcacatgcgatctccgtgaacgcagtggcgatgaactttgccgctgatccaaagcccgggcagtgatccgtctcccccagatcattgtcaatggtctttggggcgcccatgatcttaatgtcatccactccgtgttctctgcaatacgtggagagcttatatacggtgtccatggaatcatttcctcccgtatagataaaatacccgatgttgttcttcctgagaatccggatgatctcctcaaattctctcgcgtcctcctcaggatttttcagtttccagcggcaggatcccagggcggcagccggggtgactgccagcagctcccttgtggccggatctttgcatatttcatccagccttacaaaattctcatttaagactcctttgatcccattcagtgcaccatacacatgccccacctcttcgaattcaagaccggtgtcgatgactccggtaatggtcgcgttgattgctgccgacggccctcccgactgtgccactaacatgtttttcatcctcgatgtcctcctcattcagttgcaaaatttctgtacaaattctatttttcattatatcgtgttataataaaaatcacaactgtagaaaggagactctgaattatgaatacacctttagcaaaacttcaggaatctatgaagaagaaaaatctaacctattacctgattccaagtgaagatccccatcaatcagaatatgtcgatgatcactataaatgccgccagtttatctctggttttaccggctcctccggtgccgttctcgctgaacaggacagcagccgtctctggaccgacggaagatattttacccaggcggaatcacagatcgaccgggatcggatggaactgatgaagatgggcgtctccggtgttcccaccgttctggaatatttggaacagcatctaaaagagggggataccctcgccctaaacggccgcaccatcaatacaacttatggcaaaaagctttccgccctgaccaccgcaaaaaaagcatctcttgagacaaaccacacactcgctgaagacctgtggactgaccggcctgccgctgccgcctctgaaatatttatacacgatgaagcatacgccggtgaagctgtatcttcaaaattaaaacgggtgcgaagccacatggaggcagtttctgccgaggcccatttcatctcttctctgccggatattgcatggatctttaacctccgtggaaatgacatggcctgcactcctctgttttacagctacgcctggatcactatggagggctgctttctgtttgtgaaggaacactgcctctcagacgctgtaaaagactatttagctaaaaaccatgtgtccgttttgccttatgaacatatcgccacattcttaaaagaacaaaaagcaagcatccttatggacccggatacggtcagctacaagctctaccttgaggtgaaaaaaaaccggatcctctttggagaaaatccttcttatgctatgaaggcagtaaaaaatgacgttcagattgagggcctgcgcagctgccatctttccgacggaatcgctatgacaaaattcatgtgctggctgaaacagaatattggctccgtacccatgacagaactttctgtttcggaccgtctggaagaggagcgaaaaaagcagcctttataccaggggccaagttttgacaccatctgtgcctacaaagagcatgcggctatgatgcactattcctccacggaggaatccaatgtggagctgaaatctgaaggacttctcttgatcgattccggcggacagtatctgaccggaaccacagatgtaacccgaacttttattttaggttccatcactgccgaagaacgcagaaactttacgcttgtgttaaaaagcatgctgtccctggcagacgccaagtttcttcagggctgccggggcagcagcctggacattctagccagggggcctctctggcaggaaggtattgactaccgctgcggaaccggacacggtgtgggacacttcctcggtgtacatgaaggcccgaatgccttccgctggcagatcagggaaaatcagctggatgcggtcctcgtgccgggcatggtgaccaccgatgaaccgggggtctatgtgccgggacaatacggaatccgcacagaaaacatgcttctgtgcaggaagcaaaaacagaatgagtacggctcctttttagaatttgaacacctgaccttggttcccattgacatggacggggttgacgagacactgctcagtgagaaagaactccatctgctccgtgattaccatcgtttggttttcgacagactttcccctcacttgaccgaagctgaggccgactggctgtacagtttcttaaaaatctaacaaagtgggcaagcccacctctgaactgacccccactctttgaggggcttgacaactttgagcaccaaatgcgatttgacgtagtcaaatgatttccttacgtgtcataggaggttccgtaggaatttcctatgacataaacaatgcccccggctggtttttcctgccgggggcattgttatgtcagacagttgggattaattccagacttcctctgcaacttccctcaccaattttaatttattccactgttcttcctctgtgagcttgtttccttcctccgtagatgcaaaaccgcactgaggacttaaacacagcctgtccagcggcagatattgttcggcctcacggatccgtttgatgacagcttctctgtcttccaaaaccggatttttcgtggtgatcagccctaagacaacttttttattctcacttacatgttttaacggttcaaaatcacctgaacgatcatcgtcgaactctagatagtatgcatccacatgttcttcaccaaacaagaacggcgcgattggtgcataacctcccttggaagcccaggtggaatgatagttgcccctgcacacatgtgttgtgaccacaagatcatccggtcttccctccactgcaagattgttcactttcacatactgcttcgcaatttcttccacggaaacctcatcctgctgacggttttcccaatatttaacgtcacagaacattccccatgtgcagtcatcaaactgcacattcctacagcctgcctcatataattccccgatcacttcccgataggcggctccaatatccgcaaccagttcatcttcatctggataaaatgatttagtgatcttggcgttgtctcctcttgtcagttcggcaagaagctgtgctggggccggaactgtctgacgggctgtgactgtgtcattctcctgttcttttacaaaacgaaaatgttctacaaaaggatggttctcccctgagatttttcctgtcagtactgctgtctctcctcttgtcacttcatcatggaattgatatccgctctcgatctgttttttctcaactccattcagtccccacatgaaatccagatgccaccagcttcttctgaattctccatccgtgatcacggacaggcctgctttcttctgcttttcaatcaggttaaggattgctttgtcttctgtctctctcagctgctcctgtgtaaggtttcctgcctgaaattctttcctggctgttttcaagccttctggcctcaaaaaacttcccacaatatcaaatcgaaatggtgctttatttttcatcgtatattctccctttgtcttattttctctatgttgtaagtatactttgtattgatcccaatgaaaaatataaaaaaacagcagtttgatatagtttaaaactatatcaaactgctgtttcttcttttacagctggcagcttagaacatgtcttttcagagcttccatatatgcttttccgtaccggctcagcatcatgtgcttctgctggatcgttccgatcctcatatgctcctccaccaacaaaggctttgcaatgatattaacaccgtttaattcctcgcttatgactccggaactgaccgtatatccattgaggcctatgacaaggttaaacaacgttgcccggtccctgaccttgatatttctgctccggtccaaggtgctcaaaatctcctcggaaaaataaaaagaattgtaatccccctgctcaaatgacagataagggtagtcctccagatctttcagggatagctcttttttctctgccagagggtgttttgaattaatgaaaacatggggttttgccagaaacagttcttcaaacaccagaccgttttgttttatgagcttcataataatctgttcattgatggatgatgtatacaaaataccaatctcacttttaagccggctgacatcctcaatgatctcatatgtctgggtttccctcaaagtaaaatcatactggtctccgccaaactcccggatcacgtccacaaacgcattgacagcaaaggaataatgctggcaggacacagaaaaacgcggactctgcttctttgcatttaaatacttttcttccagtaaattagcttgttccagaacttgcctggcgtaacctaaaaagacgtccccttcattggaaataatcacccctttgtttgtccttctgaatatggtgatctgcatttccttttccaaatccttgactgcgctggtgaggctgggctgggagataaacagctccttagccgcctcactgatggttcctttttccgcaaccataactgcatacttaagctgctgtaatgtcatcttgtcactcctttaaaaaaatgtctcgccaagggaaatcatgagcggaagagtggcaatcgccgcaatggtggatatggcaaacagttccgccgcataacccacatccttcttaaacttcaccgcaaacatggtcgttatggctgccgtagaagccgatgtggcaagcagtgacagaatcttaagatccttcgacacaggaacaaagatcaggatcagaaacataacaaacggcacgaccaaaagcctcagcacggtcaaaatataaatccttggttttgacagaatctttagcagattcgtctgtgcaatggccgttcctgagatcatcatagccaaaggagtgttcatatccgcgatggcctttaacggtctgaacaccaacgccgggaatttaatctgaagcagatagcacaaaagccctgcaaatgtggcaatcatcactggcgccttaaacacctctttgatcgattcctttttaaaagatccctgcatgctggccactccgtgggaccagatgaacaggttctgtgcggcaataaacgctgttatgtagataactcctttggaacccagcactgcctgcgccaaaggaatgcccataaatccgcagtttggatagaccacactgaaccgctcaagagcagtgcgatcttgatccctgcctcttacaaggccgtaggacagcaggatcgccagaccatgggctataattccaagcacaaaggttataacaatgccgtgaaagatatttgcgtcaaagtcaatctggaatgatgtgagtaccacaaacggaataaccagatacagggtgatattggaaagctccgcgctccccttttcggttacgaggcctgtcttatatgcacctgcccccaccgccatcatcaaaaacatcatgacgatctgcccgaatacaattgaaacaatattcattaaattccctctttaatcttcgtcttccgatccaatccacatgtttttgatggtctgataggtaccctctgtgttcagcacctgcagggtcacattaaacttacccacagaaggatctttttttctgaacatgataccgtagttgctctccgctgaattcagcttttcatccagggcagaaatcttatctcccttatagttgtccataaaataatcgacacccgtggtatcatagacagtagcgtcaatcttccccttttctaggtctttaaataccttttccatggatgaataagtcttgatcttattttcttctgagaggttctgctgtgcatattcagcattggaggttccctcttccacaccgattgtttttcccactaattctttccgatccgtgatatttttatctgaattgaccataatcttcagtgtattctcaaagtaaacatcagaaaactggaactctttctgacggctgtccgtgatacagatgccggaaatggcaaggtcgatcttcttttcctgaagcagctttgtaagctctctcacaggcgccacacgaagcttatattcaaagccaagatactggcttatacccttcataagatcaatgtcaaagcccttcatttcctttgtcttttcatcacggaaagaaaatggagccataccttctgatactcctatgacaagttcttttcccttcatagaatccttcacttccgaagctgtgatgttttctttttttacatctttattctctgtcttctttttatcccaagggagattgcagccccctaaacaaaaaataagacatatcatcatacaaattgtcagtaattttttcatgatatgattccccatttctatagattgttttttatcataatatcattggtaaataggggtgtcaaacagtctggcaattttttcatcgtataaatccattttgattggtgaatgattttaatatatcgttcgcaagaacaatttacaaatggaggaattatcatggcacttaataaagttgaaatctgcggagtcaatactgcttctcttcctttactcaccaatgaagaaaaagaggaattgttcataagaattgaacagggagaccaggaagccagggaacaatacatcaagggcaatttaaggttagttttaagtgtcattcaacgtttttccggcagcagtgaaaatgccgatgacctgtttcaggtaggatgcattggactgatgaaggcgattgataattttgaccgtacgctgaatgttaaattttccacttatgcggtcccgatgatcatcggagaagtcagacgctatctccgtgacaacaattctatgagggtcagccgctctcttagggatatcgcttataaggccatcacggcaaaggaagccttaaccaaaaaatttaacaaggagccgaccatcgaagccattgcagacgagattgaaatgaaaaaagaagatgtcttatttgccctggatgccattgccactccgctctccctctatgaaccagtgtaccaggacggaggcgataccctgtttttaatggaccaggtgaaagataagaaaaacaaagaagaattatgggtagaatccatcgccttaaaagatgccatggaacatctgcctgaacgggaatacaacatcatcaaactccggttctttgatggaaaaacgcagactgaagtagctgacgagattagtatctcacaggcgcaggtcagccgtctggaaaagaacgccctgaatcatatgaaacactatctggattaaaacggcaggggacatttctttttggaagagaaatgtcccctttcttatgttataaaatcggtacccagaattgaatctcactctgcccgtgctcatccgctgtctccccgtattttgcaaaatcgtatgggtttctttcattaaatctacatgtggaattgggaaaccactcttgataaatatattctgccacaggctgaaggctgtcctcatttttccctctaaaagtaaaaactgcatatctgctgggcggcagggtaaacgctttcatatgtgctggaatgtacgctagtgaagtcacctgggctgctgcaatataatggaataacggcccgttgctttcatactccttataatcgttgacgccgataagaaaatccttgtctgtcctgctgatgatctcgtctttatatttatgcatcagattccagcaacggccgatgacccggaacccatgtttcgtgcttccgtcatatccagccagatagatgctgtcttcctccactgtttttatattcaagaccctgtcacccggtatttttccgcgttgttccatatcatatttcagctgtaacggcataaaactactcttcttccggtaacggctgggcgaacaattgtacatggtcttaaaactcctggaaaatgaacgctgggtgtcataaccggaacacagcgcgatctccatcaacggcttttgtgtaaaaacaagcacccgggccgcctcagtcaatctgcggcgttggatatattgatggatggaaacacccacaacaaacgtaaacattctgtgtaagtgatatttagaatacccaatttcttctgttatcatatccaaatttaattcttcctcagtgagatgctcctctatataatcgagcacctgcctgatgacctgtaaattattatccataccaatacctcctgctcttagaataacaaaatgcggagtaggatgattcacaaatcttgcggtctgcgaaaaaaatctagaatgttaatctgtatatttatacttcattttgttgtccttaaaataatattcattattatttacggagaactttcctatgaaatgaaaaagggccgtctgcaacagacgccctcaatctttttaattctttgtaattattgtttctaaacaagatattctctccattttctacatgattggagtgagacattctaagagccgaacggaaatcatgtggaacatgtcacaataaattcttctttttcaaaatcagtactgcgatcacgcacactgcaaccgaaaacgcacttacaataaagaatcctatggggctccccgaaaacggcattccggcaggattcaggttcattccatagaggcctgagatcatcgtcgggagttccaaaacaatcgtgattgcggcgaggaacttcatgacctggtttaagttgttgtcgataatagaaccaaacagtgacatggtgctcctcaagatgttatggtaaatataggtcatctccatggcctgtttgttctcaatgatgacgtcctccaggagttcctggtcttcctcgtaatgcttaagcccaatgtgttttctgagcttttccaacacaacctcattagactttaaggaggttgtaaaatacaccagacacttttccaggtcatagagttggatcaaatccttattcctggatgtctcatgcaggatctcctccacctcgttggcccgtctgtcgatcatacgcagatgcatcaaaaacagtgccgcattgttgtagagaatctgatagacaaaccttgtcttcatatatgtatagaaattcgggaccaatccgtctgtaaactgctttaagatatttgtctcttccaggcagacggtgaataccaccttctctgtgataaaaataccgagaggaatggtctcatacatccgttttccctcttccttccgaaccaccgggatgttgaccaggatcatcgtataacagtcttcgtgctccagacgggaccgctcttcctcatccaaaggcgcccgcagatcgtctaagtcgatccgatattcttcagccaccatctgcagttccgccgcgctggggtccgtcatcatgacccaggattcccgttcgatgtcagtaatctccctcaattcttttgatccctcataggttttaaatatcctgaccatgattcccctccttttgacaatactactattatatcaactggaaaaggaaacggcaaccattattcaaatggatacttcattccccactgggttctcacactgcttaagatcttcataacatctctggaaatttctatattgttatcagaaaggcttccttctaccgccccttccatggcatttacttcatataccagggcatcttctgtgtttcctgcctcaatggtctctgtgagacctgtctctgtgtttgtaatggttgcttttgacgcacgcggatattcatacacctcaatatatcccttgtctccggtgacaacgccccttttaggctgttttgcccgaatggtcagacagatcactgccatctggtcagactcatttttcagaataattccggactgctcatccactccggtctccacatactgcacagtggtcagaatcgtatttggcgcctcgtccataaaggtccttgcaaatgtagttgcatatcccccgatatccaggagcgctccccctgctgcttccagagcgaaaaaccgattggtggaatcatatcctttgttgcttccgaagttgacctgcaccatcttaactttcccgatggcaccctggctaatcctggactttaattccttaaaaagcggcatatggctgatagtcatagcttccctgacaatcagatccttttcctctgccatggagagaacctcattaagctgatgatcgttgaccgtgatggccttctcacacaagatgtgctttcccgcctctatggcctctttcatgttttcgtaatgctgactatgaggagtggcaatataaaccacatcaaccgcctcatccccgagcatctcttcgtaggaatcgtaaaccttctcgacaccgtatttctctgcaaaagcctctgtcttggctttggtccggctgctgactgcataaacctttcttcccatcttctcaaatgcctgcgccatttcattggcgatcactccgcatccaagaattccccattttaaatcactcatttgtttctcctttctgcttccatcactgtaattccctgttctcctgctacaatggctttagctgccacatgataaaaaagtgaagtctccacgactccggtcatctgcttcagttctctgtctaagctctcaagttccttcaattctgcaaaccagacctccattagagtcctggatctcatagatgtacgtccgcctatctcctgtatctttgattccacatatccctttgcctccggaacgatctccagcacgattggaaatgtaaagtcaatctgctctgccaccttgctctcgtccactagcagaacatactcatcagccatctttccgataattttttcttttgtgtggataccccctccactcttgatggcgttcaggcagcgatctacttgatcacagccgtcaaaagcaatatctacatgtgaaacctcttccgtatctgtgacacaaaggcccagacgctcacaaacctctttcgtctgctcggaaggagtcacgatctgtcctttaaattctgcctctttcagatactccgccagatacccgatggtttgtcctcctcccaggcctatgatcccttttcctgctgcccagctgacggcttcttttgcacaccgacgtttcatgatttctcctttctctaaaagaaaatatgtttcttaatctgattttatcacgaaactttattttgtcaaccattgcgttgctttttcttttttttcatattacaatgaggataccagaaatgagaaaggagcacgacactatgggtaagaaattgaaaaaatttatgaaagttgtgactgccatcatctctatcggcggaattctttatatcgccagagaccagatcaaagcaatcattgacaagctgaaagaactgaaggaccaggaaaaggatgaagatcttgatgactgggacccagaagagtttgacgatgacgacatcttcccggattcagcggaggacagccgtgattacttctccatccacatcacagatgaagaagaaacaaaagaagagacttccgaagaagaatttccttctgaggatgaccctgacgagaaagataaaacttctgaaccaacagaagaagatgataaacaataaaaaaactcctatgcctgcagttcagagcataggagtttttcttcttaaagatccagctgcatgatataatcatccatgataaatccgtttccgatatcggtctttacagaatcaatagtcttaaacccctttgcctcgtagatgtccaggctgttctgattgtatttattacaagtcagatagactgcctgtttttcctgttcctctgcaaaagccagtgctctttttaagagtgtactggaaagcccttttcccctctgatccttgtgcagatacagcttgcttaaaaaaagacgatcgccgtcgggttttaccccgcagaatccaatcagtttcccttgttcatatccgagaaaatatgtatagtgttcctcctcaatggctttgctcaatgcctcatagctctggaatttctccaccatatagtcgatctgatcttttgaaatgatctccacaaaatattcatgccagatctctgtggccaatcctgccagttcctgaatctgttgtttcgtctcacatactttaatttccatgctgcaacccatcctgttatcttatttttactttctttgctttggaataacttccaaaatattttttgccgttaatcgtcttaaaagcccttacttttacatagtaagtcttctttctcttaagtttcttgcttgtataagaaactttttttccgctggtgtattgcttcactcttttgtacttgcccttcttgcctgtcctgatataaatcctgtagccgctggcaccagagatcttcttatatttgatcttcaggcggcgtccgcttttctttactgtcacctttggttttcccggtcttgttccggatttcaaaggcgttgagtacggactaaaataccgtttgtcaaatacatttcgaaaagctctgactctataataatatgtctttccagattttagcttcgaattggtataagaagttgttttacttgaaacctgttttaaatatttatagcctgagtttttcttcgtagaacgataaattctatatccagacacattttttaatgacttccatgatattttagctgaagatgatgtcctgctcacatgttttactgttgtcttggaacttagataaagaggattttttatataaatatataccggtaattgactggcttttcctccttccagacacccatcttcatagttaataaccaattcaggaattgaacggatcacggtatcgtcattataggcttcataatctccattgttcagaaggctaaaaaagtttaacttaagacggttcgtatccagtacaattttaaatgtattagtacctcccactgcgttctgggctgtggaacctgtatgtttatatgttccatcggaaaatttaaagtatcctttgggatctaattcaatcgattttacaggtactgattcattacccaggtttttaaaactgaccgttaattcatttttacttttagagagatccatggtacccagcattttatagccatatctccagatcccactccattggtttccataggtataatgttcatcatattcacctggtgtatcatatgcaaatggtatcttcctgatgatctttcctgttgtaacgtcctttatgtaaatggctgtccaatttaacttaggatccaccttattacttgaaaaatttacagatacctggatcttctctcctgactttaaggccgctgtggaagaagataatttaatatcggcttttgctccgtccttgtcctgcatctcaacagatatactgctatagtctgtatttcctttattttgaatggtaaatactttatcctgtccgactgctatggtattatctttatttcgctccgcagacagagtataccaagtcacaacattcttattttttattttattgccagtgtaatttgtcacagatatattcatatcttcggttatctcttccgctttcaccacactcacctgcgatatgatcaaacatgctgtcagcaatactatcattaatcgtttcagcttcatcttttgtcctcctttccacatatcataccattttccaacaaaaaaaaccacggctccccatggtttttcattgtaacaaagtgagtgcccctaaagataaagcaggcttgccctctttgttcttatttaccggcttcgatgtccgctgccatctgttttaattcctccacactgaaattgtagtgtgtattacagaaatggcagtttacctcgatatcctcacaatccttgatcatatcgttgatctcgtctttgccgacgctgatcactgcttttttcacccgctctttggagcagttgcaggagaactttgtcggtatggtctcataaaactttgtcccgaattctcccagcagttcgttcatcatatcttccggagtttttccctcctccaaatgagatgtgacagactgaaactccgcaattttcttttccagggcagtgatgacttcctcagacgcatacggcatcatttgaatgataaaccctccggcgtgccgcaccgtgttatccttgttcatcagcactcccagtgccacagaagtagggatctgttcactggccgcaaaataataggtcagatcttctgcgatttcccctgatacaaggtgggtctgtcctgaatacggttccttcattccgatgtccttgatgacagttaaaacgcccaggtccaaggctttccccacatccagctttccttccttgctcggcggcagcatcacatctggattaaccacatagcctttcacatcagctttagaatccgcagtcaccgtgagtcctccgatggggccgctgcactggatctgcagtgtgatcatgtcctgttcattcttacacatgcttcccatcatggctcctgccgtcagaagccgtcctagggccgctgtggcaacaggacttgtattatgtctctgtcttgcctcttccactatatcctttgtataagcagcaaaaaaacgaacctgatcgtctgccgctgttcctcttacaatataatctttcatttgtccacctcatgatctatcgttgaaataaaatacagccgtccgctctctggatctggctcctctaagttgtccgcatccaccacttcccggactgaaaaacctgccgagtgaagtgcgcttactatctcctctttctcatatgctctctgaaaatgtacttcctcaaacttctggtacagccccaaatcgctgcggataaataacgtcaggtcatactcattgatcctgtcctccggatcataaaagttctgccagataaaactgcagtcctcacgatcctccgcaaacgtattttcagccagcagtgtttcgtatttatagagggtgttcatgtcaaataaaaacactccgtcttcgctcagattttcccgcacccggtgaaacacctgcacaagatcctccggctctaaaatatagtttaagctgtcacaggtgctgaccgccgcatcggcaggatggagaagagaaatttctctcatatcctgacagatataaaatatcccgtcctcgcctgaatctgccgcgatctccagcatctcctgagaattgtcaagcccggtcatccggtagccataacctttgagcacttttgtcatcttcccggtgccgcagcccagatccaagattttggcaccgtcctttacctgatatttggtcaggaatttccttatatttctgccccactgttcatagggcgtctggtccataaattcatcataaactctggcaaagctttgatagcttgtaaactcatccattgtttctactccttacagcagaggcgccagaacacggagtacactctgcatcagacgcttcaccatgttgccctggcatttttctttggtaatcatctcacactgcgtaaaggtcttcagcatgtcgatcttgacttccgtgactgccagacagtggtacataaagacgccgttctcaaaatgcaggtaaagactccggtaatccatattaatagttccaaccgttgcgataacgtcatcactgacaaaacatttggcgtgtataaatcccggtgtatactggtatactttaaccccagcttctacaagctgggcataataggactgtgtcagcaaaaagaccgtcggtttatccggaattcccggggtgacgatccgcacatctacccctcgtttagaagccagacagagggctgtcatcatctcgttgtcaatgattaggtacggggtatagatatatacatactctgtagccgcattaatgatgttcaggtaaacgttctcccctaccgtctctgtatccagcggattatccgcataaggctggataaaaccgtcatctacaaaccgcccttcatgatggccgtggggcacaaacataccgtatccttcatccgtttttcggatagcattccacacctgtaaaaacatcacggtaaaattccagactgcgtccccgatcaccttaaggcctgcgtctttccagtagccaaagcgttccttccggttaatatactcatccgccaggttaaggcctcctgtataagcggtgtgcccgtcaatgaccactaccttccggtggtcacggttattccatgccgttgacaccagcggaatgatcggattaaaggccacacaggaaataccgtaccgctccagctccttgtaatatttataaggaagcagatccacgcagcccacatcgtcatacataaatctgacttcaacgccgtcgtccacacgctccttcaaaatatccaggatcgtgttccacatatagccttcttccacgatgaagaattccataaaaatataatatttcgctttttttaagtcctcgatcatttcctcaaacattgactcccctgatgggtaatactttgcggaggaattctgatagatcgggtaaccgcctgaactctcaatatacttggcttgagttgccgcctggggacttctctgttttaagttgtacatgacactgtcatcctgtggcagcagaaaatctgtctcttgcaaagacctttccaactcaagcctcagcttcctggccggcttcttattgcccagcgtcagataaagcagtccgccgaaaataggaaagatcaggatcgggatcgtccacgccagcttgtaggcgggattttcttccttatttactatataaacgaccacagcgatgctgacaagctgaagacaccattcgatgggctttgaatgttctccgatgatctgagccagccagatcagccacaggatctgcagcacaatgacaacgctgacgaccaccagcctgcgcagcaggaccttcagcagtttcgatatgccctttttcatcacttttaaaaacttcataatccctcctgatgtctaatcattctcccagcgcagcagtgtgcagccttccgcaggaattttctatacagaacaaggtgggcaagcccacttcatctacccagcccctcaagtgcccgtagggcttttttgttccatagggaggttcagagaactttcccatggaataaaataagaccagaaaattctggtcttactattctataatgatttaaggaacggtgtcaagaaggcttcttgtcctttttatatccagccaaaatgctcacaggcctttttaatgccgtcgttgacattggtgtccgtcacatagtctgccttgtcctttaattcctggcatccatttcccatggcgatggaaaaccactgagggctgaacatatccaggtcattgtaatcgtctccaaatactacaacatcctccagcggcccatttaagtgctgcatcatcttgacgatgccttctcttttattgtccggctggaacatcagatattccggctcaaaccggagatttccgatcaattcctttgtggtaagagcatcttcttcctcttttgggatcgccacataaatcttataaaaatcctcgacctcatgataatccatagtgtcatcaatgatatagcgggtcggttcttttctttttcccacctgccgtaaaaacaggtcattggtcatgtatacatcctttgtgtcgtccacggcgatacaccagccatatccgagcttttctgtctcttcaatgatcttaatgcatccttctcggtccagaggaatgttttccacaaatttgttgtcaatgacaaacccgtttcccccgttgcataccatgttcttaaatccattggactggatgaacagatctgccttatagtgggctcttcccgtggcaatggctacaaaatgtccgttttcttccagctttctcagtgcctccagtgcactgggcactacctgatttgtcgagcggtcggtcaatgttccgtcaatgtcaaaaaagcaatatttctttttcataagtaccctccatcttgatatatttctccttcaagtatgccccagcacttaaggcttgtcaatgattttaggcgacttcatgaagcctgacatcatacatcctccggccgctccggctgtcagaacctcttctatattaagtggtgtaatacctccgatggcatagacagggatggataccgcctggaccgtttctcttaagaacgaaaggcctctgggcggaacccctttcttgcagtctgtctgaaagatatgtcctgcgatgacaaattccgctcccatctgctctgcttccactgcttcctccaccgcatgaatggaagtgctcacatgagaaaactcatccatcttgcccaggctttcccgaaagacagaaaacggcaggtgaatgcggtctgcgtgaagctttctggccgcctccaagtgaccatgcagggtaagggatgccccctccctgcggcagatctccatgcactctgcggccagctgctcataagcacgttcatcaagatctttttcccgcaggaggatggtctttaatccctgtccggctaaaatgcggatgacctctaaataatcctgtaaacaaagcttcctgttggtcactgcgatccattgtgtgttcattcctcctccgtttctaaaccctcacatagtccgtataaattccctgcatcccccgatgtccgagcatctggactacctcatccacacttctcggatcggagatcataaattgtgcgtcacccttctcctcttcctcgtgtccgccgactcccgtgctgactcccgcggagattttggttgctgccatgcctaccacgttgtcacggaatcctgcccgctcccttgtggagatggtgatgcccgcaaacggcataaacagacggtgggccagcatcacctgaagcagctgtttttcatggacatctttggcatcgtttgtttcgttatttttatacggtctcaatcttggtacagaaaatgatacctccgcctggggatattttttctgcaatagtgatgcatggatgcctgaggcgaatgcatcctttctgaaatcatcgagtcccagcagggcgccgcatccaacccctctcattccacccagaagcgcccgttcctgggcattgaaacgataggagaatacctttttcggcccgcttaaatggacctggtcataagttttggtgttgtatgtctcctgatatacgctgacaaaatcagcaccttttttatggatatattcgtattcatccacatccatcgggtagacttcaatgccaatggtggaaaaatactttttggccagttccactgcatctccgatgtactccacactggacgccgttttggactctcccgtgagaatcaggatttctttcagcccggtccttgcgatggcctggtattccttttcgatctcctccatggaaagctttgctctgtggatcttgtttgtacagttaaatccgcagtatacacagtgattcacacagtagttggcgatataaaggggagtaaacagacagacgctgttgccgaagtgcttcatagtctcttgcttggcccgtcttgccataggctccaaaaactccatggctttaggggacagaagagccttatagtcttccacatcaatggtatccttggaaagcgccgatgctacatcatttctggtataactgttatagtcatattccttatattctttcagtactttatctaatatttccatgatcctagtcctccaaaaatcctgtcagcggggaagacgcatcgctgccctgattaagcactcgccccaggcctgcaaggtaagcttttcttccggcatccactgccattctgaatgcccctgccatagccgctacgtcgtttgccgtggccaccgctgtgtttgccagtacggcatctgctcccatctccattgccgcacatgcctcagacggtttgcctatgcctgcgtccacgatcacaggaaggtcgatattctcaatgagcatctgtataaagtctttggtgagaagtcctttgttgctcccaatcggggccgccaaaggcatgaccgcagcggctcccgcgtccacaagatccctggcagcattcagatcagggcttatgtatggcagcactgtaaatccttcccttgccagaatctctgtggctttgacagtctcattattatccggcatgagatattttgtatcccggatcacttcgatcttaataaaatccccgcatcctactgcctttgccagccttgcgatccgtactgcctcctgggcgttcctggcaccggacgtatttggcagcagagtcactgtatccggtatgtactctaaaatgttgctggatccggcctctttcaccctccgcagagccatggtaacgatctgggcatctgccgcgctgatcacctcagcggtcttttcaaggctgaactttccggttccaagcagaaaccttgatgtaaattcttttgttccgatttttaatgtatctttcatttttatacctctttttctcctaagatcaatcgtatcgccatatttgcctcatgtccggcacagatgtttactcttgcggcggtcagggattctgtctttgagatcccgtggacgccatccccgcacacataaaggcggttcattttcttgtccgtccggattagattggagctgtaggaacccgccatcccgtttcctgagatcagtacagatccaggcagcctggatatgaccccgtttaccagcacggctttggattccggcgtgtcaaacgcctcacatatgaccggatagggttcaaacagcttttctacatttgcctccgtgaccctgccgtcaaacgtctccagttccatccagggattcacctgcctgatgagttcttggatggcatctgtttttttcattcccatctgagggatcgtgtaagcctgccggtttaaattggatgggtccactgtgtcaaaatcaacaagaaacagctttttaacccctgtcctcgcaagcatcagtgcgatattggagcccaggcctccaagtcctgccacggccacacatccctctttgagctttttcctcacttccggtgtctggcgcctggtcagctcaagttcaaactgttctcttgaaagcatctcatccaccgcctacgaagctgacgatctccagagtgtccgcctctgagagtatgatctgtccatactcctgcttcggggcaatctgcccgtttctctccaccgcgatgtgctttaaatgatagccctcccccagaagaaattcttccagagtctgaacagactcaagcggcatttcctttccattgacacgcatgatgattctcctttctttttcaagagctgacaaacaaagaacaaagtgggcgagtgcgcatcccacggagcgtttttgttccataggggattccttaggaatattctatggaacaaaaaaagatgaagcgtaagctccatctctgtgttctatcgattgaaaactccctacgctagtgctaactaacaggttccatgaatcttcaggttataccttcctctcagccaataacatcggctctccagttttacttgtttatgaaattttatcagacagaatctatgatctgtcttacgagaaattattataatcctgtttccccaaaaaaacaagagaaaattttgctgttcacgccggttccaatacctcttgcgccttttcctgtccaacaaagcttaactgtgataaaaagaatacatcataacatttgcttttgtttcagtggatctacatggttggacagtaaatagaaaaaatgctttttcatttgattccagtacgaacatagtaaactgaattcgttaatgattgtcccccaatggttaaacatcgttgctataaagaagtacatattccttagttcaaaaataatcttttagtaaaatctgatgaaacaaagttgaatctcctccatctgcttggacaaaacagatgttcatgatttcaggccgtcctgaagaactcctcaaccagttcttacaggatggctttttcgtatcatcagcgccggaaaacctcttgtccgtgtatatacttggccatgatgtgctcattttggcttaaatacatagccctttccatccgctgttccatgtccgggtcaagagcggtcttgatcggtgtgtcgttaagcaccacagcatcaaactcacagccctgttcaaaacttccgacatttccaaaaaagctcccgcccccttttgtccccagataaaaagcttctgatgcggacaacggctttttgtcctggtccagatatctccagtacatcttggagacctgtaccgcatcggtcatcacccgcagaatggagagagaggcacctcctgccatatccgtcccaaggcccacatgcaggccttcttccatcattgcccgtaccggagcgatgccggaggacagattcagatttgactgtgggcagtgcgcgacgtagacgcccctcttgctcatcaagtctcgttcctcttttcctgaataaacacagtgggccatgacagtttttccatgattcccaaacatcccgaaatggtcataggcatctccgtaaaattctgaccacggagccagctcctttacccattctacctctcccggattctccgagagatgggtctgcatatacagaccggtctttttctgaacttctttaagctgctccatcagacggtcagaacaggtcggcaggaatctcggtgaaaggatgggacgaatccccgttctgtccttcacggattcataccaactccatgtatcttgtacggatgtatctgcatccttttccttgtagtaatctggacagttccggtccatattgaccttcccagcaaaacctctcatccccgctttctcaagcagatccatcagcagcaccgtagcttctccatggatcgtggcaaaaacattgactctagatgtggcgctctttcttaaatcattagtgaatatctcatatgctttttgcgcgtattccaaatcaccgtacttagcttcttcgggaaaggtataagtctccagccaggaaagcagctccatatccattcccatccccctaaacgaatactggggcgcatggatatgtagatcgcagagtcccgggaaaataagtcttccgctgtaatctaaaacacggatacctgaaaaccgttccggcagttccttccatatgccgctcaccattccgtcttcacagactatataagaatcctgtgctgactgaaacttttcaggtgtgggtgtaaaaataatatctccttttaaagcaaaattcttcatgataataacctccagtaagtaggaacaaagtgggcaagcccacctcatctccccaacccctcactctttgaggggcttgacaactttgagcaccaaatgcgctttgacatagtcaaatgatttccttacgcatttgtgtgcatagtgcccgcagggcttttttaatccatagggaggttcgaagaactttcctatggaagaacaaagtggacaggcccacttcaacaccccaacccctcactctttgaggggcttggcaactttgcgcgccaaatgcgatttgacgcagtcaaatagattccttacgcatttgtgtgcatagtgcccgcagggcttttttattccatagggaggttcgaagaactttcctatggaataaaaagagttattcccttttgataaaagatcaaagggaataactcatagtccggctttcggaagcctggtagaaactcctgggccgttatcccaggaatatataagtctttggtgtattcattacaaagtcatcatatcaaagtacatttctgctgtcaatcacctctttggtgtattggctcagtcttctgcttcctgtgccttttgctgtttctttcgcttggtcatcaggccgccgatccttccggtctcactggcagaaagtgctttccagccttcctccctgaccttgtcagccagtccgatctccactgcgatctcgtattttaaacgctcatcttccgtcatttcttcgtaggatttttccataaaatctttttctttggacatcatgtactcctttcttcttatccctccggctctatgccggtcatatattaggataaccaaagaaaggcctaatcattcatctgttctatcacaatatgtcctgattcattctcacttacttttatcttatctttcactgttgagatgtttgatgtgcctgccagcaacgttgcggccagggcaaatgttaaactcttcttcatcaactcttctactgaaagcgttgcattctctgacatggtcatcactccttttcttcatgtctgattccttctttgctttccatgtcctaatgataacagagaattgtgacttccctatgcccagtttcttaaaattagctgatattatgtaaaataattataaactaatagccttcctcagaggaactgagtaaatgtaacattctttgactcttttttgctccatctgttccagggcttttttataatactgcagctgcgtgcggtacctggaaacgaggatttcttcctctcccggctttaccctgtctgtcttgtaatccaccaggaccagctcttttccttctttaaaatataggtcgataataccctgaagcacaacatagtcatcgcttttggcctctggctccatttctcggaacttgacccccatgacaaactgcgcttccttataatcttcctttctttccgctgcctttttgattctctgtcccaggtctgacttcaaaaatgccatgatatcatccctggggatcaaggtctccataccttcctcaagtttgccttctaaagcccactgatggacttgttcttccagcagttttggcgtatattccgatgaaaaatccagaagctccatgaccttgtggaccgccgttccccgggaagctttagaaatctctgcttctttttttaggaatttcggatagagcggctctgtttcctgctggggccgatatgcttcggaaggttctgcggcctgggacattctcttgatctccgacacagagtacttaagcctcccgtctctttccagctcatatggatattggtaggcaaaggcacgtttcatatcctgggcctcctctgtccccgccatggattccagtgcatccgtcagtattcccttgtctctgtaggatgtaaagacttcctccacgctggccagtgccacatcttcctctgataaaaagcggatctccaacggactttgatccatatgtccggcagccatgaggagccattccagataagaccgtgcatttaaaagatccacataggagatggcgctcccctctctgaactgatgccggcttccctggacccctgtcataatcagcttttctttggctcttgtaagagccacatacagaaccctcagttcttcccctaaagaatctttaatcagctgtcttgagatcatacctttcataatggtcggttgtttcgtcctctgcctgatatttacaagatccggccctataaaatagtccgggtggaacaaaaggcttccgctggtatcccttagattaaacttcttatgggttttggaaagaaacacaataggatattccagccccttgctcttatggatactggtgatggtgaccagattatcattaccattcagcggattggcctcgccgaaatccatgttgtattctttacactgttccatgtagcgaataaaatgaaatacccccttataacggctggcttcataagacttagcctgttccaccagcattaaaaggttgccctggcgtttggctccctggggcatagcgccggcataatgataatatccggtcaagtcaaaggccatccaaagcagctcatggagggacagataggtttttgcctccctgagttttttaagcactgacaatgcctttgcggcctttttatgatcctccggcgtctctttaagacagtcatacagatgtattttcttcccatcaagtttcagccttgccaggtcttcccctgtcataccgatcatcggcgaacggagaaaggcggccatttcaatatccgcatacagattgtccaccactgtgagcagacttaagaccacacggacctccactgtatcaaaatatccactctgactgcttgaaacagccgggattccggcgtccatcaatacctcctggatcttttccgcatttcccttgacagagcgcaggagaatgacaatatccctgtactctgctttccggtagatctcgttgcccttttcatcatgatccagcaccatctggggtgaaggtccgtccaccagtttcctgatccggtccgcgatcatccttgcctccagaacatctttatcatcctcagaggcctccgcccaatccctgcccaccaaaagcagttcggcgtttccgcctgtaccttctgcctcttcataagggaaactcggaaccagtgccacatccttggtatattcgatatttccaagagtggtgtgcataatctgatagaagatatcattgacggtgttaagaacctccctgcggcttctaaaattgtttctcagttctatgagctttgcattctttccgtcccgctgatagccgtggtatttttcaatgaaaagttccggccttgccagacggaaactgtaaatactctgcttgacatcccccaccataaagacattatttccgccaagacttttcatagacacactctgcagaatcgcgtcctgaagaaagttgctgtcctggtattcatcgatatagatctcatggtaatattctgccttttctctggcaatagcgctgacagccggattccccttctcatcaaagccttctgtcaaaagttccagagccaggtgttccagatcgctgaaatccagcagattatcaagctttttccggtccataaaacgttggtaaaaccgctttgttaggtctataaaaccttccataggctggcggaccatacgaatctggcggatgatctcactttccggtttataaaaatagctgcctctgatggagtcgatcagatcatacgccttctttctcagttccttacagtcatcttgaagccggacgtcaatgacatcgtcctttttctttctcccgttcagacgtggtttagaaaaagaaagaaatacatttccgaattcctcataagtctctgccgcctgaaactgctccatcgcttccagatctttagataatgtgggcagataaaagtaagggccctgtggttccgatgccgtatcgactgcctcttttatcaccgcacaggcagatgccgccactgccttgacatcttttaatatctccttcatccagactgcgtggtgtagttcctcctttgtgcggatctgaaaacccttcttggcctctgacagccagcctaaggggtcaatgtggcttctggagctctcatagaggccaaggacatagtccttgagcctgtcatcatttttgcccggaatatagctctcgataaactctacaaacgcatcactctgctcctcataggcttcctccagcacatcatccagtacctccagcttcataagttccatctggccctggtcaccgatggcaaagttgggatccaggtccagtttataatagtaatctctgatcaggttcaggcagaagctgtggatcgttgtaatctgggccttgtggatcagggaaagctgacggatgaggtgctcattttccggctcctcctccaccttcttttcaatagctttccgtattctttccttcatctcattggccgccgcatgagtgtaagttaccacaagcagccgatccacatccaccggatctttcttggcagaaatcttttcaatgatcctctccaccagcaccgccgtctttccagatcctgccgcggcagacactaaaaggctgcaatctctctccgctatgacctgcttttgttgttcagtccaaggcatcgtctgtctcctttccttccgctaatatctgctttgcctcaacaagcccaatctttgtaagctttctcggtttcgtaagtttcggctcatatgcgcatatgctcttaaacgcacagtaatcgcagggcattgtctggtattcataaggtcttatagaaatatccccgtccatcatggcttcccccatctgcttcatcttttcttccaccttctgtcccagattcttaaattcagtggtatttaacagggctgagccctttttgtagcctgtttttgtcctggtcactggcagggttacgatcccgtacgcatcctcctgttccagatgctccacaagcccgaattcctcatttaccacacctcttaactgaagattcttgaggacctccatctccggctccccgtccgtcttcggtgcgatcaccgggtcatccacatgaaaataaaacataccggccggtatcatccgtttttcagggtgctttttcccttccagttccaggatcgcattcatatacacaaccagctgtacctgcaggccgttcaatatcttggtaaaatcaaactgcatatttccggatttataatcaatgatcttcagatagagattttcatcatcctcataacagtccacccggtcgatcaccccagtaaacttcattttcgttccgtcctttaaggcaagatttgcgcaggacaggccgtcatcagcagaaaatcccagttcatattcatacggggtaaactcccccctcttaatctgctgctctaccgcccagaccgccctctttgccatcctcttgatccgctcctttgtgtaccgattccggctgctgctctcaaagatctctttcttatccggatcttcatcgagggcccgctccactaaagagtccacaaaacggtcccgttcctcgtcactttcccagtcccagctcccttcctctcccacaaactggagcgtccggtgaaacacctgtcccatatccatgggaaggatctcatggaccagccgttctctgagtttcagcccgtactggagaaaatgggcaaaggcacagcctgaaaacttttccacacgggtcacactattttccagctcttttccataaagaagcgacgtcagatgcctgtccaagtttccttcctcattgtgatagaaataggcgtccagataccgggcggcctgatccatttctttcaaaacctcatagatggccgccatttcctgtccaggttcctgctcatctaaatcctgcagcaattcaataaacctctcttttgcctcattcacagaataaactgcatccccggctggatcatcgtcccttttaagcctcgggaatattttttcgattctccctaaaatataggaaggagctttgctgtcgcctgacgggtccatggaggaataagtaagaaaaagtttatcttccggctttgccatggcaagatacagataatactgttccatataagcctggtttgccgctccgggtgccagagaaattcctgcttttaatagcttttctctctgggaatccgtcacaagaccgccgccggaggatggtttcggcaccaccccctcattcacgcctgcaaaaaataaaaccttcacgccttccactctggtcctctcgatatcacctacgattacctgatccaggccaggaggaataacacccacgctcatctccgaaagcccagtctctagaaccgcgcaaaactcatcaaaagacagcttttcctctccaaggatagccgccatctggtccatgatatttaggacctcaccgtagatctgttcgtaagttttcgccagtgccagaaaacctgcaagctcaaactcctccttctttttctccatctgtccctggatgtccagggtgaggaaaaagtcatggaggcaggtgagtctttccagcaccgtgatcccccgtattttgattccttcctttaacggtccggtctccttcataaaagcatccctggactggttgatctgcttcatctcctccttggaaaaagcccggctcttaaagggccggttccatcttgcatagcctctgatgcctgcggccaccacataattctctaaaagatccgtctcttccgggcccagaatagaaaacccggatttcaaatatcggaacaccatatcataggaataatccatctggatcattttaaggaccgacagaatcgtctccacacagggattgtttcgcagcgccctgtttccgtcaataaaatagggaatgccggaatcggcaaagcacttttcaagctcgggctggtaggtctccatatcaccggtcagcacgaccatatctttgtaccggtaaccctcttcccgtacaagccgttcgatcgaacttaagataaaccggctttcctctttcggatttttaagcctgcagatccttatgtcctctgtctcttttccgtatacatggaacggataccggaacagattttgttccagatggcgcagttctttagagcccatggtctttggggttcgcaccacatcaggcagtactctgactccctgctcctttgccatctgctttaaatgatagatttccttctttggcagtgcaaacagttcatattccctgtacggccctcttaattctttttcatcaattgtaaacgccgccacgactttctttgcataaggcagcagcctttctaacactttattttgtatgggggtaaaccccgtaaatccgtcaatatagatcactgcatttttaagcttctttgattcagtgatcttctgtgccagcacgtcaagcagctgttctgacaccagataccgatccttcatatactcttcaaacttgttaagcaccaggacaatatctttcattttaagcgtcagactgtcctgatcctcaaaggcttccagtgcctttctaagcttttccagagaaacatcgtactgataggtctccgcaaaaaaggacttcatctcgtcaataaaaccctgcttctccatgctggagccgaacactaaaaggtcctttctgcattcccccatgacctttcttatgaccatggatttcccctcatctgccagaagctcttttgggatataagacagctcctcgaacacccggtacgagaggcggtaaaaaccaaccacatcgatgttcatagtaccgtggctgggatgtcttgtgaccagctctctctgtgcgtttaacgtagactggtccgggaccagaaaaaagaaattgtcgttcctgttctccatggattcctttatcatctgttcgtagatataacttgtttttcctgtccggcctgcgcccagaacacattgcaatgccatcggctacctcctgtcttgtcatctttttggatggattctattatacatgaaaaactctgcctgctccacagacaattccttctgttttctggcggctgaattcttaacatacgaaaaattcatatgccactcataggagcaggcccgctgtcatattcttatgtatggacaaaaaaacatcgatcaaaaatattttatttcttagatacaaatagttctattctgcctgtccagaccatatactataatagaatctttttaggaggaccctatgtcagcaaaaacgaaaatcgtcgtgtttaaggcgaaagaactaatctataccggcatctttgtcttgcttggaatcttgctaatcctgcttttgatttttatgtttgctccgtctaaggaacataagaagagcacggagacgatggagtacatagaaggggtatattcctctcctcttacactgggagaaaatgagctggaagtggaggtcacagtcaaggacaacaaagttaataatgtcgctttaaagcatttaaataaaagtgtcaaaaccatgtatcccctgatcgagccggccctcggtgagatcaacaaacagcttcccaaggtaaaatctgtcgatgacattcagtttgacgacgagagccagtacaccaacaccattttaaagcaatccatcaaaaatgccctgaaacaggcacaaaaataaggatctttgctcatggaatccttatcatcacataaaaacagccatcaccgcaaaaccggtcatggctgtttttacgtccttcctatgttagtgccctgcgagatactgtcccttctcctgccagtgttcctctcccttttcgagatcaaatacgatgataccctcttctcctgcttctgatacctttgagtggtcttctccggagccaaggcggatctctctgatatggaccgtcgctgccgcaaggccgttgcagtcgtaaagctctgcttcctcaccttctttatgcactccctttacaaaggatacagacatcaaaaagcggccgttctctctgtagattccctccacataggaaagactgccggcctcctgatggagccggtacactctctcttttccctcttcgtattcactggtcgtatgaactttgaatctgtctaaaaatcccatgctgttcccccgtctttttaagttgattataatacaaccagtgaaaaactcaacgccctatttggttttcctccagaaattctctgaagtcttccacattccccccaagttcctcgatcaatgggatgatatatgagagtcctgtcttcctcccatgcagagcttccgagatccttgggtaggcaattcccattctctctgccagctgcctctgcgtcaactcctgacggatcatctcaatcttcacccatttttcaaaatccctgtacgactttatcattcgcctctcctttcccttatctgaatgtaagaaacttacataaattatatctctatacgtagagatagtcaagaaaatggtacaattttccacggtattttggttacaacttcgtttacactaaattttatctatgctacaatagacgagtaaatttgttacataaacagagaggggaaatacatgaagtttgcagaaaatttaaatgaatatctggaaagccatgatatttccaactaccagatttataaggacactggtctgtcggacagcctgatcggatactggagaaaaggtaaaaagcagccgacgctagagaatctggtcattctttgtgattatctggatgtttctatcgactatctcgtcggcaacatttccgccaaagaagaaaaactgctccgctattaccgcgccctgtctccggaagagaaggatgaagtcgatacctacatgaataattctgccattgacacatagaatgaagtgtggtagattatcattattaataattgaaatgctttgaagaggaatagtaagatatagaaggcatccagagaactgctgtctggtgaaaagcagctgcccggtatatgtgaactcgcctctgagcagcttgctgaactgttagtaggcaacgccggttccaaccgttacattgggaagatatcagtttttttgactcgtatcggtagtgagtgcacgcggtttatgcgtgaattagagtggtaccacggagagtacataacccttcgtctctatccagaaatggacagagacggaggttttttattgcataggaaagccctgcgatcccactttgttctttccgcagcaccgccgtatgctgtttcatttttcacattttatgaagggagattttatatctatgaattctaacaaatataaacgccaatactttatgcccccggaagagtgtcttgactgggcacgaaaagagtacatcacaaaagcacctgactggtgcagcgtggatctaagagacggaaaccaggccttgatcattcccatgagcctggacgaaaaggtagagttctttaagtacctggtgaaggttggctttaaggagatcgaggtgggattccctgctgcttctgagacagagtataccttcctgcgcactttgatcgaacaggatctgatcccggatgatgtgaccatccaggtactgactcaggcaagggaacatatcatcaaacgtacatttgaagctttgaaaggtgcaaagcgcgccatcgtccatgtatataattctacatctcttgcacagagggagcaggtgttcaaaaagtcgaaggatgagatcttaaagattgccacagatggagctgaacttctgaagaaactggccggagagaccgaaggaaagttccagtttgagtactctccagaaagctttaccgggactgaggtggagtatgcactggaagtgtgcaatgccgtgctggatgtctggaaaccgtctccggactggaaagtaatcatcaacctgcctgtcaccgtacagctttccatgccgcatgtgtacgccagccagatcgagtacatgagcaaacatatgaagtaccgggaaaacgtagtgctttccatccaccctcacaatgacagaggctgcggcgtcgctgacacggaacttgctctgcttgcgggagcggaccgggttgagggaactttgttcggcaacggagagaggaccggaaatgtggatatcgtcactgtggcactcaacatgtattcccacggagtagatccgaagctggacttctccaatctcccacagcttacaaagacatatgagcgcctgacccgcatgagtgtctacgaccgccagccttattccggcaagcttgtatttgcagctttctccggttcccatcaggatgccatcgccaaaggcatgcactggattgatgaccgggatccggattactggtcagtgccttatctgccgattgatccgaaagatatcggcagggaatacgaaagtgatgtgatacgcattaacagccagtccggcaagggaggcatcggctatgtactggaagagaactttggattccatatcccaggcaagatgagggaagacgtaggttatacggttaaggatgtatccgataaacagcaccgggagctggttccgaaagacattctggacgtatttaagaaagtctatgtgaatattgattctcctatcgcattaaaagaagtccactttatccagaaagacggcggcattgaagcagagatctcccttgacaaagccggtgtccacaagctgtaccacggcaaaggaaacgggcgcctggacgcggtcagcaatgccatacagcgccacagcgacctgaattattccatcgtaagctaccaggagcatgccctcaatgtaggttctaattccaaagcatgctcatatgtggctctccagcagccaaacggaactgtcgtatggggtgcgggaatccatgaggatatcatcactgcctccgtgcttgcgctgatcagtgcagtcaaccgtttataatacgttcttacaaaataaaaagagcatcaggctaagcccctgacgctcttttttctcattggccacaatgatcacttgttttagagtttcttagttgtctgtcacagtatactcgattcctatttcttctatagaagctgttccccctgacagatctgtcagtttcttttggatctgcccacatccggcttccggtaccaggaactccatggtcactttatccgtataatccgtgtttaagaccgaaatgtcctctgtaccgagaagatactgaatctttcctgccgtggaataatcacagctggtcctgagtctgtgccccaatcccatagtgacggtcccagccgcctcaactgcttccacagccgccttcgtataggccctcacaaggcctccggtaccgagcagcgtacctccaaagtaacgtgtcacaacaatgataacattgcataaattattgcctgtgatcacttccagcatgggctttcctgccgtcccgcttggttctccgtcgtcgctggctctttgaagcggctgttcaatgccgacacaaaacgcactgcagtggtgtctggcatccctgtacctgcgcttctcctccgctatcacagccagtgcctcttcctcgctggaaaccggcaccgcgatcccaatgaactttgattttttctctatgaccagagattccccagtcttatgaatggtctgatactgttctttcaatcgtttccctccaactccatcgctgcgtcaaccgcctcataaaaagaaatcggtgtcacttcatatttgatcagcagccggacgatagcctccgcctgcgccctggaggcaaatgcccctcttacctcttctacttccagcacctccggcttcttggtggtcctctccaggaccgcaccgtagatatccttcacagaatcgttcagcatataataggatactacaaatccgtccccattgccatcctccaaataattggttcctaatttctccttcttcatcttttgttcctcctcttttgtaaaaatctataactctccttaaacgtgattccaatcatatccccccaaagcgtcctgcatgacagaacaaggcggagccctataaggtattgtttacttgttattttttatttgttataatgctaaacataggaggtcttacatgaactttaacaagcaaaaaacagagcgcaaaagggaatccctgtcttcgccgaaattacggcggggttcccaccttacgctttttttctataaatatgcactggttgtcatcatcgccctgatcgtcacggctgcaggcctgtccatcggattcatccgcgggatcctcaacaataccccgaatatatccctggactctatccattcaaaaggttatatcaccatgatctatgataacgaaggcaatgtgacaagaaaactgtccaccagtgattccaaccgtgtctacgtctctttggatgatatcccggccaatcttcagaatgcgtttatctccatcgaagatgtccggttctataaccacaacggcattgatatgcgcggtatcgccagatcccttctgctggggctgaaagaacagactctggaccagggaggcagcaccatcacacagcagttgatcaaaaataatgttttagggatacagcctgaaaaaaccacaatcgaacgcatagaacgcaagattaaagagcaatccctagctcttgaattagaaaagatcacttctaaacaaaagatcctggaagaatatttaaatgctatcaatctaggggaaggaactttgggtgtgcagactgcatctcaaaaatattttcataaagacgtatcagatttgacattgtcggagtgcaccgttttagccggtatcacaaagaatccaacaaagatgaatccgatcacccatccgaacaacaatgcgtcccggaggatgacgattctcaaaacaatgctggaagaacattatatcacaaaaagtgaatattcggaagcagtgaatgataatgtttatgaaagaatccagaagatcaacgcaaggcagcagaaagactctaccgccaattcctattttgatgatgcgctgatcctccaggttgtccatgatctgaaagaacagctgggatatgatgagacaaaggcctacaatgccatttacagtgggggattaaagatttattccacccaggattccgggatacagaaaatcgccgacaaggtgacaaacgacccggacaactatccggcaggcacaaaagttgctctctcttattctctatcaggcactgacaaacacggaaaggaagtcagctactctgaaaatgatgtactcagctatatgaaaaaacataaactcggaagcagccttatatttaaaaataaatctgccgctgaggagactgcccacaagtacacaaactcactgaagaaacacggggtcaatgtgatcaacgaacaagtgtccaccgtgatccagccccagatttctatgacggttatgaaccagaacactggccaggtggaggctatcgtgggggggcggggcataaaagccgaaaacctttccctgaaccgtgccactaaaacgaccaggcagccaggttccacatttaaggttctttctacctttctgccggctctggatgctaaaaagatgaccctggccactgtttatgacgatgctccttatgactacctggataccggacgcccggtccgcaactattacaaaggctaccggggattttccaccattcgggaggccatcacagattccatgaacattgtcgccgctaagaccatggccgacgtgacgccggaagtatcctacgaatatttacagaagcttggttttaccacccttgtggacaataagatcacttcagacggcaagacatattctgatctgaaccagtccatggctttaggcggcctgacttacggtgtgaccaatctggaactcaccggggctttctctgccattgccaacggaggaacttattacaaaccctctctctatacaaaggttgtggaccagtccggcaaagtgctgctaaaatcttcttcgtctggtacgccggtgatgagggacaccacgtcattccttctcacggatgccatgaaggatgtaataaagaagggaaccggaaaacctgcggcgctctcatcgggaatgcctgctgctggaaagaccggcaccacctccaacaattatgatttctggtttaccggatacactccataccacacggcttccgtctggatgggctatgaccggaatacttccttttcttccggaaaacagcacgaaaagatctggaaacttgttatggatcaggtggtccaagaaaaaaaggaaacaaaaaaagattttactcagcctaaaaatatagtaaaagcacaaatctgcactaaatccggcaagctggccgtaaagggtgtctgtgaccatgatccaaggggaagtacagtaaagacagaatacttcgctctgggaacgaaaccgaccaaaccatgtgatgtccatgtggccgtggatatttgtaaggaatccggttatccggctaacagcgcttgcccggccaatcagctgtaccggaagatctatatcaccaggcccaaaggcagccgcggaacaacggatgacagcaaataccagatcccggacctttatgtaaaatacatgtgcggcctccatacaccagaataaccaagcagaatagttcaaaaataagagcgtttccgatagcataaccgttatcagaaacgctcttttatatatataaaaagcaatcccgccgcctgggcggcattacttagtatcaaattcaggcatgcggctatttcttgatcttaggctgaaagatcagcgatgccagataagaaaagatcagcgccgcggatgttcccaccgctgctgccgtaaatccgccttcaaacagccccaggactccgtgttggtcgatggcttctttcatgcccttccacagggaaaatccaaagcctgagagcggaactgttgccccgcatcctgcaaaatcagcaatcttttcatagatcccgagagctcccagcactgctcctgatacaaccaggatgaccatgatcctaccaggctgcagctttgtattatccataagaatctgcaccagaatacagatgatgcctcctacaataaatgcttttacatattccatttacagttcctctctttccagcaaaactccatgagcgatccccggcacggtctcgccctcgttaaagcttgtttttgacagcagtgcacctgtaggcacaaaaagtactcttttccagccgccgtttatcatctttcttgtgatcatggaggaaagcactaccgcgctgcaggcacatcctgaaccgcctgcgtgggtatcctgggtctcgtcctgatagatctcgatcccgcagtccccgtgtacctttgagatatcatatccattgtctttcagaagtttgatcagaatctcttttcctacctcccctagatccccggtatagatggcatcataatcatccggtgtcatagcaaagtcattaaagtgctgatagatgacttcagcagcagccggtgccatgcaggctcccatgttcatagagtcttttacaccgtaatccacgatctttccggttgtgatcccccggactttgatcggactcttttccttggagatcacaaaaccaccggctcccgtcactgtccaggttgcggacaaaggtctctggcttccgtactccaatggaaaacggaactgcttctccgcacttccgatatggctggaggcaagagccagcgcatgatccgcatagcctgcggcaacggtcatggacgccaatgaaatggactctcccgctgtggaacacgcgccgtacagtccaaagagaggaatctcaagatctttgataccaaaggatgtggccatgatctgctctaaaagatctccagcgaaggcgtaccgcacctgattttttgtgatctccgccttctggatcgccagaagtgctgcctggcgcataaatcttccctctgcaagctcccatgtctcctcgccgaacaggggatcatcgataacctggtcaaatgcctggcccagcggtccttccccttctttttctccgacaacggaggaccatcctttcagatacggcggattttcaaattccaggctttgttttcccttcattactttcatcacataacccccaatctgactaatatcatatagatcactcccaggataaaggaggataaaattccgtacaggatcacaggacctgcaatggtaaagatcttaacccctattccgaaaacctgtccttccttttgatattcaatagccggggacgcgactgaattggcaaatcccgtgatcggtaccaaccctcctgctcctccaaattttgtaatcttagaatacaggttaaatccagtaagcagcacactcagcagtacaagagctaaagtgacagtgagcagcgcatctttttctcctaaatggagccagtgcatggctgcccgcttcagcgcctgtcctaacgtgcagattgctcctcctacaaaaaacgcgcggacacagttcatgacacagctgctggccggcgtcacctgttccacatattcattgtattgttcctttgacggttcattatgcataacagatttatctcctttcgatatcgggtcatgtcaaatacgtgagtttatacggatgggctttttactcccatccgtttctgcggcagtcgccgcagagaattttcgctattatataatcttttggctatagtcgctgaatctatgccatactgcgtatggctgtgcgggctcgtcctttgaccgctgaaaaagcttccgccttttcagcggtcaaacgccgttccctgtccatgcattgcatggatattcagctctgaatgaactgattaatatacagtcccctccgcggctcgttgctaacgcaaaaattgcatccagcatcctgctatttttcctagtgctatggaatagatgatcagtggtattccgtctcttattttcagtcttctggaaaagaccgggagacttttgagcatttcggccagggctccgatgaggcagcctgtgaagatccctccgaataggccgaataggatcagcagcgggtatcccagagggatgtgccagcggtatatgaatgctgcggttcccaatactcctcccagtgtgatgcaggtttcgtagagcatggcgtgggatatggtcttggtcagcccagccagtctcggcacgactccgatcatacttaaaaaggctagaaagcttccggctatcagtgctccggcggatagtccgtagacgattaaaagtaaattacgaagaaacatcctgctcctcctttttccggccggcgtcaatcattaatgtgtcgttgacatctctctcatacagtctcatctgtacctcaaacggcgttgggtcgtctgtgatcttgatctttccggcgtggttaaagaatacaatgataccaatggcaagtccagctgtgtatgccagatgaagaaccgtaggccctttgggaggtgttcccataaccagctgatagacagttgcaaacaaatcgtcgatccccacatctgtgttgtagctcatgatggaaaagctggctccaaaaaatgctaccaggcagacacctgctatcttcaggtaatgggcccatttcttttcctgggtgacttcctttaagtaaatgataaaatcttccggtcccatgttgaccacttccgcagttttatctatttctttgatgacttccactgcttttaagatcgatacaatctctctttcatttccccgtttctgaaaatgaaagagctttgcttcttttactttctgctccatgtccttgtcggtacagtaaatggatgcaacatcttttatttttacatccggattatgaatacatacgctgtcttccgctttgatatatacggtcatgatgctccatcctttccattaccaaggtcccgtcttttctctgctcctcatttgtgtcacagaaaagaattacggataatactgcaagaatgacgactaaagcaatcaccatccactgttttctttgcttcataaatatcacctctccatttctatgagataaattagttgtagtatctgtctttttttgaatttcattcatggattctttccttgcaggaaaagtatccagatggtatcatttaagagatgcaagtttcataaggaaaggaaggattgtatggaagaaaacggcctgactttatataaattaatgattttatttttgatcaagaaggtagatttcccgctgagcaattcccagatttcagagtttatcctggataagggttatacaacttattttaagcttcagcaggcttttcacgaactggaagacgaagatatgctgagaaccgaacttgtgagaaatgccagccattattttctgacagaagagggaaaagaagccatcgacatgtttgaataccagttgtcagaaccgatccgcaacgatattttgacatttttggcgacaaaagaatatcagctcagagaagaaaccaatctggaggcagattattttcctgcaaagcgggatgagtacaccgtaaggctcaggatcaaagaaaaggacagtatgctgctggaagtgaacttgaatgttgtgtccagggatcaagcgatctatatctgcgatcactggagatccaaccattccgatatctatgcctatctaatcaaccgcctgctctttcaggagcagacccacacagaagaaaaggagaccgattcctaacacggatcgatctccttttttgttccataggaaagttctgcgaacctccctatggaagaaaaagccctgcgggcattatgcacacaaatgcgtgaggaaactatttgactgcgtcaaatcgcatttggcgcgcaaagttgccaagcccctcatagagtgaggggttggggtgttgaagtgggcttgcccactttgttctgctgttatgactgcatgtcctccgcctgttcaggcatgactacttcttcaatgaagtcccagatctcttctcttccctgttttgagagagaagaaaacggaaagaccggtgtctctttgttcagtgacaattcttgccggatctcctttaaatgcttggagagctgactgcgcttcagcttgtcgctttttgtggcgatgataacaggataatagccgttatgtacgatccagtcatacatcatcacatcgttcttggaaggcttatgacggatgtcaatgagcaggaacacaagcttcagctgttttgacgtgtggagatacctctcgatcatggctccccactgctcttttactgattccgtgaccttggcatatccgtatcccggcagatccacatagtatagttcgtcattgatattatagtagttgatggtctgggtctttcccggctgggctgataccctagcgtaggatttccggttcatcagtgcattgatcagggatgattttcccacattggacttcccggcaaatgccacttccggaagctggttttgtggaagcttactggtgatcccgcagaccgtttccagattgattgattttatgatcatggtaatctccttatttgagtaataattgtgctaaatagaccgcaaagcatacaagcatgataaagccattgcctctagtcagtttccggtccttggacgagagcagccacaagagtagtgccgagaggatagccgctgccgcatccgggatgaagcttgtatcaaacggaaccggatgaatgaccgccaccgtccctacgacaaacaggatgttaaagatgttgcttcctacaatattgcccaccgcgatatcggcttttcccttaaatgccgcagtcaccgatgtgacaagttccggaagagatgtgccgaacgccacgactgtcaggccgatgatccggtcagaaacgcttaaggctttggcgatggaagttgctgcgtctactgtaacatcacttcccagcacaatagcaatcagccctcctatggtaaacacgatcattttgaggagggacgcgttcacttcctctatgccttcctcaatcccttctttttttgtcagtcgaaacaagtagacaaaaaaaccaaaaaacagtgcccagaggatcactccatccagacgagaaaggctgcctccggcgatgcccatgccggtgagtatcacggtgatcactacaacaaacggcatctccaccttcaccgtcccttcctttatagccactgtgcagactactgcagttaagcccaggatcagcagaatgttcataatattgcttcccaggatattaccaaccgtgattcccacgtttcctttaaaagccgctgaaatactgactgccgcctcaggagcgctggtcccgcaggctacgatggtaagtcctatgacgatctgcgggataccaaacttagccgcgatcatagaagctccttctacaaaataatccgcacccttcatcaacagaataaatcctgcaaccagaaaggcaatgtgtggcaatagattcatatgtgttcctcttttctaaaaaaataaatgctgtatcaaaattttacaccccaggacgatcaaaatcaatccccccatgatttccgctttatccttcagccggtccccaaacatactgcctatgacaactcccgccaaagatatggcaaaagtaatgcagccgatgaccgtgactgcctccgccagatttacattcaaaaatgagaatgtaactcccaccgccagggcatcaatgctggtggccactgccagtaccagcagttcacggaaagaaaaactgctttcactgtcatcatcatcactccctgagataccttcttttaacatgttaaagccgatcatcacaagaaggacaaaggcgatccagtggtcaatctgcatgatgttgcccgcaaactgctttccagccagataaccggctacaggcatcagggcctgaaatcctccaaagaacagcgcgatccagaaagcttcatttttccgaatcttgcccatgcccagcccttttcccacagataccgcaaaagcatccatggaaagtccaataccgatcattacgatttcaattatgttcatatcctaacctcattatgtacattatcataacagatggaccaaaaggccaaaagccttcggtccatttgccgcacttgataatcattctaaattaccgcaatttatttgtcaacggacacatgatggatttgctgcgtatattttgtgattggaaggatctgatagccgtccttctttaatgtcttgatcagagagtccaggctcttaactgtattctccgcttctgccaagtcgtgcatcagaacaatgctaaccttctgctttttcacatcatttaatatatttttattcaactgctgagggcttaaattaaaattgatggcatctccgctcagagcattccagtcaaaatacaaaagtccctctttattgatatattcaatataaggcttaatatttccggcacaggagttgctgcttccgcccggaaagcggtagatcgtcggctttacatccgtgatctcgtacagcatctcctgcagctctttgatgtccttgccgaacgcatccactgaggagtatatctgatcgtagttatggctgtaagaatgcatggccagggtatgtccttccagcacgattctctggtactgttttctggctttctccgtctgttttccaacaacaaaaaatgttgctttgactttattctttttcaggatatccaggatctcatcggtgttctccgaaggcccgtcatcaaaagtcaaatatactttcttatttgtaattttgctgtcggccatcaacccgctctcgccctctttctggctggctataaaaagtccatcagaatgatctgccgcgtaacgcaggataaaaccgataaaaaataatgcacagacaactgcaaaatatgtttttcgcttcataaaatcgctccctcactttcaatgataggatgtgaggaaggcaaaaaagtatactggcattttatagataatttcggtataatcctttctatactatattatctctcccagttattatcagatttatacataatcgagtaggaggaatttctcttaattgagaaattccgacctctcacaccaccgtgcgtacggttccgtacacggcggttcaatcaacttaacaaaaaaaacacctttcaatgtagtaatctaacattgagaccaatccaaatgaggttaatctcttgttgcttattgctttctgtaaccatccattatgggcaggtctcgcatattgatcgccacaataagcgattttaaatgctgc

SEQ ID NO: 11 - DNA, 109305 bp, Anaerostipes rhamnosivorans
attatatatattgagtataatttattataaaaggaaaagaggttttttatgtcagtgaaaataggacaagccagccagttatatctggaaagtttccttgaacattgtaaacaggaatagtataatataaacaatatgattagaaatattatacttatggagaaacaaaatgaaaacctatattgaaaattttaagaaataccgatttttgctttacgaactagttaaaaaaggagtgaagctaaagtatcgccgatcatatctcggtattctgtggacgttgcttgagcccctgctcactatgatcgtattgagcattgtttttggaactttatttggaaataaagatccccaattcccagtatatatactgacaggccgtttaatgtatagttttttttcttcggctaccagcggcgctatgaaagccatacggacgaacgcagggatgatcaaaaaagtttatgtaccgaaatatatctatcctctatccagtgtgttatttaattacattatttttgcaatttcactgattgtactggtggcagttgccgttgtattaaaagtgtatcccactgtatatatgctgcaggcagttgttccgttgtttttattgttagtaacggcgttcggtgtcggaatgattctatcaactatggctgtttttttcagggatcttgaatatttatggtctgttggtctaatgatcgttatgtatgcatcagcaatcttttattatcctgaaaaaatattaacctcaggttttggatggatactaaagtttaatccattgtatttgctgatccataatttcagacaggctgtttttggtatgcctatgaatatgagatatctggcagcatcgataggatttgccattgtcagcgtcattgtagggttggtattcttctacaaaaaacaagatgaattcattctgcatatataggaggttgtcatggcaaagaaaaaagaagtattaaaagtagaaaacgtcggcatgaaatttaatctgagtcaggaaaaagttgacgatctgaaggattatgtgatcaagttgttaaaaaggcagatttcatataatgaattctgggctttgaaagatattaatttctctttaaataagggagaccggctggggatcctaggtttgaacggtgcgggcaaaagtactctgctgaaggtaatagcgggagtactgaaagccacagaaggaactgttatgacaaaaggaaagatagcacctcttttggaattgggagctggttttgacctgcagtataccgggcgggagaacatatatctctatggggcagttctaggcttttcaaagaagttccttgatgataaattagatgagatcattgaattttctgagcttggaaagtttatcgatgtaccggtcaaaaactattcatcaggcatgaagtcaagactaggattctcggttgcgactttagttgaaccagatatcttaatcttagatgaggtcttgtcagttggggatgcaaaattccgtaaaaagagtgaggccaaaatcatgagtatgtttgacaaaggagtaacagtactatttgtctcacattcattggaacaggtacagcggctgtgcaacaaagcaattcttttggaacagggaaggatcattgcggaaggcggcatagatgaagtaagtgcaatatatgatgagaaaacaaagtaaaacacatggaggtacacaatgaaaaaggttataacttatgggacttatgatttgctgcatgcggggcatattaacttattaagaagagcaaaagaattaggagactatttaatagtagttctttctaccgatgagttcaactgggatgaaaaacagaaaaaatgctattttagctatgaagaaaggaagaaacttctggaagcgatccgttatgtggatcttgtgattccggaaaacaattgggagcagaaagtatctgatgtccaggaatatcatgtggatacttttgtcatgggaaacgactgggaaggtaaatttgatttcttaaaggagtactgtgatgttgtatatcttccgagaactgagggaatctctaccacgaaaattaaacaagatttaggtttagggggaaaaagcaaagcagaagatactgagtaaatgaaaaggtgcacaggaggttttgtatgaacacacaaaaggtgagaaaggctgtaatacctgcagcaggactgggaacaaggtttttgccggcaaccaaagcgattccgaaagaaatgttgccgattgtcgatgtgcctacggttcaatatattgttgaagaggccgtagccagcggaatagaggaaattttgatcattacaaactcaaataaacattgcatggaaaatcattttgataaggcatatgagcttgaggaacgcctggcagaatcagggaaaatggaacaggtgaagatgatcaatgatatttcaaatctggctaacatttattatgtgcgtcagaaggagccaaaaggcctgggacatgccgtactgtgtgcaaaatcatttattggaaatgaaccattcgcggttcttctcggggatgatgtggtgatcaataaaggcggacagccagctcttgggcagcttgtaggagcgtacaacaaacatcacgcatcagttgtaggtgtgcagacagtggcagaggatcaagtgagcaagtatggaattgtggctccaaataaaaatgttcctgcagacggacgagctgtaaagcttgataatatggtggagaaaccaaagcagaaagatgccccgagccgtatggctgtgcttggacggtatgtcttgactccagagatttttgaactgctggaaagccagggagccggtgcaggcggggagatccagttgacagatgctatctgccggctgatcgatacacaggcagtttatgcatatgactttgagggtatccgttatgatgtgggtgataagtttggttttattaaagcaacaatagacttcgccttagaacgcccggaattacatgatcaggttgccgcttatctcaaagagatcagcgcaaatttataaggatataagaaccatgaaacaaaaaataaagaaaataataacaaagctgtataaaaaatttacctatgcaatacctacgagcaaaaaaattatactatttcaaagcagcaacggaagaaattattctggaaatccaagatatatatatgaagagatggtgcgtcaggggctggataaagagtatactctagtctggttcttgtttgataccacgatcgagatcccgggccgctgcaaaaaaataagaaataattatgttccatatttctggtatctgatgagggccggagtctgggtatttgacagccggcagcctatgtatatgaggaaaaaagattcctgtatgtatattcagacatggcatggaacaccccttaaaaaacttgctctggacatggataagatggatatgggcggaagccagaatatcgaaggctaccataataaatttcgcagggccacggctctttgggattatctcatctcacagaatccgttttccacggagatatttaaaagttgttttgcttttgaagataaacctatcctggaaatcggatatccaagaaatgatattttgatcaacgatgacaatacggaagccattcagaaaatgaggcagaagctgggtcttcctctggataagaagattatcttatatgctcctacatggagagacaatgagttccactctaaaggtaaatataagtttgcatcaaagctggattttgataaggccagagaagcactgggagatgagtatgtatttatcgtaaaataccattatctcgtctcagagtccattgactggagcccatacaagggatttgtctacacgtttgatgagacaaaggatattgcatggctttatctggtgtctgaccttcttatcacggactattcttctgtaatgtttgattacagtattttaagacgtccgatgtttttctttgcctatgatctggaggattataaagataatttaagaggattctattttgattttgtcaatgaagtaccggggcctatttcaagggatacggaccagctgatcgaagacatcctcacttatgatccagtacagtggaaagacaaatacgatgcttatcacgagaaatttaactgcagggatgatggaaaagcggcagataagatcgtgaaaaagattacaggacaataaaaaagaagaggaaactcttcttttttatctatatgaaaggtttaacagcatgttaacgagaaaaaacgagaagaagaagcatatcttccaatggatcggattggctgtcattatactatactttatttttgcggcattccagtacaagatttttcagggagatatatttaaggcgtacaagattgactcgccggagacggaagtagtttgtgacggctgggagaagaagctagagtttacggcagcacagagagaactgaagtattttgagatgacctatctgaacccgaaaggggacatgtccaggctgagatcaaagattcatccgggaaaagtgtgtggaagaaagattttccagcctctgagatgagaaaagggatctatgccagagggattcagggaacggtctacgatgtgaataaaaagcttaaaaagggtgagagctataatctcagcttaaaagccgtcgatatgccaaaagaacagaacatcacagccaggagaccggatctcactatgcattattatgggtttaatatcatcaagttttgtatgctcctgggagcaatcttgatgttggcggttcttctgtggatcccaaataagttcaatgaaaaatggaatctttacctgagcagggctatgtttgctgttacgccggtgctggcgtttgttctgctggaacggtttaatcagaccagtatacggaatcttggtgtttttaagagcagcgtcaatctgctggtctatattcttttgctggcatttttctttttgatcacgaaccggacaaagattgcttcttttctgacgatcattacagtgtctttgctggggctggctaattactttgtagtttctttccggggaattgatctcatgccaattgattttacttcgatccggacagctgccaatgtggcagcaggttatgagtacagcatcaacacggcgattctgtggaatggagtcctgatccttggatttctgatcgttttattccggctgaaggcaggaaaagggctgaaaaagaaacagagattgataccggcagcggtatttgcgggaatgctgctggtgaatatcagtgtgttcagcaatacccagcgtctgagggaatgggggatcaagatcaagctgtttaacccatctgtgagctgtaagagaaacggctatgcggcgatttttacagccagccttaagttcttagtggcagaaaagccggaaggctactcggaggaaaaagtggagcagatcatgaagccttatgtgaaaaaggctgaggaggagaaccggaatatcaatgtatccgggaaaaagacgacaaaacagactccgaatgtcattgcagtcatgaatgagtccttctctgatctgtcggttctcggagattttaagaccaatcaggattatatgccgttctatcacagcctgaagaaaaatacaatcaaaggaaacatgtacatgtcaagctttggaggtcagacagccaactctgagtttgagtttctgacgggcagttccatggcgtttcttccggggggatctgtagcataccagtatcaggtaaaggatgagctgggaagccttaccaccactttgaaggaacagggataccagggaatgaaagcgcttcatccatatctggccagcggctataacagggaggttgtgtatccgctgctaggattcagcgatttcctttccgatgtggactttaaagaaccggagatgctgagaagatttatctctgataaagaaaactacaaaaaagtgattgaagagtatgagaaggcaaaagaaaaggacagtactccttattatatgtttaatgtgactgtgcagaatcatgggggatatgacaaaggatatacgaattttaaccaaaagattcatatcaccgacggaaaaggcgatgagattgcagaccgttatctcagtcttgtgaaagaatcagactctgcctttgaatacttggtccgttattttgaaaaggtaaaagaacccacagtgatcgtcatgttcggagaccaccagccaagcctggatgttgaattctataataaagtaaacaatggcagtgcacagagaaaacaaaaggtaccgtttgtcatttgggctaactacgacattaaagaacagacagtcaatgatatcagccctaattatctgggagccttccttgtgaatactttgaacctggatgagacaccatatgaaaagtacttgctaaaactgcacaaaaagtatccggtcgtcacatcccatgtgtatatggatgccaataggcagctgcacacaattgacactttggacgatctgccggaggatttaaaacagtactggatggttcagtactatcatttatttgcaaaggataaaagagatgattctttatttttcctgaaggagtaggagggcagggctatggttacaattctattagcaacttataatggagaggattatttgaaggctcaattagaatccattgcttcccagacatatggaaactggagacttgtcacaggcgatgacggatcctgtgacgggactctgggcatcttggaggactttaagacacgttatccggaccaggtgaagatcttaaaaaatgaaccggctgccggaggcgccaaaaacaactttatcaatcttctgagaaatgcccacggtccatattttatgttctgtgatcaggatgatgtttggaaaagagataagatctatgagacattaaaaaaaatggaggctctggaggaacggtacggaaaggaaacaccgatcctcgtgcatacggacctgtctgtagtggacgaaaatctggagatgatcgctgagtcctttttccaatatgccaacattcccaaaagaattgcgttaaatcagctgatcgtacaaaattctgttaccggctgcaccgctatgatcaaccgggctcttcagaagtattttttgcagccgctgcctatgggaaagatcctgatgcatgactactgggcggcgctgatcgcaaaaattttcggaaggattggttttgtcaatgaaccaactatgtattacaggcagcatggtaataattctgtaggggcaaagaattccaagaatccggtatttttgatgcagaggctgaaagaaggtaaggagtcctaccggaaacagatgatcaagtccatggaacagatccagggatttgttgaaacctatggggaagagataaaaggcctggatgactataatctgttgaatacttacgggaacctgtattataaagggaagatgcgcagattgtttttctacaagaatcaccaggtactcaaggaagggaatatacggaaactgatgcagtggctgtggggttaagataaaatgaaaagtggcataaaacttatattaaaatatatggtcatgtacttgtcatgcctggcacccagaagcaggaagatctgggtgttcggggcatggctggggcagcagtttgccgataatccaaaatatctttttattgaggcaaaccagatgaaaggaatccgtccggtctggatcacaaaaaatcctgaggttgtcagggaagtgagagggcttggatatgaggcatatctgttttccagtggaaagggtatcctctgccagctgagagcaaaatatgcggtgatgtgcaacgggatcagtgatctgaatcacacgtttttggggagagcgattttcttaaatgtatggcatggagttccactaaaaaagattggctatgatgatacaaaggggaagaactgggacagcaggggacagaagattcgcaggagcatacagcagtttcccctgggaagagaatatgtggtggctaccagtgatacatttgccaaaatctatagaagtgctttccgccgtccgccagagcagattttgacctatgggcagccgaggaatgatatattttatgacagggatcagatttttccggtaaataaaaagctgaaggaacgtctagaggggcacaaagtggttctgtacgctcccacccatcgtctggagggaaggataccttttcctctaaaggagaattttgatttaaaaagattggatgaattctgccgtgacaatcatatactgtttattatacgtaggcatttctatcatttccaggaagaacttgatctgtccggctattccaacattttggatatgacgagggaatccttggatatccaagaacttttgatgggaacagacttgctggtcacggattattcgagcacttacattgattatttactgttggaccggcctgttattttctatgattttgactacgacagttatattgaaaaagacagagagatgtattttccatatgagaaggtgacgcctggaatcaaagccgaaacgtttgatgaactgatggaagggatgaggcaggttttctccggaactgatatgtttgcagaagacagacaaagggtcaggaaccttttttattgtgaaaaaggacaaaaatcggtaggagaagagcttcttgaaaaaatgaagcttctgtagatacagcgaattatatggtgggagtacgaatgacggaaatgagaaagaaagtaaaaaataaggaccgcacgagggttcagaagtacaaccgttcagctatggctgtatgtgttgttgtttttgctgtgattctttttgtgtcagtgtataccagctatacggccaataaaaaagcatacataaacggtttggagcagcagattgagatggtcagcggggagattgaaaagagtatcaggacccggggaaaaaatgctttatttatcagtaaagaggaaaacatcttaaggctgctcagcacaggagagcaggagtacggacagaaggcggagactgacatatggaagtccgtaggccaggatcaggacttttacgggatcagcctgcaggatacaaaagggaacttttatctctcaggacagaacatgaaattatgcaaccagctggtcaaaaaagaagtagataccaagcaattgaaagagagccgcaaggcctaccggatcaccatctgtgacgatggaaatatgcctttgatcatcatatcgtcacaggtgaaaggaaaagacgaaaagccaagtggatatctgcatttaatctatacctataaaatgctggcgctgcctaatgatatgaaagacagggaagggtatctcgtgcgcctgccctcctgggagatggtctattataatgacaaagaaggaaagatcaaagtgggttcccagattgattccaggaagaaatttatcaagactgcggaagaagttttgaaacgcaataaccatatcttcacttacaagagcagcgacggggaaaatatgctggccagtgtatatataaatgaggagtttccgttcgcatttatcctgtccatcagcgcaaatgacatggtggagacgatcactccgtatacagtggctcaagggatgatctctatcgggctgttgctcatattgattgccatgctgcttttattttctcgaaggcttacaaaaccagtcagtgaaatgatcgatatatgcggacggatggcggagggggatgagacggctgccttcgagcctcagggagacaaagagcttgaccgcctggcctctgcatttaacaattacagggctaagattgagcaggcagcgtacatagatccggttcttaaggttggcaaccgggcaaaagcacttgtggacatgaatttacgaatctcagatttccctgatgaaaggttttatgtatttatgatcgacctgaaaaatttcagccggtataatgaaatcttttctgtggagatcggggacaggattttgatgtctgttgcccagaaactatcaaagatctttggaaggcatttgtaccgcattagtggagatatatttcttggcctgatcccttgccagtataccctgggtgtcactgctgagaatatttataacagaatctgcggaagctttgtccttcatgggattgagttggatgtgaattattatatgggggcctgcagctatccggagcacggaaaagaagcagctgaactgctggaaaaggtacagagcgcagccaggtacgccaagacatcggttccgcagaagaatgttgtcatatacagcaaaaggctcacagaggaagtgagagaagaagagaagattgcagccatgctcaggaagagcctaagagacggaacattggaaatgtggtatcagccgatcattgatccgtttaaggaggagattcattcagctgaaatgctgctgaggcttaagaatgaacaggggaactactttccgccacagagagttgtggaggtggcagagcgtttcagtatgatggatgagatcggagattatattttaaaagaagcgtgtgtcacattaaagatgttggaagcagtgccgaaccatattggaaacctgcatatcaatgcctccgttcagcagctggccggaaaggattatgacaaaaaaatcctcaggtatctggaggagcagcaggtagatcccggaaagatctccatggaggtgacagagagtatcctgatacaaaatattgatgagaccgcggcagtgctatccaatctgaagaatgcagggatcaaggttgcactggatgacttcggtactgggtatagcagcatcctttatctctcctcgctggctctcgatacactgaaattggatatgaagctggtcaaccaggtaaatcagggcagacaacagatggaatttctaaagaccgtcatacagctggcaaagattaagcatctggtggtggtggccgaaggggtggaagatgagaagaccctggagaaaatcaagtggtgtggggcagattatatacagggatactattattccagacctattccaagaacaaaatttatcgaatttataaaattgtatgaaaattaaaatgagacagtaaagaactggttctcccttagaagataaggggggattagttctttttttgttccataggaaagttctccgaacctccctatggaacaaaaaagccctacgggcactatgcacacaaatgcgtgaagaaactatttgactacgtcaaatcgaactttattcgttttcctaactgatgggaaatagtccggttgaggacatttaaagccccatggtattcttgagacaagataagagtaacagtgaagccaaaaaggaggagaagcagatgagagcggcagtttattatgcaccaaatgatctgagaatggaagacgtggagacccccaagccagggcccggggaaatactgatgaagaatatttcggcgctgacctgcggtacagacttaaaacaatataagcggggatatccgaagtttaaggaagggcagaagctgatctttggccacgagagcgctggaatcgttgcaaaagtaggagagggagtgacagattttaaagcaggggaccgaatcgctcctcataattctgctccgtgcaaccattgctattactgtaagattggagagcacagcatgtgtgaaaacctgaccatggtaaaaagtgcctgggccgagtaccgtctcctacctgcacctattgtaaaagaaaatgtgttccacatcccagatcaaatatcttttagatccgctgctttactggaacctcttggaagtgcagttcacgggattactgaggccgatattcagttgacggacactgtggtcatcaatggggccggccccctgggtcttatgatgacaaagcttgccaagcttcggggggcctatgtgatcagcacggataaaaatcaaaaacgccttgctgtggccagagaacttggagctgacgcagtcattgacatttctgagacagaggatgtggtggacgcagtcaaagggctgactccttatggaagaggggcagacattgccatcgatgccacgggtgttccggaagtatgggagaaaaatctttatatggtgagaaaagcgggcaccgtgctggagtttggcggttgcaaaggaggcagcagcatcaacatagatacaacgctgctccactattctcagctgacggtgaaaggggtctaccacacgacaccaaagctggaagaacaggcgtttaggcttattgagagaggcgtaattaatgaggagctctttgtaaatcatacgtatcctctggaacagtgtctggaggcacttgaatcccacgcagggggagatgtgatcaaaaatgagatccgctgtgatttataacactgatcaataggaggaagctatggagaaagagaaagcgaaggtagaggttatcaaagctgccattcagtgcagcgaaaagaaattgattcacggaacgtcgggcaatgtttccatcgcctgcagggaagagggcgttatggttatcacgcccagcgggataccgtatgaggagatcagcccggacatggtaccggtgatcaatctttctactggggaatggacagaaggggagtgcaaaccttccacggaggctccgatgcaccggatgatctatcagcataaagagaaaatggaagcggttgtccatactcattcaccttttgcaaccgccatgtccatcctggtggaggaacttccggcagttgcggcggcctccgcaccgtattcgccggtgaaggtagcaccgtttgagatcccgggatctgaagagattgccaaagcggcggtaaaagccatgggagaacacaatgtggtctgcctgttaaagaatcatggactgatcgcagcaggcagaaatgtgtctcaggctatgagcatcgcggaatacgtggaggagaactcacagatcgcgtattacacttatacggcaggaaatatggagcctatcccagaggaaggttataaaatcatgcatgaccgggctgtaaaaaaactgggcttagaataagcaggacaatagataaggcaatggaaaaacatacctgaaggatgatcggaactgaggtgataagattagagaaatcataatgagaggatgataggaatgatgggattgccaatgagacaaaagaagatcttaaaaaagcttatggccttggacggatgggtaaaaggcaggaagcttgcagaagagatggaggtaactcctaggacaatccggacagatattgcagccatcaatgtgtggctgaaatcggtcagctgttatattgaatcttccagacaagaggggtaccggctccggggagagagactgggagaactggagtctttgctatgggacggcacggacattccgttaacaccgcaggaacgtatgcggatccttggcatcagactccttcaggcagatgaagaaaatccagaggatgtggacgagctggaagaggagatgtttgtcagccggacaacgctggaaagcgggatttttaagatcaaagctatgcttgagagccggacgacaccaatgtacataaaaagaaccggaagaaagatatggacgtcaggtgaggaagagacaaggagatttctcttaaaagaacttgtagtagaccgcacagatccagattatctaatgatcgagaattataatgattattttgggaccaatgtgccggaaaaaatgatgaactgtgttttgaaatcattgacagacaaggagatttctatgacagcggaggatattctgcacttggtcatttatctgtcgatcaagctttccaggatccatatgggttatgaattccaaaataagaccaaggatcttatggctcctgaggacattaactgggcattgtctgaaacgattgccgagaaagtacgaatcgaattttcaactgtattcaatgaggaagaactagtagatctggctgtccagctttctcttttccgcctgatcggaaatgaatcagaagccaggcctattcccaaaccggagcagtctcattatgaatatgtggtaaatgaactgttaaaagatatcaaaaataaatttcatctggacttaactgacgaccaggagttgaaagatggactggtgacccatatcagatataccctgaaacggatcaatatggagccagagagcaccaatccagtgctcatgctgctgaagacagagtatccttttgtttttgatatgtccttgttcttatatgaacgtttttacgacgtattcggtgtgaggctgaatgagaatgagctgggatatgtggccacgtatctgggaagtgctgtggagcgtttggaacggaaaaaatctcctaaggatttcacgatcgcggtggtgaccgggatgaattatgggacaagcaggcttatgacaacaaggatgaaagcaatctatggggataactgcaacattgaaggcccgttttccatctatgcagtccatgagatagagaaactcaagccgacctttgtgataacaacagagtcaaagcaggtactcaaaaatattcatgtgccgaaaatacaaatttcaccgctgctgaatgaaaaggaccagagggagatcaacaaatggctgcagcatatgagaaaagaaatgatgtacgaccagctgccaaaaagtatcaaggattattttcacgaggagttatttttttatcatatgaggacggaaacaccgggagaagtcatcaaagctatgtctgaaagtcttataaagctgggatttgccgagagagattttgctgtaaaaacaatggaacgggagcaggtggcttctacgatctttggaaataagatcgcaatgcctcatccgatcgaagcatgcgcaaaaaaaacggtcatcagcgtggggattctggaccgccccattccatggggcagcggtgaggcacagttgatcttcatgctggcggttaaaaaggaagatatgaaatatctgaacagcttttttgatttgactgtgcgtctggtggatgatgaaggactggtaaagcggctgctggattccaaaaatttggcccaatttaaagacaggctgccgattttgtagagaaaggaaagaaagcatatggatttaaaagagttgatttgcccaaagctgattctatgtaatgtggacgcggaggactcccaggatgccttgagacagctggcaggacatttagaaaaagaaggatatgtggaagaaggatatctggatatgcttttggaaagggaacggaaatttcccaccggactttgtacgaaaccgtttgcggtggcgctgcctcatacggagccggatcatgtgataaaaccgtgtatcgcggtggctaagcttcagaaaccggtagaatttcatgagatggtcaatgatcggaacactgtgcctgtgcgcttcatttttaatctggtactacagaagacagagcagcagctggaactgctgcagaagatcatatcaatattttctgataaggaggcgatggagaggctggaaaaagaagagaagcccgaaaaaatagcagagatcttagagtatacggaaataagcaaaagctgttaaccgttgaaagaaaggagaaataaattatggcaagagcatttaagattttgtctgcctgcggcagcggtattgcaacttcttctcacgtggcaacatccatccggcagggaatggcagaccggggggtaaatgttgaggtcaggacctgcggagtaaatgagatgtccgggctgatcgacaacgtcaaaccgacgatcattgtttccactacttctttggaatccgtgagaaacgtaggggatattaaagtcatgtccggagtgcctttgttgacaggcatagggaaaaatcaattttttgatgagatggaaggatatttaaaaagtatttcataacaaatgaaaaggaggatggaatatgggtgtcataaatacaattttagggcttggcgcttcagtcattatgccgatcgtgatctttcttctgggagtagtctttaggatgaaggtaaaaaatgctctcagggcgggacttacggttggaatcgggtttaccggcatcagtctggcgatcagtctggtaagtgataatctgggaggtctggtaaaagccatgcaggctaactgggggctgacgctggatatcacagatgtaggatggccggcagcttcgggcatagccttcggaagcggaacttttgtgctagcttccattgtcacatttcttgttgtcaatgtgatttgtctggtcattaaaatcacgcacacgttaaacgtagatattttcaactactggcatttcatcttgatcgggactgtttcttactttgtcacagggaactttatactgggagtgatcgtgggaactctttttatgatgatcaatacaatcttaggggagcggcaggaacaggttgtaacagattttgccggtgagcagatggccggactgactttctctacccaaggattccctttacagcttttgtttgccagaggcgtggactgggtgattggaaagatcccggggctgaataagatttctttcaaccttggaaatcttccgtccagcatctcctttttcggagagccgatgatcttaggttttctgctcggaggtattatgagctttctggccggatataagtgggatgcggcacttgtggtcgcagtgggactgtccgctgctatgttcctgctcccaagaatggtttcgatcatgatggaaggcctggcaccgctcaccgatgcagccagggactttatgaacaccagattccccgggcggaagttcaacattgctatggattattgtatgctcctgggagaccgggatgtcattaccatgggaatcatcactgtaccaatagtacttggacttgcagtcatccttccgggaaacagattccttccatttacagaccttaccgcgcttccttactggatgatcggtgtggttatcggtacaaaacgaaattctttccgggcgctgatcgctgcagtgctgacactctgtatcggactttggatcgcaacggatcttgcaccgttgatcacgcagatggctacaggcgtcggatttaaattcgaggcaggaacgaccatctctggattctgtgtagggcaggaatggccgggctatatcatccataagatcatttccttcttctatggaatgttctagcatgattatttttagataccaaaatatttatatatagggggatgttagaaggggattgtccggcaggccggacggtcccattcctttcattccataggaaagttctccgaacctccctatggaacaaaaaagctctacgggcactatgcacacaaatgagaaagggaggatgttttatgttagtgacaatgaaggaactgctctgccgggcaaaagaaggaggatatgcggtggcggcagccaatgtttttacgggaaggactgtggaagcatgctttaaggctgcggcggagagaaaggctccggtgatcattgcctgtacaccttatgtgcagatggaagaactggctcttgccgcccggatgtacgaacggaaatatccgcaggtcccggcggcgttgcatctggaccatggaaaagaatatgaggatgtccagcgtgctttaagatgtggattcacctctgtgatgcttgacaagtctacacttccctacaaagagaatgtaaaagctgtcagggaggccgtccgtgccgctcatgcagtgggagtcactgtggaggcggaacttgggcatgtgggaaaaggagcagagtatgaagaaaccagggacagcggccttacaaggaaagaggaagcaaaaggctttgtagaagaaaccggggtggacgctctggcagtggctgtgggtacgtcccatggggtttacaagggcaggccccatttgaattttgagcttcttaacgaactgagccgggaagtgcctgtaccgcttgtcctgcacggcggttccaataccggtgaggataaactgaaaaaagcggttgatctcggaatacagaagatcaatctttccacagacctttctactgagtacctgaaaggtgtgaaaaaatttgaggaaacaaatgatccactgtttgatgagagcggtgcactggtttacaccgggaatcggacagtatatgccaaccaggcgttgtctaaaggagcagaagcttatcaggaaattttagaaaaatatatcagggtatttggaagtgaaggcaaagcactgggttgagaaaggatgaagaaagatggaaaaaatcaaggtagccgcaagtatggagctctggcctgatcatttaaagaaactggagccttactgtgaaatcaaaaggcttccgtggacagcgacggatatcctgcccacagaggaagagattatagaggagtgtgggggctgtgaggctgtgttgttttatacagatcctgtgacagaaagagtgatcagggagctgagagaaaagggccttaggctgatcggctgcggaagggccacaccaaataatattgacaccagggctgccggggaaatggggattccggtgatccatgctccaggaaggaatgcgcattctgtggcggaatatactgtgggtatgatgctggacatctgcaaaagaatttcctttacttatcatgggctctggtccggaagatttttggcagatgaaaaggatatttatgatgtgccggacaaaaaggatgtgatctggaggtttaaagaccgggaaaatccaagatcctcctacccatggggcatcgacctgtacggcaggacgattgggatcgtgggacttggacatattgggcagaatgtggcaaagatatgcgcagggatggggatggaagtgcttgcgtatgatccgtttcagccggaggaaacctttgaaagcgtttgtgcaaagagatacgaagatccggttcaaatgctgccggaatgtgatattgtgagcgtccatctgagtgtgacgccagagacaaaagctatgatcgatgaggagtggtttgatgccatgaggcaggatgcctattttatcaatacctccagagcggcagtggtggaccagaagtcattgattgaggcactttccaagaaaaagatcgcttttggggcggtagatgttatgtgggatgaaccggcgccaaagaaccacccgtttttttccatggacaatgttttgctgacaccccacatggccggtatcagtacagactccaagaagtgggcttcggagatgattgcggaggacttgctcaattacatattggaacagccccttttacgagtatgggacaggtagaaagggggaagggcatatgaattgcatcaggactgttttgggagatgtggatgtgcaggagatgggaatgtcctatactcacgaacatatttactgtgatccgtatactgcccaaagggacccgacactggcgatcacagatatcgaaggttccataagagagctccggctgttttttaaggctgggggatccacactggtggagggaacggcggctgattacggcaggaatccaaagaaacttgtatatgccagcaggcagagcagggttcacctgatcgccaccacagggttttatctgtatgaccacaatccagagtttatggattatatcagcacagaagaactttcggagctgtttgtcagagaaattgaggaggggatggacggaacccacatacgtgcagggcagataaaatgtgcggtctctccgagatttatccatccaagggagaaaaaatgcctgaaggctgcagccagggcgcagaagaagaccaatgccccgatctggatccaccacggagggatgatgggagaagagatccttcagtgtctggacagtcagggagcggacctttctaaggtagtgctggggcatatggacaggaacccggatccttacgaatataaaagaattgcagccatgggcagttttctgtctgtggacaatattgccagagtttaccgctatccggtacagacgaatatagatatgatcttggatctaatagaggaagggtatcttgaccggcttctcatcagtgcggattttggacgaagtaattattttaaggccaacaatggaggtccggggcttgagtacatcatcaggaagtttatccccagactgaaagaaacagcgggtattacggaaaaagaaatcagtacgatatttgttgaaaacccgaaaaaagtatatggctgcttttaaccgggacggagggatttgatgtatgagaaagagacagtgataaaagaaaaatgcataagatctccatttcttatggccccaatggtgacgtttggatatggagtggaggacggaatgatcacagaggagctcatttcccactatgaggagcgggccagaggcggagtagggatgatcattgtggaggctgcatgcgtggcagaggacggacggctttccaaacatcagataggaatctggaaaaaagagcagttggaaggacataaaaaactcgttcaggcagttcatgactgcaaagtaccgatactttctcaactccatcacgcaggcatccggacagtatcgggaaggcctgcggctccgtccaagttccatggggtgctcagagggaaagggtatacggcagaggaaatgaccacagaggagatccttgagagagagcagcagtttatacaggcagctgtcagggcgcaggatgccgggtatgacggggtagagatccactgtgcccattcttatctgctgagttcatttttatcccccacagtcaaccacaggaccgacaggtttggaggagatttaaggggcaggatgcagatggcactggatatattatcggggatcagaagaagctgtggagatcattttatcctgtctgtccggcttggatttgacgaaccagatcttgaagcctcagcccatatggcaaaggcatttgtaaaggcgggcatggatcttctgcatgtgtctacaggctttgggtccaccggttctatggatgagagagcgatggagccgtctcctgacggttttccgtttaatatccgaatttgggcagccatgcagatgaagcagagagtgaagtgtccggtgattgctgtgggcgggatccgccaggtacagcaggggatgtttcttttggaacaggaatgtgcagattttgtggcgttgggaagagcgttgctctgcgatccccagtgggttaagaaaataaagcaggggcgtgagatcgtttcctgcagaaactgccggaaatgtctttggagtacggactaccataaatgtccgggatggagggaatatcatggatgagaaacagatcgaaaaattcagattcggtgtactgacatcaaaggggcacgctgaagtacatgagatgaggctgccaaagctttcagaacaccaggtgctggtaaagcagctggcctgcaacatctgcactgcggattacgggcagtggctgggcctgagggaacaccagggttatcctatggcgggaggccatgaaggtgctggtatcatcatcgagaccggggataaagtggtagaacttctgccaggcgattttgtggccatttccaataactactgcggggaatgtgaatactgcaggcggggagaggaaagccagtgtgtgatccgaagctcctatgacctgcatgagggaggttacaagggcagaatgggatttgcggaatatcaggtgagaaatgcaacagcagtggtgaagatgaatccaaagctcagcccaagtgaggctgcattcttagagccactggcaaccgtggcaaaggggatcgggaagctgaatgtccggccgcaggatactgtagccgtcatcggagccggcactatggggcttttaaacgcccaggccgccagggcatgcggcgccagggtcattgtaaccgagatgatggaaaagaagataacaactgccagagatatgggctttgaagtggtcgatgtgaggaagaatgaccctgtgaaaatagcaaagcagttcacagacgggaggggtgttgacgcggtcattgtggctgccggagcgacgaaggccaatgaacaggcagccgccatgctgaaacattttgacggcaggattttaatgtttgcggctgcttatccgccgcccaaactgggcatcacctccaatgacattcattaccgcaggatggagatcctggggacttatctgggggataccaaggatttcttagaagcggcaagaatgctcaatcaggcagtggtggacgtaaaaccgttgattgagaaaagccaccccctggatgagatacaaaaagcttttgaggaagcggcgaaaccgggaaattaccgggtcagtgttttgcttcacgatcaaggcggaggggagggaacatgctcagaatagggcaggaagggtttttttataaatatatatcggaacaggatgtggaactatttgcggaagtatccggagataaaaatcctctgcatctggacgaagaatatgcccaaaccaccaggttccgcgggcgcatcgtccatggcatgatcggggcggggatcatctcggcagctatcgcaggagttcttcccggaccgggaaccatttatctgaaccagacattaaactttgaacggcccgttaggattggcgaccgggtgactgccagggtaaaggtgctgaaaattgagatgaaaaaaacattcaatcttgccacattggagacaacctgtgtcaatcaggacaatgaagttgtcatcagcgggagagcattggtgattccgccagaggaataggaaggaggagaaatgcagttattgagagtagtaccgtccgtatattattttgacactatgaagcagttccaggaagaattccagatcggaccagaagatctggtggtcacaaaccggtatttatatgaaccgctgctgaaaccacttgatgtgcaggcaaattatatttttcaggaggcgtttggagacggggagccttctgatgagatgatcgaccatattaaaaaagcagcgtcggactgtcattatgacagaatcttcgcccttggaggaggaaccatcctggatatctgcaaggtgctggcactagatatgccggatggatgtaccccgctgcttgagggagagagggagccagtgaagaaaaaacatctgatcgctgttcctaccacctgcggcactggaagcgaggttacaaacgtggcaatagcggagatcaaatccagacatacaaaaaagggactggcatcagacgcatgttatgcagactgtgctgtgcttgtgccggaagcgttagaggggctgccctatcaggtgtttctcacaagctccatagatgctttgatccatgcagtggaatcctttttgtctccgaaagccactcctgctacagaaatgttttcaaggaaagcaatagagatgattctgaccggataccaccatatggcggagcatggaaaggatgcaagaaggaaggaactaaacaagtttatgctggcatccaactatgcaggtattgcatttggaaatgcggggtgtgcggctgtccatgcgctgtcctattccatcgggggtgccttccatgttccccatggggaggcaaattatcagtttttcatggatgtaatgcagctttatgagacaaagaggccggagggcaggatccagaacctgaaacagacgatcgcagacattttcggctgggacagggactctgtttttctgcggcttcgggaacttttatccaattttatggaaaccagaccattaaaggattatgggatggtacattctcagattgaggagtttaccaggagtacagtggagaatcagcagagacttttacagaataattatgtggaactgacgaaagaggagatcagggaaatatttaagaggagatatgagagccagtagccgggagggatggatatggcattaatgacagggaaagaatatatcgagagtatcaggaaactggaccagaaggtctatatgtttggagaaagggtggaagatcccacaaggaacccgatcctgcgtccatcgctgaattcagtgaggatgacgtatgatcttgcgtttcaggaggaataccgggatttgatgacggtcatctcgccggagacaggacagcggatcaacaggttcacacacattcacaggagcagtgaggatctggtaaataaagtgaagatgcagaggcttctgggacagaaaacagcctcatgttttcagcggtgtgtgggaatggacgcatttaatgccgtttacagcacaacatatgaaacagatcaagtacacgggaccggatattttaagaattttcaaaattttatgctttacgtgcaggaaaatgacctgacggtggacggagccatgacggacccgaaaggtgaccggtcccttcctcctcatgcccaggaagacccggatttatttttacgtgtagtggtgagacggccggacggaattgtagtaagaggcgccaaggtccatcagaccggagcagtcaactcccatgagattctcgtaatgcccacgattgcgttagggccggaggatcaggattatgctgtctcctttgcagtgccaagcgatgagaaaggcatcttcatggtggtgggccgccagagctgtgatacaagaaaaacagagaatgcgccaatggatgtgggcaaccagaagttcggcggaatggaggcattgatcgtatttgacaatgtatttattccgaatgagcgtattttcttaaacggagagacggatttctcaggaatgatggtggaaagatttgctggatatcacaggcagagttacggcggatgcaaagtaggggtgggcgacgtgctgatcggagcggcagctctggccgcagactataacagcattcccaaggcttcccatatcaaggataagctgatcgagatgactcatttaaatgaaactctgtactgctgcggcattgcctgttccagtgagggagttcccacgaaatctgggaattatatgatcgaccttcttttggcaaatgtatgcaaacagaatgtgaccagattcccttatgagatcacccggctggcagaggacattgcaggaggacttatggtgacggctccttcccaggcagatataagaaatcctgagcttaagccttatattgaaaaatatctgaaaggaaataaaaatgtgcccacagagaaccggttaaagatcttacggctgcttgaaaatctaacccttgggactgccgcggtgggataccgcacagaatccctgcacggagccggatcgccgcaggctcagaggatcatgatcgcaagacagggaaatcttttagagaaaaaggaactggcaaaacagattgcaggcatatcagaagaataaaggcgggataagttatggagctgtcagaaaaaatagagaaaatactggagcaaaacgtaagaccaaggctaagggaacatggaggggatatccgcgtatcagagctgaaagatggtatcctcacagtggagttttcaggggcctgcagcggatgcccgtctgggcgtattaccctggaggaactggtaaaaacagcgatacagggagaatgtccggagataaaggatgtcagaactgaacagactgtcagcggcgaactgatccggcaggctaaagatctgatgggcagaaacaaaaaaaggtcatggaaagaattatacagagaaaaggtggtcagtgcggatgaggccgtatcccatatcaagccaggccatagggtggtactttcccatgcagccggagaatccctggtactttccgatgctctggtaagaaacaaagatctctatgagaatgtagagatcgtccatatggtggctatgggggaggccagatattgtgaaccggggatggaacagcatttcaggcacaacagtttctttctcggagcttccacaagaaaggcagcccgtgagggaagagcagatgtgacccctgtctatttttcagaaataccggagcttttcagaacatctcttcctgtgaatgtggcgctgttaaatctgtcgcctccagatgaacacggctatttaagttttggaatttcggtcgactactctaagcctgcggccatggcggcggatctggtgatcgcacagatcaacccttccatgccaaggactctgggtgatagttttatccatgtgaaagatattgattatattgtggaggcggatacgcccctgatcgagcttccgcccgcaaaggtaacggagaccgaaagggcaatagggaaaaattgcgcatctttgatcgaggatggtgacaccctgcagctgggcatcggagcgatcccagatgcagtactcggctttttgatggacaaaaaggatctgggaatacactcagaaatgatctcggatggtgttgtggacttggcagaagcaggggtcataaccaataggagaaaaaatctgcatcctggaaagagtatcgtgacgtttctcatgggaacaaagaaactgtatgactatgtggacgataatccggaggtagaacttcatccggtggactatgtcaacgatccttatgtgatcgcaaaaaatgatcatctggtatcaattaattcctgtgtgcaggtggatttgatgggacaggttgtgtccgcatccgttggcaggaatcagatcagcggagtaggcggacaggtagattttgttcggggcgccaatatgagccgagggggaaaaagtatcatggctatgccctctacggcggcaaatgggaaaatctccaagatcgtaccggtaatcgatgagggggcatcagttacaacttccagatatgatgtggactatgtggtaacagaatatggggcagtaagattaaagggtgagaccctgagaaaccgggcgaaaaaactgatcgggatcgcacatccagactttcgtcagatgctggaagaagaatataaaaagagatttcatagatgccggaatatgaatgaatcatagtgataaaagagatgacggcctttatccagacatacccgggtaaaggtcgtttttaaatgtttatttatgcccatggggcatcccgtaattcgtacgcttcgggcaggcgtgctgcgaacagcaaaggatagcacactgcttatgattaatgaatggacattccggcaggaatgaaaaaagaaaatagtttaattctcagaaaagtattctgccagctgaatgatgaactggctgtttgtcggacgttctaacatgcaggtctgtgtaatactccagaataattctttgttgcctttgctccatacggagtcaatcgcatgacggatggtccgttcaacactggtcggcgttgcatgattcttttctgcgatataaggatatagacgttttgtgatcccgtcaaaaacagatgggtcctttacacccaattcgattgcctgtctcagatagagatagccttttaaattcggagtgatgcccaattgttttaaaagtttgctgattcggcttgagagatctaaatgcgcagtagaagatgccgcctgatttaagagctggttgatgtgaataacatgtgaggtgctgtcaggtacggatgtatggttttttgagtgtattacagaaatttgtaaaatagtatcgtctgacagtaccaattgaagattttcgttttgcatgatatactcccctcataaagataaatttactccttagattatgtaatcatgttcattatagaaaataaagaggaatattgtcaacttgtcgaggggtgaatttattccatatttggaaggtggaacgaatgaattataaaaaacttaaggaaattatgcaaacaaaaaagtttacagtggaagatttgtcaaaaagcagcaggatccccatcggcactttatcaaaaattgtatgcgggatcactccgaatccaagatttaacacgatggaagaagtggcagcttccctaaattgttctctggatgagttctcaaatcgggagcccatgatcccatatgattatgaaaactacatccgtaagtttaaacgtctgccggcgcaccagaaagaatatatcaaatatgtgattaatttagagtatgacagaatggtatccttaaaatcttctggaaaaaaatcaatgaagtgttttgagtttaccagtgtggaggacggcttggctgactatggaagccagaaggtgcatgatgtatgggtggaacagaatcctattacaaaggaatgtacctttttcgtctgggtgcgcaccaatatgctggaaccgaagttttgcagaaactctattctaggattccagtacatggacgggcgctttccaaaacatggagagatatggatgttcctaaggtcaggatatttgtatataggccgttattttaagagacacggtgttccgctgctcaggtcactgaacggaacgatagacgatgaggagatcacaagcgtgatggattataaaagagtcggaaggttcgtggggaccgtagatatccccgagttgacatcgatagtttaaaagatggaattctgtcaatactccaagtatataacttacgttggaaagggtgtggcagaacaaatgaagctggaagaaaaagcaatccttcattttttggacaggtttgaccagactccgtttcttgtcaaaataaaagaagaggagtattcgattggggacggggagccaagattctcgattatcttcaaaaaggaaccggatttaaaggaaatgatgacaagtacatccctggcattgggtgaggcctatatgcggggtgatctggagattgatggggatttgtaccaggcattgtattattttctcggacagatgggcaacttctcggtggatacaagagtgctgagaaaactgatgtttccttcactgggaagaagaaaacagaaagaggatgtctcctcccactatgatctgggaaatgatttttacagtctttggctggatgagactttaaactattcctgtgggttctttgagtctgagagtgatacactttacgaagcacagaagcataagacagagagaatccttgccaagcttaatttgaaagaagggatggagcttctggacattggatgtggttggggttaccttttgatcgaggctgccaaaaaatataagatccgcggaaccggcatcactctgagcagggagcagcagcaggggtttcaaaagcggattgagcaggaaggtctgacagattatctgcaggttgagttgatggactacagggatctgccgggatataaaaagaagtttgacagggtggtcagtgtgggaatgctggagcatgtgggaagggatcattatgagctttttttccaatgcatcaagagggcgatgaagccaggaggagtttttcttctgcactttatcagcgccctggaggaacatccgggagatccatggatgaagaaatatattttcccaggaggtgtcattccaagtctccgtgagattgtggaccttggctctaaataccgtttttatctactggacgcagaaagcctgagaaggcattacaacagaactctgctgtgctgggataagaattttaatgaacacagggcggagattgaagagaaatttggtgaaacatttgcaaggatgtgggatttgtatctgtgtgcatgtgcatctacatttcagaatggaatcattgatctgcatcagctcctgtttacgaacggaattaataatgatctgcctatgacgagatggtattgatcgggggaccttgtcttccatagaaaaaagtccaggacaatgattgccctggactttgttaatatccaatcacattgatgattttctggttaatccgtcccaactcatcgctgacctgatagttttctgtatcaaacaggtatttatgtacctgaacagcattttccttcagtgtggtaggaaatccataccagacaccaagatatttgtattccttctggtcaaacggaaatcccttctggcttttaatatcatagcgaaagattgaaagcagcatggaaaatagttctttctgatccatattggtcttgatctgcggcagaatcttatccatggcacccatcaagccaaaaggattctttttccctttggcaaagattttctgaagaacctctctctggcgtccggcgcgggccagatcaccgcctgctgtgtagcgaatccttgaataagccaccgcctggtttccatctaatgtctgaagaccggcagtcttgatcttgggtgaatctccaccgtttaatcgattcatatcgccgatgtagctgtttagatttttaaggattgaagagtccacctttacttctataccgccgatggcatccacgatatctgccaggatcttaaagtttacggtcgcatattgtttgatatttaagtccaggtttctgttgatggtgctgacagccaattctgggccgcccagggaatatgctgcgttgatttttgtgtagtggccgtttacgctgacataggtatcccggtagatggacagcattttaatgtcctttgtgctgttgttgatgctgactacaataatagagtccgaacggttcccacggtctgacatacttccggtctgggagtctatgccaaacagggcgatgttggtgtaatccttcatattggcgtcttcgtggactgtgaccagcttgctttgattcatgggtgttgacttgattttgccaagctttgagtaagataaccctaaaatgactccaatcaagataacgatcagcagcaacagtatgaaaatccaccggatatgggaatgccggcgtttggtagcttttacgctcatataaacctcctagtaagcgttcttattaataaatcctttgaaaactgtcagaaacagtattttaaaatccagagataatttccagttttcaatataatacagatcgtgttcgattctgccgcggatggatgtatcaccgcggaagccgttgacctgtgcccatccggtaatgcctgggcgcacctgatgtttgatcatatagcggggaatctcttctttaaacttttctacgaacagaggacgttccggacgcggccccacaagactcatatctccccggagtacattataaaactgtggaagttcgtccagacttgtgtggcgtataaattttccgaagggagtgactcttggatcgttgggttttgtccactgggttgcttccttttttggatcctggacccccatggaacggaacttgtacatcttaaatggtttgtttccgagaccaactctttcctgggcaaataatacagggcctggagagctgcgtttcaccaaaagcgcgatgaccagcatgacaggggataatataaccagcgcgcaggcagatccgatgatgtcaatggtgcgcttgacaacccggtttacaatgttggtcagagggacattccggatattgatgaccggaagcccgtccagatcctcggtgtatgggtttgtggaaataaagttataatagtccggcacgaacttcgtatggacacctgatttctcacagatggcaaccaacttttccagcttctcgtattcgtccagattcagtgtgatagcgacttcgtccaacggggtctgtcccagataattttccaattcatttaaaagtccgatcttttttatacctctgtattcaaagttatcgctgatggtatcgtcaaaaatgccgtggatataaaggccccagtggggattggctttgatacggtcaatataggcggcagcagatgtgctgaagccgaccaggaccacatgttttaaattccggccgttttcccttgtgctgtttaatactttccttatagtataacgggagatgacgccgactacaaagttcatggaaaagaacaaaagcagaaggctccgggggaagttttgaagtctggtcaggacaatggcaacggatccgataccgagaccaatcaggtttgctttaaacagattgatgatctcacggcttccgcgctgatacctcttgggagtataaaggccgaagaaggcatataataaaagaaggataatgattgaaataaaaaccgtcttctggtaataagaaaatcttaactcatattttccaacaaagaaaaatagtttagaaatccacgattcttttccccattcaaatcggatcttatgtgataaaaaagccgatagataaatacagactgcatcaatgacgatatgcaggcggtttaaataggcttgattttgcttaatcatttgttttctcctctatacaatatattgcaccatacttatgaacttattataagtgaaaaaggacaaaggcacaatgggattatttcttatgtttttcttagttttataacatttaaaacacagtttttacacatttattttgtactatttaagcaagataaatacgaaaggagatataggttatgtacgaagatatgaattttaataatacgggatatacagaaccagatcaaaatcaaaataaaggaactgcaaaaaagacaggaaagaggatcgcaaagatcgcagcggcagcggtggccttcggactgattgccggggtaaccatgcaaggagtacagtatggattttcagcagcaggcataggaaacggaggaacccagcttgcaacgaccaatacgacaaaaacatcttcaaaaggaaccacatccggaaacgaagatttgtcaaccgtagcatccaacgttatgccttccatcgtctctatcacaagcaaatataccacaagctccggaaatttcttcggacagcagcagaataacgaaagtgagggagccggttccggcatcatcgtcggaaagaaggacggataccttttagttgtcaccaataaccatgtcatcgctgacgcacagtctatttctgtaggatttacagacggtaccagtgcttccggaacaatcaagggaactgacagcgacgcagacttggcagtggttgcggtcaaactaaaggatatcaagtctgctacaatgaaaaagatcaaggtcatcacattgggagattctgataatttgaaagtaggagagcaggccatcgccatcggaaatgcactcggatacggacagtctgtgaccggaggatatatcagtgccctgaacagggaagtacagctcacagataaaaccatgactcttcttcagacagatgccgccatcaatccgggaaacagcggaggtgctctgttaaacagtaagggagaacttgtaggaatcaacaccgtcaaatattcctcagaggatgtagagggaatgggatatgcgattccgatcaatacggcaaaaccaatcattgacaggttgatcaaacagaaaaccgtatccaaatccgagcaggcctatttaggaatctcagggcagaccatctcaagcgatatggctgcacagatggatatgcctcagggtgcactggtacgccaggttgttcaaaattcaccggcgcagaaggcaggtatcagcgcaggggatgtgatcgtaagcttcgatggatccacagtgtctacaatggaaggattaaagagcaagatcgagggcaaaaaagccggcgatacagtaaaagttgtcgtgaaacgccagaaccagatgggcacctatgaaaagaaaaccataagcgtcaagctggagaaaaaaacagatgacagttcttctagcagcacgcagaataactaattggaaacagttgaattcttaaatgatacaagttacaataaaacgggcggcaaaggccgctcgtttttaacgtatggaattaaggagccgatatgatttcaattgagatagaacaagtaaagacctttatggcaggacttttgaccggggcgatgtgtgatgattttatgctgtatgaagggaaactttccatggagatcacttacgaatttgatggaaaaatgcagaaagatttttacgatacggatgaatgggaaatactgaaagagtatccttatatcccgtggaagatggaaaagcaaaagatatttgcactgatcaaaggaaaaaagacacctctgtcttttcaatttgtgctgatgctcgatccgaaacgaatggcaggcttcctttctaaatataatatacctgagagatcagaaaacattggaggattatttttaaacatatattttgaccgggaaagcctaaaatgtacgaccggagtttcaagaaaaacatttgtgctggataaaaccctggaattagcgtgggacgaagaaatgaaaatgtttttaaaagggaagtaggaggagtgaacctatgaaattattgaaagagatatgccgggggattttgatcggggtagccaatatcataccgggagtcagcggaggaacgctggcagtttctatggggatttatgacaaaatcatatacgcactgacacatatacgcaaggaatttaagcagagtcttaagatacttgtgccagtaggaattggggctgtcatcggacttgtgggcctttcctttgtgatcaaatggctgtttgaatattatccgatccagactaattttttgtttataggactgatcatcgggggactgccggcgatttttaagagaatggaaggtgaaaaaaagggactctcacatgggattgcttttctccttatgtttgcactggtggtcctgctcccgcttttgggcagccagacagcgtcagatgtgatattgactgcagatccggtcatgatgggaaagatgttcctgatcggtattattgccgcggccaccatggtcgtacctggagtcagcggatctatggtgctgttagttttgggattttaccagccgattcttcaagagatcacacagtttatggtaaatgtggctacgctgaatctatccggcttgacacacggcattctcttgctgacaccgatggcattgggtattgcagcgggagtcgtgatcatcgcaaagatcattgaatatctttttgaacattttgaagcagtcacatttgccggtatcggcggtctgatccttggatcccccatcgccatactctatgaggccaattttgaccattttaatctgttctcgggagtgacgggactgatcgcattggcggcaggatgtatctgtgcttattacctgggcgaggattaaagggttttcatttatagaaatatatgatatgatatgtagtaatgaatactatatcggaaagttttaaaaaggagacgccatatgagttttaatattgtctgtgacagctgcacggatttaacaaaagaagattttgagaaaggatgttatacctggatcccgttgacattgctgatcggcgatgaggagatcgttgacgatgatacttttgaccagcgttcttttttagacaaagtggcgaacagcaaaggcgcctgtaaatctgcatgtccggcgcctgaagcttatatggaagcatataaaaaggcagatgatatatatgttgtgacattgtcagcagaactgagcggatcttacaacagcgcggagcttggcaagaagttatacaaggaagaactgggagacaagaacatctatgtgtttaattccaggggagcttcaagcacacagcttttgattgccagaaagatctatgagtatgcgtccacaggtatgccgtttgagcaggtcgtggaacatgtggaggattatattaaggggcagagaaccttttttgtattagaaaccttggatgtcctgcagagaaacgggcggctgtccaaagtcaacgcagtgcttgccacagccctgaacatcaaaccagtgatggaagggacaaaggaaggtgtcatccagaaactggcacaggccagagggaccaaaaaggcgttggcaaagatgacagaatgcatcgtaaaagaaggacaggatcttacggagagggtccttgccatcgctcactgcaattgctacgaaagagctgtttatctcaagaatatgttggaagagaaggtaaacgtgaaggatatcgtcatagtagataccaagggagtcagcagcctgtacgcatgtgacggcggcgtagtggtagcttattagacaacataagaagaaagaaacagggagacggtaagaaaccgtttccctgttttagattgtaaaatcttttgttatgaattcctggatttgatttataaggagactggtatggtagccgtccgccgccgcatgggagatcgtgatggtcagcggcattttgtaacggccggcagttccctggtatttaccgtatgtgatgataggaaatagattgggactggcatctgcggacatggtgctgagtccggtataagaaagccaggggacacacgagatacagaaaaagttctgaggctgtccgggtttgccttttatgcctttatgatccctatacgttttcatatcatccgtcatagcatggtagaaggatagaaaatcatccgagtaatacgtccacagatcagaaaaagtatggtcatcattatggaagacagtgtaggaagggtgcacagtgtcccagataccgggcagcccttcttttgaaagtcccatcttaaattcgtttaagctgttgacggccgatgaaacacagtagacaaagcttggataaaatttaagacttttttgccggatcagtttcagaaaatcagtcacatccaactcagctgtcaggctgtagccgcacttgatcatctcagtgtaatattgaaaatgttccctgcgttcccacgtatctaaatcaatcagatgaaacataaattacctccattttttctttcttatctctattatagagcaaatgaaaaaaagtgcaaaaaaaagattgttaaaaatatatacaacttattttgtaaagcctaaatttattttgcgcgtaaacaccgcatttagcagcggaaacagggtaaaaagtagaacaataaaggcataagaaccgcggttttatgcggtttttcgttattatattaacggtgtttttagacaaaatctattgtttgtacaggagttattgtatataattagatacaatatcaaaaagaaagggtgatggaatgagtcgcttagaaattgtgacgccggaccgggcgcagattgtgatggaagggctttataaggatctggagagaaggatggaatccagtcctccgggtatctgtccggtcgatatgtccagggcatttttggaactgtgccatgcacagacatgcggaaaatgtgtgccgtgcaggattgggctcggacagttaaagaatctgatcaacgatgtattggacgggagggccaccatagagaccctgggactgatccgggatacagcgcagtcaatcatggattctgcggactgtgccatcggttacgaggcagccaatatggtctataagggagtgatcggtttcagggatgattatctggaacacatcatgtacaatcgatgtctcatgtccctgaagctaccagtgccttgcgtatccctatgtccagcacgggttgatataccgggatacatagctttggtcagggaggagaggtatgcagacgctgtgcgcctgatacgcaaagacaatcctctgcctactacatgcggatttatatgtgagcatccgtgtgaagccaaatgccgtaggaatatgatcgatgattctgtaaatatccgcggactgaaacgggttgccgctgactttgcgggcaaggtcccgcctcctccgtgtggtgagccaacgggcaaaaaggttgccatcgtaggaggcggaccgggaggcttaagtgccgcttattatttacggctgatgggccatgatgtcacaatttttgaaatgctgccgaaactgggcggtatgctccgatatggtattccaaactaccgccttccaaaggaacgtctggatgaagacatcgaggcgatccttgcaacgggagtcaaggtgcagtacgggacagtgatcggaaaaaactgttctgtcagccagttgagggagcagcatgatgcagtgctgatctccatcggtgccagtacagacaaaaagctggggcttgagggagaagatgctgagggtgtgatctcagcggtacagttcctacgggatgtaggacacggcaggtgtgagtgccttaacggacaggaggttgcggtaatcggcggaggcaatgtctcaatggatgccgtccgcacagctgtccgtctgggagcaaagaaggtaagcattgtttaccggaggagagttgccgatatgaccgctctggctgaagagatcgagggtgccatagctgagggcgtggaagtgaagactttaatggcaccgtccaggattgagaccggggaagacggaaagatcaaaggcatctgggtcactccgcagatgatcagcaagatacagaacggaagagccagtgtgcgtccaaccggggaggaggatgtatttattccgtgtgaaactctggtggtagccatcggccaggatatcctgtatgaacattttgaagaaaatggagttccggtgcagagaggaaagatcaagacagaaaagtacggcggatttgacgagataccaggcgtatttgccggaggggattgtgcaacaggaccgtccactgttatttctgccatcgccgcaggtaaggtgatcgccgcgaacattgacgagtatcttggcttccgccacgagatcacctgtgatgtggagattccggagccgcgtctggatgaccgccctccttgcggaagggtcaacatgacagagagagaggcaggagaacgtgtcaatgactttgaaggcgtagaaaattgtatgtccaaggcagaggcccatcaggaatccggccggtgcctgcgctgtgaccactttggattcggcgtatttaaaggggggagggatattaaatggtaacactgacaattgaccgtatggaagtaacggtgccggaaggcacgacgatcatggaggcggcggcttctgttcatatcgatatcccaagactctgttatttaaaggggatcaacgagatcagcgcctgccgtgtctgtgtggtagagatggagggcaaggacaaattgatcacctcctgcaacaatgtagtggaagagggcatggtcatctatacgaacagccccaaggtaaggttaaaccgcagaaagacggtgtctatgctgctgtcacagcatgacggacagtgcgttaactgcagcagaagtatgaactgcagtctgcagaccatagcaaatgatcttaatattttggaaaatccgtttaaacaggaactggtgcataaagaatgggataaaacatttcctctgatcagggatgccaacaagtgcattaaatgtatgcgctgcgtacagatctgtgataaggttcagggactaaatgtctgggatgtatccgggaccggagcgaggaccaatgtggatgtatccagaaaccgggatatccgcgtggcggattgttctttatgcgggcaatgtatcacccactgtccggtgggggcattgagagagcgggatgacacatccatgctgttccaagcgctggaagatgaagacaagatcgtggttgcccagatcgcgccggctgtccgggctgcttgggcggaacagctgggtctgtccagagaagaagccccggtagaaaagatcgtgacagccttcaggcggatgggaatcgactatgtatttgatacaacattttctgctgacctgacgatcatggaagaaggaagtgagtttgtaaaacgtctgcaggacggggatttaaatgagtatccaatgtttacttcctgctgccctggatgggtgagattcataaagacccagtacccggacatggtcggcaggctttccaccgcaaaatctccacagcagatgttcggtgccgtgatgaagtcttattttgcgaagaaactccaagtggatccggagcggatcttcacactttctatcatgccttgtctggctaaaaaagcagagagggaaatggaactgttctatgaagaatacgcgggccacgatattgactgtgtgcttacgaccagagagctggacaggatgcttagggcggaacatctgaacccaagatatctggagccgggtgaatttgattctccgtttgaagtgggaacaggagccggtgtaatctttggagctaccggcggtgttatggaagctgcactgagatctgcctattaccttgtgaccggagaaaatccggatgcggatgctttccgcgaaatacgcggcgtaaaacgggagggatggacggaagcagagtttgatgttgcgggaactgtgatacatatcgcagttgtcagcggcctgggaaatactagaaagctcatggaagcaatccgaaataaagaagtgaaatatgaatttgtggaggtcatggcctgtccgggaggctgcgccggaggcgggggacagccgatccatgacggttttgaactggcagaggagagagggtccagtctctatttcctggaccagaataccgaggtccggttctcccatgacaatccggatatacagagtctttataaggagttctttgagcagccgttgtcccatagggcacatcagctgctgcacacagaacacgaagtttgagtttttcttcattgtctccagtcggctctggaaaggcctccttccaacaatgaagaaaaactctccaaagtatgaattatgaaagtgctgcgccaatgtcggaggatcgtgttttaagcaggccggagacattggcgtggcactttactctttgacagggttttcttttttcgctataatagtaacaatttacggagaatgcaagaaaaggagaaccagtatgagcaaaattgagatgacgacaccgttggttgagatggatggggatgaaatgaccaggatcctctggaagatgatcaaggatgagcttttgatcccgtatatcgacttgaagacggaatattatgatcttggactggaacacaggaacgccaccaatgaccaggtgacctttgatgcggcggaagctaccaaaaagtacggagtagctgttaaatgtgctacgattacaccaaatgctgcaagaatggatgagtatgacctcaaagaaatgtggaaaagcccaaacgggaccatccgtgccatcttagacggaactgtgttcagaactccgatcacagtaaaagggattgaaccgactgtccgcacatggaaaaaaccgatcaccatcgcaagacatgcttacggggatgtgtacaaaggtgtggagatcaaagtaccgggtgctggaaaagcagaattggtctatacagcagaagacggaacacagatcaaagagctgattcatgagtttgacggtgccggaatccttcagggaatgcacaacacagaaaagtccatccgcagttttgcaaagagctgttttacatatgcattggatacaaaacaggatttatggtttgccacgaaggacacaatttccaagaaatatgatcatacatttaaggatattttccaggaaatctacgacgcagagtacaaagaccagtttgaggcagccgggatcgagtatttctatacattgatcgatgatgcagtcgcacgtgtcatgaaatcagagggaggctatatctgggcctgcaaaaactatgatggagacgtaatgagtgacatggtgtcatccgcatttggatcactggctatgatgacctctgtcttagtatccccggacggatactatgagtatgaggcagcacacgggaccgtacagcgccattactataagcacctgaaaggggaagagacctctaccaactccgtggcgactattttcgcctggacgggagcgctgagaaaacgcggtgagatggattccaatgaagctttggccaggtttgctgacaagcttgaaaaagccaccatcgataccatcgaggaaggtacaatgacaaaggatcttgcactgatcactacattggaaaatgtcaatgtggtcaacagccagaactttatcaaagccatcgctgaaaagctttcataacttatagactgatcaaagccctgaaagagatttcggggcttttttcttttgagacagcaaaaaatatcaagcctgcttcactgttccagattataatcattttatcaacgaaaggaacggtagatactctcatacaaacgtatcagtatatctggggtgcctggtttcaaaaaagtggataggggcttgcaaactgaaatttatttcccgatcactgataagaatgtaaaaaaagtaaaataatggttgaaactaaaagaaaattgtattataatgtaaatcaaggatgaggaatcattctcacacaatcttgtacgaatatatcattcatctcttttcaaatataaactactaagacctacgcagaatcaggcgtacgaatctcattccaaccgaatctatatctatttcaaatacttccaatcattgaagtgagagtggtttccatccttaaatttaataaaaaatacttgacagaatttggtttcctggaatataatgataaaaaattacgaaatcctttgagcaaaagtaagtagcttgacaaacggtattacagagagcggccggtcggtgtaaggcagcatacacgtgtcatgtgaatgggtttgtgaggagcgcagagaacacattttgtcagtatctgccgccgtgatcccgcgttatgggaacggagtataaaagcataagcggagtactctaagaggagagtctatgatttcggaaggactcttgaatttgggtggcaccacggtctatcgtcccttgtagagggatgataggcctttttttgttttcataggagagttctcttaacttctctatgtaaacaaaatgcgtaaggaaattatttgcccctggagcgaagtgaacagcgaagaagataggaggattatatgttaagtccaacattagaacaggtaaagaatttattgacaatttatccgacagtgccggtattttatgaggttttgggtgaccatgtgacgccgatccaggtgtttatggcgctgagaaaatcagggactccatcttttatgctggagagtgtggagaacagagaccagtgggggagatattcttttatcggagtaaatcccaagaaagagattaagatcaatggcacagagatagagcttgacggaaagaagcagacggtggaaaaccacattgcctatttaatagacatggttaatgcataccagtcaccggtgctggtagataaaccaaagcttacaggcgggtttatcggatattttggctatgacaccatccggtttgtggaaaagaagctgaccaatgtaccggaggatgatttgcatatgccggaatgccatttgtgcatgtacgatgagatcgttgcttttgaccatcttacaaaccgggtgatcgtcattcaaaatgtccatgaagacgatgatctggaaacaaaatatgcaagtctggagccgaaggcaaaacagatgatcgaacagatcgacaacttccgcatggtcagaaaagaacatacagcaaaaagtgagaccagggtcctatcaaatctaaccaaggaagagtatatgtcaaatgtggagaaggctaaggaatacattaaagacggagacatcttccaggtagtcctgtcacagaggtttgaggttgagagtgaggctgatccatttgacgtataccggtgtttaaggacaacaaatccttccccgtatttatacttctttgattttgtagactaccagatcgcaggggcctctccggagatgctggtgagcgtcacaaacggaatcgtgacaacaaaacctatcgcgggcacagtgccgagaggaactacaaagaaggaagatgacatattcgtcagacagcttatgcacgatccgaaggaacaggcagaacataccatgcttgtggatcttggaagaaacgatgtgggaaaagtgtgccggtttggcacggtccgtgtggataactttatgtcggtagagaaatattcaaaagtaacccatctggtaagcgatgtgcagggggagcttagagaagataagacagctctggatgccctcatgagcatactgcctgcgggaacattatccggggcaccgaaggtcagagccatggagatcattgatgagctggaaaataaaaagcgggggctttacggaggaaccgtcgggtatctggcatttgacggcaacatcgatacctgtatcgccatccgcacggttttattcaaagacggaaaaggatacgtgcaggccggggccggtatcgtcgcggattctgaaccggaaaaggaatataaagagactgaaaacaaggctcttgcagtcatcaatgcgattaaggaggcggccaaattatgattttattaatagataactacgattcttttacttataacgtctatcagggaatcggtgaattatacgaaaatattgaagtcgtaagaaacgacgagatcacagtggaagagatgaaaaagaaagatatagaggcattggttatctctccggggccgggatatccggatacggcgggaatttccaaggaggctgtccgttactttgcaggcaggattccaatcctcggcatctgccttgggcatcaggccataggggaagtgtttggggcaaagacggttcatgcacagcagctgatgcacggaaaacagagtaaaataacagttgacagtagtgtgtctctctttcatggacttccagaaacgcttccagtggccagataccattccctgatcgtagacagggagggaatgccggatgaactcttaattgtgggcaccgacgatgaagggcaggtcatggcagtaaagcataaagactatgatgtttacggcatacagttccatccagaatccattttgaccgagtccgggaagaccatttttgaaaactttttaaagcttgctggaatcgaaatcaagacagaaaagaaggaggaagagatggaggcagctaagaagatcgtcatgaaaccatacctggaaaagatcgtagaggggaaacatctgacagcggacgaagcgtatgaggccatggactgtatcatgtccggaggagcgacccaggcacagatcgcaagctttgtcacagggcttaggatgaaccacgagacggtggacgaaatcactggatttgcaaaagtcatgcgggcaaaagcggcagttgtaaaaggcgagacggaggccattgatatcgtgggaaccggcggggatctggcaagcagtttcaacatctccacaacgtctgcatttgtgatcgcaggggcagggcagaaagtggcaaagcacggcaaccgcagtgtgtcttctaaaagcggggcagcggatgtgctggaggcattgggggctaagattggactttcaccggagcaaaaccagaaatgcctggaggagatcggagtagcgttcctgtttgcgcagacacatcacggatctatgaaatatgccggtccagtgagagcccagctgggggtccggtcggtatttaatattttagggccgctggcaaacccggccatgacaaattatatcgtacttggggtttacgaggaggatcttttaagaccgatggcggaagttatgcagaatctgggcgttaagcaggcgatgattgtatatggggatgactgtctggatgagatctccatctctgatactaccagcatctgcgagatccgggatggaaagttgatctcatataagatcagtccggaagaattcggcatggctatggcaccaaaggattccatcaagggcggaacatcagatgaaaacgcagtgatcacccgggagatccttactgggaaagaacaggggccaaagcgggatattgtccttatgaatgcaggcagcgcactctatactataggggctgcaaaggatatgcaggaaggaattgaaatagcaaggaagtccatcgattccggaaaagccctggaaaaactcaaccagtttattgaatttaccaaccgctattaggagagagaaccaatgatattagatgagatcgtagaaaaaagaaaagaacagcttcagagagaaaaagaaaaattccctttggaggagatcagggagatggctctgaattccaaaagaattccactggattttaagtcggcgcttcaggctgacgggatctccatcatttcggaggtaaaaaaggcatcaccgtccaagggaatcatctcagaggattttcatcccacagatcaggcgaaagcctacgaaaaagccggggccaatgccatttcctgtctcacggaggaacattattttaaaggggcggccaaatatctggcagatatcagggccagtgtaagcctgccaatcctgaggaaggattttatcattgatgagtatcagatctacgaggcaaaggttttgggagccgacgcggtccttctgattgcggccatcctggaggaaggggagattcttaaattctatcagctggcaaaatcccttggactttattgtcttaccgaagtacacaatgaggaagagctacagaaggtcacacgctgcaaatgcgatatcatcgggatcaacaaccgggatctgaagacctttgaggtagacttgaacacaacaaagaatctggccacaaaggttccctatgaggcggttcttgtatctgagagcggtatgaaggacggatcagatataaaaaccgtgaaggaatatggggccgatgcggtgctcatcggggaaaccctgatgcgttcaggaaatataaaaaagacgattgaggaattaaggggaagcctatgaaaatcaaaatgtgcgggcttcgaagaccggaggatatcatctatgcaaatgagtgtattccggactatatcggctttgtttttgccgagagcaaaagaaaagtcagtgcccaaaaagcacaggagctggggaagcagttagacccctccattaagaaggtgggcgtctttgtaaatgaagcagcagagaatttgatctctgaagcctggcagtcgggcattgatatcattcagctgcacggggacgaagacagagagtacatcgaaaaagtgaaatggcagacaggaaaagagatctggaaagccgtccgtgtgaggacggcagaggacatccaaaaagccatggagcttccggcagataagcttctgctggacagcttttcagaagattcctatgggggcaccggaaaggtcatggactttgacgttctccggcaggcagacatccataagccttactttatagcaggtggtctgactatagatattcttcctgggattttagaggatacagagccatacggaattgacatttccagcgggattgaaaccgggggagtcaaagacagagataaaatgatacgggtaatccagtttgtaagaggaggaaacaatgagtaaaatcggaagattcggcgatttcggagggcagtatgtgccggagatcgtgatgaatgcagtgaatgagttaaatgaagcttatgaaacctataaaaatgatcctgactttttagaggaactccacaagtattacagagattatgcaaacaggccgtccatgctgtatgaggctaagcatatgacgaaggatttaggaggcgccaaagtctttttaaaacgggaggatttaaaccacaccggagcccataagatcaacaatgtcctgggtcagatcctgctggcaaaacgtatgggaaagaaacggatcatcgcagagacaggggcaggacagcacggagtggcaacagcaacagttgcggcgctgtttgacatggaatgtgtggtttacatgggggcggaggacgtggaacgccagagcctgaacgcgtaccgcatggagcttttgggagcaaaggtggttgccgttaagagcgggacacagacattaaaggacgccatcaacgaagccatgagagactgggctacgaatattgagacaactttttattgtatcggatcggttatggggcctcatccttacccgaccatggtcagggatttccagaagatcatcagcgaggagacaaaaaaacagatgcgggaaaaggaaggaaagcttccggactgtgtcatcgcctgtgttggcggaggaagcaatgccatgggggcattctatgactttgtaaaggatgaggatgtccgcctggtcggcgccgaggcagcgggaagaggagtccatacgatagagcacgccgctaccatcgccagaggaagcaaaggaattttccacggaatgaaaagtctgtttctgcaaaatgaggaaggtcaaattgacgaggtttactccatttccgcagggcttgactatcccggaatcgggccggagcatgcccacctgcatgacattggccgggctgagtatgtgagcattacagatgaacaggcggtatgcgcatttgagtatttgacaaagatggaagggatcatccctgcgattgaatctgcccatgcagtggcagcggccatggagattgttcctaaaatggaaaaggatcaaagtgttgtcatctgtctgtcaggacggggagataaggatgtattccaggtagccagatatagaggagtgaaattagatgagaattagaaaagcgtttgaaaagaggggaaaaaatggccagaaggcattgatcacctatattgtatccggagattatggatatgagaccactaagaaaaacattatgagcatggtaaatgcaggcgcggacatcattgagatcggaatcccgttttccgatcctatcgcagagggcattgtcatccaggaagccagccagcattcccttaatgggggaaccaccctggcaggaatttttgagatggtaaaggagcttcggaaggagacagacaccccgtttgtgatgatgatgtatctgaataccatctaccggtttggtacggaacggttttttgatctatgcaatgaatgcggcattgacggtgtcattgtgccggatatgccgtatgaagaaaaagaagaaatccagggaacggcagcagcgcacggggtagacaatatcagcctggtgaccccggcatcccacgaccggatcgaagccatcgccaaagatgcggaagggttcttatactgtgtctcatctatcggggtcactggtacaaggaacgaatttaccacagactttgacgcattctttgatgtgattaaacaaaatgctaagattccatgtgcggtgggattcgggatctcaggaccaaaacaggcgaaaaagatgagccagtactgcgacggcgtcattgtgggcagcgccatcgtaaagatcatcagccaatatggggaagacagccccgaaaaggtatatgaattcaccaaaagcctccgggatgcattggatgagtaaacaatctgttgtacaatttgtacaataagggatggaagattattgatgaattgtaataaaataaagctttttcgccaaaagccttatgaaaactaagagaatgtggtaaaataaaagaaaatatgcggaaaaacagtgagagaggccggaatttattccggccttgttctttcggattatcttgttgccgatcatgaatagaaaggaggcagacagctgtggagattgaagagcagattacagaactgataaggacagccagacagaatcataatgtcattgatttgaatgaggttgataaggtatttgacaaaaacctgagtgaacaggagtttgattatattattagccggctgaaggaccaaagcatagagttctcggatttcacagcaaaagatgatgacaggcagcatacggaagaatctgtagagacagatcaagatattctggaggattctgtaaagacttatctgcgcaggataggttccattcctctactgtccagggagcaggaggagaagctggcaaaggagatcgaggcgggcagccagactgcgaaagacaaaatgatcaactcgaatctgcggctggtggtcagcgtggccaaacggtatgtggctggcagcaatatggctctactggatctaatccaggagggaaatatcggtcttatgaaagcagtggacaagtttgattaccggagaggattcaaattcagcacttatgctatgtggtggatccgccagtccattacgcgcgccatcgcagaccaggcaagaacgatccgcatcccggtccatatgaaagaaaagatgggaaaggtaaacagtgctgcccggaagttcctggcggaaaatgggcgggaacccaatactgacgagctttctaaggctatgggactgaccagagaccagatggaagagatcatgagactgtacagtgatacggtatcgctggatacccctgtgggcgaggaagaggatacgatgctgatcaattttgtggcagatgagagtatgccggaacagtttgagtcagcaaaacatgagatactgtcagagcagattgaccagatcttatcagaactcacagaacgggagcagaccattttaaggctcagatttggttttgtgggagaccgtatctggaccctggaggaagtgggaaaagaatatcatgtgacaagagagcgcatccgccagatcgagggaaaggctttaagaaagctgaaaatgaagaaagaaacaaaacgtctgaaagcttatatcgaagattgaattttataggtcccaggaaggatgaaccggtggaaagaaatttcctccggttgatttttttgattttctcctatatactttgtttcaaaacatggtgcagcaaataaagggagaaggatgagagagaaaagatatgaggaactggttccctatgtggaacaggcaaaacagggagacgggcaggcttttgcctatttgtacgaggcgacgatcgaaccgactcggttttttgtatacaatttttgtaagaaccggaacaaggtcgatgaccttcttcaggaaatctatctggaggtctaccggtctctgccgtctttaaaggacagcatggctttctgtgcatggcagaggcagattacatatcactgctgcgtgaaatccattaaagaacatgaagaggcctttatcggtgacgaaaatgtagagtttatcaagagccttactgatgacagcgaaactccccaggatgtggtattggagaacgaaaagacggaactgctgcataagtgtatccagagacttccagaaaagcagagggcggctcttttgctgtactctttccagcagatgaaaatgaaggagatcggggaggcactgggctgtaaagaaaatgcggtcaaaaatctactgtttaacgccaggaagaatttaaaaaaacagattgaaatgcttcccgcggaagatcgtgaagtgctgaacatcagaagttttggattgtttacgctgtatccgattctccgtgaatcgttggcttattcttcaaaaaaaggtgcaaagcagggaatccttgccctgaaaaagcttgccatcggagcaacggttgccatcggggccggtacggcaggagtccttctttttggcggggaagaactgccggaacagtctttccgtaaaatgtccttggaagctccgcagtgggaaacgaaagaattatcagggatcaggattccgaaaaaggaagaaaagaaaaagcaggtgtatgtgcctgtgaatgttcgggatatgaaagtcagcaaaagcaaagagcagatcgcaatatatgtgtcaggggatgtggactatcaaagtacctttgcggaaacggcagggggaaaaaagctaaagccaagtaaatatgacccgaaaaagcaagtcttttatttttctatttatgtaaaggactttgcttttcacctgaaatccaaagacggaacagaagaaatatttgatttccggaagaaagcctgagaagcattaaaagctttttaggtttttttatttcataggaaagcgtcctatgaaataaaaaacgctccgcgaggatcgcactacagcggtaaggaattatgtcgccaaagtgacccgccgcagacataaaatcccgcttgcgggattcttttttgtttttctgtctaactttttcaaagcggtgcagtacctggaaagaaattgacgaaagaaacagaaagggagacaggattatgaaaagaaaatggttcgtttttttgctggcatttgtgatgtgtaccgggcagacaatgatttttgcagagtccgataccggtcaggaagaaaaagtgactggaaaagtagaatcgatagagcaaacagacttggagaatgaggcacagatagagccgcagaaactgaaaaaggaagaaattggggggggggtagaaaaaacagaaatatctgctccgcaagaaaagaaaaggaaaaagaagacagctaaagtattaaaaagagaaggacagactatgttggatgtcagtttgggaaatatcaggatcaatcagactggagcttccggagggggccttttggaggctgagacagagctgaacccaaatggatattatatcacgggcaagacgaacaaatataatgtgatggtggcaaaaggggtcaagacggacctgacatttgacagtgtcgagattcaaagtaacagtacgacacggagctgtgtgattgtctcccacgctgaggtgacgattacgttgaagggtatcaataaatgggagtgcaattatggacaaagtacaggatataatggaggagctgctctggcaaaagacggaatggatggatttcttacgctgcagtgtgagtatgcagaccaggaaggacatcaatgcgatgacagctgtggaacgctgattgccaacggaaatacggatcatgcaggagctatcggaagcacgatgagtaatgtccagaatgcaggggagtcaggattttgtaattttaagataagaggaggaaacattcaagtcagaggaggtacccacgtggcaggaattggatcggcgtgtggtgctcaacatcaggtttcctcagcatgtacaaaaaacatttatatttcaggaggaaatataaaagcaactggaaccgcctatggaccgggaatcggaggaggatatggcagtgatttagatggactgtatatcaccggaggcagggttgaggcgcgaggaggtcaatatgcaccagggattggggcaagcaatggatataattctaactataagctgaaaaatgtacagatcagcggtggagatacggttgtcattgccataggggacgcagctactaacatgccggggattggagcgtatggaggtgcaacatgtgttactaatgtaacggcagagccagacccaggatatcagggttatatccaggatggaacaagcctggacaatttcacctttatggcagggactccgttccacgacaaagttaatatccaggtaggaaagttttgcactaaggtctattttggcccattccgggatgtgaatggaatcgaggatgatacaaaagaacagatcggagccaaccatgtgatcagtaaaagcggtggagatccgtttacagaagatttactgcaccatcttacaaaagtaacaggaaagcagcaggacgggacaaactttccgccagaacagttaacgctggcagacccggaagaattgaaagccatcaatgctgcgaagataaaaggagagattggagattttccactgacctatacgactcctaacggtaccactgccacagtaacagtattcctaagaaatgatggggaggatgcggctgaatttgaaaaagaaaatgggaaggaacagatcggagccaacgattttacaaaggaaacaggaggcagcccgtttacagaggaggatcttaagaatctgggagaggtaaaaggcaaagataaagacggcaataatatttcactggataactttacggtggatcaggagcagtttaagaagatcaatgaacataaaacgcagggaaaagcaggagagtttgaactgacgtactcagacgagaagggaaatcaggtgacagtgacggtcacactggttggagaatttgacgctatcacagaagatccggacacaaaggaactgataaagggaaaaaatatcatcagcaaaacaggcggggatggctttacgaaggatcagctgaaacaattatccatggtaaaggcggtggacaaagacggagcggacattccgtcagaggacatcggttttacggacgaggaacagatcgctgcgatcaatgcggcaaagacggcggggcagattggagatttccctttgacttttcgtacaccggaaaatactgtagtcacgatcacggtatttttgagggatgagggtacagatgcagagaaagcaggaggagacggaggattttcagtgatcggagcgaaccatataacacagcccaccaaaggggacccatttacagaagaacagatcatcgaactctgtcaggccaaaggaaaagataaaaatgcagataatacaaggattttagttgatgcaaaccagtttggcgtcatcaatcaggcaaagacacaaggaaaaacaggagtctttgatctgacattttcactgcctgacgggaatcaagcatcagtcaaggtaacactcacaggaaaccatagtgtttcttttgattcagatggaggagatgctacccctgagacgcagacagtgaagggcggggaatgtgcagtgccgccacaggatcctaaaaaagaggggtatgtatttgagggctggtattatactgatgagaacggaaaagaggtaaaatgggattttaacaccccggttcacgaagatgtagctttaaaggcccggtggaaaaaagaaaccacggtcacagccacagctacaagttccgtcccaacgccaacggaaattaagaaggaaagcaacaagaagtctgtgcctgaatgggaatacagtaaacgggtgcggagagtccgtgcagctaaaacaggagatgaaaaacaacttttatatctgatcctgatatttggtacggctttgaccggagtaacagcggggataaagaaaaagaaaagttaaaagaaacagccgggagcatcgcaatgcttccggctgtctttatagtataaataaatttttctaatcaccgtaccaaatttatttgaacttcggacggtcaaaggtcagtgtatttcctgttgcataggcacttctgaactggctgtacatcagttttccgatcttctgagcataccctggatcagtggcatactgatgccagatgtaggaggtgtttggattatagcggaatttatacagagtgttctgtttgtatgtactattatttatatactcctggctgacgtattttgcagcgccttttatcgctttatcaacgcttgtccatccctgataataagcataactaaagccgcagagctgtggatctgagtcatatgctttaataccgtataggttgtaaactttttttgaagatattttttttgttttatattttccttttaccttttgaaaacctgtcacgtttcctttcttatcccgcactacagaatctccagtaatgacttttgtaatagcttttccctgggagagagtactttttccatagcctgtctctaaaattgtctgacataaaaagtatacgggatcgatcttataggattttgcggcactgtttaaagcggatcctttattttttaacacactttttgaactgaccttgctgttgagaaggctgttatattttgaactgttgactgtgcggtatgtatttaggcggagatactgatatccatgtgtcgggtcggtgcttgttggaacgtaactgttatagttaattttttttccgccgtaagatttcacagtctgggctttgatataatcggaagtcttcttattataattggtcgtagtatttgatgtgtataaatagctgtaaccaggctggttgatgtggatcctttttgctgaagaaatataggagtaatctaagcctagattcttgatcgtaaaattagccggcagcagaatgttatatttctttgtcgtataatatttgacggaaacaggtgccacagataaagtttttttcttgccgtttacataacaggtctttttatttttatagaaggtaagggttttgctcttatattttaataccagttttcctgtctttttgttataactgcgttttaccttcggtccgtgcttcacaagaatgtcatagtaagggatcatgttaatactgttcatttgtatacccggagtttttgttgagattcccttttttgcataagtaaaattcagttgctttccggtataatatctggttttgcccttgtatcttatctttagggaagccgctgagatgttcgactgaggcaggcctgaaaatatggatgtgaaagcgaaaagcattgaaaatgccgcaatcgttcgtttcttcataacttatttatcctccttatgtaattaaaatgtaatatgattatagcattattttaagaaatatacaatattattgtaatattaatgtaatattcgcgggaagagataaaaaatggcacagaacgaaattctgtgccatttggctttgctttttctttaattaaatactggtgtgtcatagacaaaaccgtttgtactggagtaaacgtctttataagtgttcattaatttgccaatagattgggcgtaggctggatcagaggcatattgatggcctaggtccgccaggtaaggactgtagcggattttatacagggtgttttgtttataggaagcatgatggatataattattactgacatattttgcagctccctgaatggctttgtctacgcttgtccagccttgataataagcgtaactgaatcctcccaactgtggtgcattgtcataggctttgatgccgtataaattgtaaacttttttggatgggatatcttttacttcataataagcattatcatttattttatagtattttttcccatttttttctccagcttttttttcagctttcgttacaggcttaaaagcagttactttggtgctgtcctcacctttttttagttttggataaagcgaatcgccggtgataacctgtgtcactgcttttcctttggcaagggtacttgtaccataaccgctctcgtggatcgtctggcagaggaaatacagcgggtcaatcttatatgtactggcagaacttgtaatcacagaggctttgcctgataaaacactgccggattttttggagagcattgtctggagtgttgatgaaaacttggaagcattcaccgggtgataagtatcaagccggagaaactggaagctgtttgtattatccgtagttactggaatatattttttgtagtcgatggtctttccaccgtatgttttccattctgcctgctgtttttttatataattcgtaagagtcgtattatattttgttgttgtgttggacttgaccgtagatgaagagttattggaagctgccggttttgcataatcgatccgctttgcagagcttgaatatgtataactgatccccaggtacttggccgtaaacttggcaggaactaaaatatagtttttgttaatactgcggtatttgactgtcaacggtgcagtggtaaaggtccgttttacaccgttggtgtaagcatactttttattcttgtagaatgtaatggtcttgcttccgttggtgagcacaagttttccggtcttgctgttgtagcttctcttgactttcggtccattttttacgattgcattataatatggcagcatattgaccttgttgatctggatgccgggagcttttccgaggtctatttttttccctttatagtaaaaggatagttgttttcctgtgtatgtacgatttttgccggaatagcggagagccaggcttcccgcaaagacagaagctgtcatggagagactcagaaccgtagagacggcgagtatttttagtccttttattttcatggtattcatttcccttcctttctttaccaaagataaatctaatataacatggataggcggctgaaaacaaggattttccaggaaaagagacaggaaatactatccatagagattgacaaaaagggtgtagtttgatagtatattaacgtatgaatttagtacgctaatgtgctatcataataaggaatggaaaaacggaggagttttaggatgagagtgaaaaaattattagtgctttgcgtaagcgccgtgctggcaggttctatgcttttggcaggatgttctaagaaagaggagagcaagacagacgactcccttcagtatgtaaaagacaacaaggaattgatccttggattggatgcgtccttcccgccgatgggatttacggataaggaccagaacattgtaggcttcgacatcgacgccgcaaaagaagtcacaaagagaatgggtgtgaagctgaaattacagccgattaactgggattccaaggaccaggagttagagggcaagaccattgactgtatctggaacggacttacttacagtgaggacagggcaaaagagatgttgtgttccaagtcttatatggacaatcatcaggtactgcttgttccggtaaagagcaagattaagagcctaaaagatgtgaagaaacagcaggtgggtgtccagaagggatctaccgcggcagacgcagttgacaagacggatgaattaaagaatgcaaagattgtatacttcggcaataacgttgagatcttaaatgaccttggaaacggctgtgacgcggctgttatggatgaggtagttgcaaaatattacgcgaaaaaagatccaggaaagttcaagatcttaaacgataacttaagtaccgagaaatatgtcattggtttccgctctggcgataagaaattatgcgcagaagtagagaaacagctgaaagaaatgaaaaaagacggaaccttggctaagatcagtaaaaaatggttcggagatgatttgacaacaatcaaataaaagacaagaagcaagaggcttttttgaaagcctcttgattttttcactggcacagaaattaatttctgacttttaaaattccggaaaaatatatactataggagcaaaaaaatgtttgatggtatcatacaatggtttgaaaaattgcctggcattgcaaatatgctgttacataacggattggatcagacactgatcatctttttcctgacgctggttttcggcctaacacttggtctggtcctggcactgggaaggatgacaaagtttaagatcattcagctgccgattcgtttttatctgctgatcatgaggggaactcctctgattcttcagttatatggattctacttcgggctgaatcttttgctggggattcggatcgagcgcactatggccgcagtcgtggcattttcactaaactatgcggcatattttgcagagatctaccgaagcggtatccaggccataccgaatgggcagtatgaggcggccaaggtattgggattcggaaaggctcagaccttttttaagatcattcttccacaggtggtgaagatcatcctgccgccgatgggaagcgaatgtatgacacttgtgaaagatacttcccttgcgcatgtcatcggtgttatggagatttatgtagtggcagcaaacaacatgtcgcgcagccggggaatggaatatttgatcgtagcaggtattttttacttgattatgaatatgattgtatctaaagtctttggcatcctggaaaaacggatgagctattatcgttagaggaggaaagaaaatgagtgttttatctgtggctaatctccagaagaattttggaaagctgaatgttcttaaagatatttctttccagatcaatgacggagagatcgtgacgatcatcggatcctccggttccgggaaatcaacactgctgcggtgtatgaaccagctggagaaagtgaccaaggggaccattgagatcaatgggcatactctggtttctatgaatggggattcacctgaatatgcatccaaagaaatacaaaagaaaatattgatggagacagggtttgtatttcagaactttaatctgtttccacattacagtgtcctaagaaatgtaatggaggctcctgtgcaggtagcgggagttccgaaggatcaggcaaaggagaaagccatgcagcttctgaaaaagctcggtctggaggagaaagcggattcctatccgtgtgaactgtcgggagggcagtctcagagggtttcgattgcgagggctctggctctggagccgaagatcctgttttttgacgagccaacctcagcactggacccggaactgacaggagaggttctgaaagttataaaatctctggcggatctgaatatgaccatggtgatcgtcacccatgagatggcatttgccaaggagatttcagacagggtcatcttcatggatcaaggggtcatcgtagaagatgcgtcgccggaggatgtatttaactcagccaatgaacgtacgagggagttcctcggaaagtaccacgatattgcatagaggggcggtacggcggaggttaaaaatgtagaatcatagtaggaaaggagcaatgaagatgataaaaaatgtgccgaataaattttctgaaatcacaccggaaatagaagaactggcaaagaagtgcgaaactaaatttgacccgtctctttttgaaaagtacgatgtaaaacgaggtctgcggaaacagagcggcgaaggtgtcctggcaggattgacggatatttcaacaatcgtatcttacaaggtagaggacagagagattgttccatgcgacggaaagctgtattatcatgggattgatattgaagagattgttcagggattcataaaagaggaacggtatggatttgaagaaacagtctaccttcttttattcggagaacttcccaacggagaacaacttttggacttaaagcagctgctggcaacgtaccgtcagcttcctactaactttgtgcgggatattatcatgaaggctccgagccgtgacatgatgaataccctggccaggagtgtgctcacattgttttcttacgatgacaatgccagtgatacctctatcccaaacgtgctccggcagtctctgcagctgatcgcgctgtttcctgtgctggcggtctacggttatcaggcgtacagccactatgaaaaaggagagagtctggtcattcacccgccgcaagaggatctgtctacagcggaaaacattctgtaccttctaaggtctgacagcaaatacacaaagctggaagcaaagatcctggatctggccctggtgcttcacgcagagcacggcggaggtaacaactctacgtttacgacccatgtggtttcttcatctgggacagatacatattcttctgtggctgcggcgctgtgttcattaaaagggccgaagcacggaggcgcaaatatcaaagttgtacagatgtttgctgatattaaggcgaacgtaaagaactggaatgatgaagatgaactgagagaatatctgacgaagatggtccgcaaagaagcgtttgacaaatcgggcctgatttatgggatgggtcatgcggtttattccatctctgacccaagatcaaaggtgttaagttacttcgtggaagggctttccaaggaaaaaggaaaagaagaagaatatgctctatacaccaatgtagagaaactggccaaagaagtcattgcaaaagagcgcaagatttataaaggtgtcagtgctaatattgatttttacagcggctttatctacagtatgctggatcttccatatgaattgtacactccgctgtttgctatcgcaaggatcgcaggatggagcgcgcatagaatggaagagctggtgaacggaggaaggatcatccgcccggcatataaaggagtcgcaggacacaaagaatatacgccgatcaaagaccggtaatagtcaagaaaaaggccgcaggagaaatccggcggcccttttgttgactagaaaaattaagttattctgcggttgtgcctgtggtggcagcaggcgcttccttataggtattcaggtcagaaggaagtgttaccttaacctctttgcccgggttgttgtacttaaagtttgctgacatcttgatggaaagcttaggttcctgcttgcttgagacaaccatattgatcttttgtgcaacgatctctgagtctttattgaccgtcatggtaccggacatagagtcgaatttcacctgatctgcatagttggttgtggagcctgcagcccctgatgaattcagctgacccatcattttgtttacatagtcatttaaagctttttcattaaacttgaaggatataacgtaatttccgtctttctttgacattttcagatctttgtaattctcaacggaagtgttgaactgtccagtggagttttctaactgtttctgcatggcatccacgtccattttttgttttgttttctgaccgttggcattcatatagtagtaaccgtcggtgtaataagcctttacgcttacatcctgaccagcaatggcggtggtgatgtccatatccatcttcatatcttttgctgtcataccggtggctttcaccttcattcccatctgtagttcaaagctggaactgttgtttgaggcactgctcattttcattttgatggtgccgtccatgtcagcggaatccatcttattcatcttggctgcggcagctttcagtacttcttccggtgatttctttttacaccctcccaaggtaaaaagcattgcacaagccagagtgagtgccagaacctttttaaacattttcatagtttgccctcctgtgttctttaaattagaatacattacaatataattatatctgttattctttccaaggtaaagcaaaacgagtataatacattataataggcagaatacaaattgatcggagggcggaggtatgaaaaaagaattgtttttgaagtctgacgttgacggaaaccgtctccacgtcctgttgctggcacctgaaaaaaagccgaaagcagtcattcagatctgccacggcatgagtgaacataaggaacgctatctcagttttatggaatatttggtggactgcggttacgctgcggtgatccatgaccacagggggcacgggaaaagtatagaaagggaagatgatctgggatatttttatgacactacgggagaagccattgtagaagatgcccatcagattacaaagtgggccaaagagcaatttccggatcaggaacttcatttgttcggacacagcatgggttctttgatcgtgcgctgctatcttaagaaatatgactgggaactgacaactcttaccgtatgcggcagcccaagccggaatacctttgcaaagcctgcggcagtgatggcacagattgcctgcaggatcagcggtgaccggaaaaaggggatgctgtttcagaaattagcattcggcatgtttcaaaaatcattgcaggcagacgagtctgaaaatggctggatcagctatgaccgggagaatgtcagaaagtacgacgaggatcccctggatggctttattttcacaaacaatggatttttgaatctgtttcatctgatggatgagacatacaataaaaagggctggggaaagaaacatgtggaactgccggttctttttatcgcagggcaggatgatccctgtattgtttcacagaaacagttttggaacgcggtttcgtttttaaaggaaataggttatacaaatacgacaggaaagttatatgaaggctgcaggcatgagattttaaatgaggaatgttccggccggatttataaggaaatactagaatttatcgaataattgaaaaaaggaatacataattatgaaagcaaagaggatactgcttgcagcactttgtcttatgctggtgtcagcaggaggagagagaaccattcagggagcaatgaaaaaaccagggaagccgtcaggagttatggcgactgccgtaaagcggacggtggtcctgtcatggatcaagggcaaaaaagcgtcggggacagagatttatctgtacgaccggcagaagaaaaggtatataaaaaaggcggactccaaagcgtccagatatgtggtcaaggggttaaagcccggcgtcagctatggttttaaagtccgttcctaccggatttataaaaagaaaaagtattacagcggatattccaaagtggtgcgggcatctatggccgccaaaggagaatcaaccatcaagaattttttaaagacagcggtggctcccgtaggttccactttgtatatatggggaggcggatggaacaaggccgatacaggaactggtaaagatggaaaacgaatcgggttaaacggagagtggaaccggtttttcttatcccagaactccagatacaattacaaaaagcatcgctaccggcatgggaaagggttggattgttccggctttgttgggtggaccgtgtacaatatcagaaatacggttcccggcaaaggcggttatgtgagaaaggcaaaagaccagcctaagttgttcgcggaaaaaggatggggcagctacaaaagcaagaagaaggtggcagattataaggcaggtgacgtcatgggttcctcaagctgtggtcatgtgtggattgtcatcggtgcctgcagggatggaagtgtggtattggttcattccagtcccaagggggtgcagctttctggaagcccgacaaagaaaggcagaaaaaaaagccaggccttggcacttgcaaagaaatatatgaaaaagtatcatagaacatggtaccggagatatccggactgttccaggggcaaaagctatctcacccagtatgggcagatgagatgggatgtatcaggaaaccacgttatggaagatccggaaggataccagcacaaatatgctgatgcgattttaaaggacatttacagaaactagaatactaggaggataaatatgagaaaaacgatcgaaaggatccctctcccgctggctgggccgatgcttggatttgcagctatgggaggagtgatcgagaattattctgagacagcgaaactaatctgtgtggccatctccgtctgcctgctgatcttgttgctttttaagattggcacctgtctggatatggtaaaagaagaactggaagatccggtgaactgtagtatttccgcagctttttccatggggcttctcgtgctgactgcctatctaaagccttatgttggggattcagtttccatcatttggattcttgcgctggcggtccatgtgtatcttctggtcttttttaacggacattttatatactacaaatttaacatcaaaaatgtatatgccagcttttttattttttatgcgggcctggcaatgagcagcatgacagctcccaacagcgatatgagggagattggacgctggtttttttgggcaggattcctgtttacggtgatcatcgccgttccgatcataaagcgttatgtaaaagtaaaggagatcccggaacagtatctgccgttgatctgtatttttgcggctcctgtaagccttctgttagccggctatctccactgctttgagaatcccatggtctggcttgtgattgggctcacggtcctatcgcttgttttgtatgtgtttgtacttgcggcaggattaaagtatattgtcatgccgtttaacccttcgtttgctgcgtatacatttccatttgtgatcagcgcagccgcattgaaggaggcgtttatcacgctcaaccgttgggggtatccggtcacctatttaaaatggatcgtggatttccagacggtactggcgacggcgctgctcatctatgtgaccctgctgtttttaaaatatatcttttacgtgaaaagcgagtaaagcaggttttttagagaagaggatctggcatgaaattaaaatagaatggatctttgaaaaaggcttgcccagcatttgtttgatgagcaagcctttttcattaataacgttaatgatatcgtttttaaagattcaaaagagtatcgagaagtttatcattctcttctgatctgcggaaacagaaccgcacatattccccgtccagcccttcaaagcttgagcagtcacggatcataagtccttttttgatacaccgttcaaacatctcggatgaagttgtgccgtccataagacgcaccagcaggaagtttgcgtaggaaggatagattttgaaagcagaagagaaggacagcctgtctatgcatttttgccgttcctttgcgatatacgcctttgtctctgtaatgtagtcggtatccataaacatggcctcccctgccagtgccgccagggtattgatgctccacggattcttgcggtcctccatctctttcagaaactctgtgtttccgctgatgccatatcccagacggatgccgggggctgcgaagtacttggaagtgccccttaggatcaatacattgtcaaaatcctttgccaaaggcactgtggtgatcttctccatatccggagcgaactctacgtaggtctcatctaccagaacaaaaatatcatgttttttacagtgggagaggagttcctcggtttcgtcttggaaaagagcgctggatgtgggattgttgggattgcagaaggcaaacaggtccacatcgtctgtgagatacgacttcaggtcttcaaggtccagcttaaagtctgaggcctcggagaggtcatattcctggcaggtgccgccgaccatggagatctcccgcatatactcagaataggtgggggagagcagcagggcttttttggggcggacaaggtgcatagtaaggcttatcagctccgtgaccccattgcccacaataatgtgctctaaaggtgccttcgcataaaggctcagggcagaacgcagggacttgtaatcccggtccgggtaggtgcagacagcgtccacgtggtctatgagactttttctaaacagcggggagataccaagaggattgacattacctccgaaggggatgatttcttcttttttgattccatatatttcttctattttctctaagtcgcttccgtggaagacttgtttcttttccggcatagtttcacctttctttatcttttctattttgtcgaagtttgctataatattacggtgtagggtccgaccctgcagtcagattacaacgtttaataacaatgatcagattatagtccattatagaccaaataccctgagaccaccagtggaaaatcggaggaacccatgacggagaagatgaagcagttcatacaaatcgtacaggaagatgaacagcgggcaaaggccctctttttttctgaggccttcaaaaatgattatctggaggaaggatccagggaaaaggaaatatatcaccagctgcttctcggcagaaaccgtggccagatcttagaggaattccttatctgtgccgggggaaaggagcctgctgtactccgaccggaaaaagaggtatatgagatccgcagactgaatgccgttgagcctatgaatgtgaggatacgaaaagaagggcaaggatatgtccatggcaggatccatctggactccacctttttatccatagaaaagacagaatttacagaggaagattttcaggacgggatcttgacagtccctgtgatgttcttggacgcgcaagaagagagcaggagcattcttaccgtttatactccgtatagcagctgtcaggcagatatcctgtttgacgcagaaggagacaaggaggtagaacttgccggcctctcagacaagatttttgaagcctacatgaatttttgtctaggaaaatgcaatgtcatggagtttgtggaaaatgagaaaaggctgatcagccagatggagggaagagcatcctgtgagatattgagaaccatgttgcctcttcactgtcatatcattcagggggccgaggaagccattgagagagggtttgtgcggcttgagccgaatatgagtgagattcattccgatcctttttattttggatactttttgtacctgaaggccctgtatttaaagacaccggatcagatcgcacatgcaagggaccggatccacgggatttatcccgaggcaggtgagaagaagggatatctgctctggatgctcatctatctggatgaggatctgacgtacgattcagggctgcagcttcagaagatgagagagctatatgagacagggcagtgcaacagttttttgtggtttgaggcagccagcatctggaaccaggatcacagcaggatcaagtctatcggggcttttgagcaggagggcatccattttggcatctgccatgatttattcagcaaaagtatgcagaagcacatctatagtcttgtgctgaaggaaaaagggttttctgagttccttctggcggacctgattgcgtcgtttcaaaaagaagagacacaggaaggtctacaggcggtctgttctatgctgatccggggaaactgtatggacgagtgctaccatatctactataaaaaagcagtacaggcaggtatccagatgatcggactacaggaatcttatctgcgcactatcgcaaaagacagatatccgtatctggaaaagaatgtccttttatatttctcatacagcaacagcttaagcagcagagaacgggcatatctatatgcgaacctagtaaaaaaccggagaaaatacgaatctgtatttccgtcctttgagccgcagattgaggagtttctgttggaacagctggcccagagtaagattaataccaacttatttatcctttatcaggcattttttgaccgtctgctggaagggatgaagggcagagccggcattgccaatatcatggccaagcagaagctgatctgtaaaaacccggctatggagagagcagtcatataccagaaggaattaaaagaggtgcagaatgtctccttggaaagcggggaggtgtatgttacggtttacagtgagcctttggtcgtttttctggatcaggaggataaccgttatctctcattggaatatacattttcaaggctgtggaccagggagcaggaggaagccgtatttgcagggctgggcagaagaaatgaggcgtatctgatccggcaaagtcttgtatttaaagaaaaagctgaatttagcgccggggacatccaggacgtggaggcagtgctggaatgtcagagcctgaaagaggaataccggcacaagatttttgaaaagctgttggattactactggaagcacggcaggcaggaggaattggagcaggcactgtccatggtgcagtggaaatacttgtccagtgagaattgtaagcagatgttggaatattttatcgcaggacggcactataaagaagccatgaagggcatagagatctttgggtttgattttatggatccagagcccttaaaagaagtcgtgctccatgaacttacatcgctgagcaggaagagagtgcagacacttcttgacatgagcctggatgtttttcagggaaaggtctataacagcgagatcctggcctatctggaacggttttatagaggtgatctacaacagatgctaaagatctgggagcagggggaaaagcataagatctatgatcaggaattcacggaggatattctaaagaaatcagctgagcaaggtgccggatgggaagaggtcccggtcttcttggcttatgccgggcaggacgcaaaggacaggaaactgctgaagagactgacggaccagtttgtctgcctgtcttatgaaggcaaaagacagctttcagatgacttttatcctctgcttggaagacttttagatcaggggaaccaaaagctcatctggcagtgggcttatctggattattataaggataaagacttaacaaaggaacagaaaacaaggatcacaaagattattgaatcccaggaggaccgccattccatcctgccggtgctgctgcagtttaaggaagagatcccacttccgtatgagtgttttacctacacttatgtggtctaccagggagaaaaggatagcagcatggtgtttcactatgcggagaataaatcggacccggccagggagatccccatgcgggagctgcttccgggatactatgcagcccaggtgctgatttttgccgatgagacggcagattattatgtgaccgctcccggggaggagagacgcaggagaaaagatattgtctttcttgaccactccggggagaaccagaaaggcagattttatcagctgaaccatatgctgagggaaaaacagagagagagcgtggccatggaaatggagatctacgcatatgaaaaagcaatgacggatctgatccgtcctatgacagaggatcaaggatgaaaataggaatacagatagaacaaggaatgatatatcagtgctccgttgtggatgggcaggtcgtggaggaggagccggcaaggctttccggtgactggacagactatgtgaggacagaggcgggaaggcatccggatacggccaatctgtacctgggtattattctggagacagcagaggaagatataacctccaaggccgcagagctgcgaaaggaattgggggtaacagaggatcagctgaagctgtttacaaaagaggaagccttcctgggtctggccagagaacggcaagagcagctgaaacagggagctgtgggactgtttgactattcattgcagggacagttgtattactatatggtaaaaaaacaggacgggcagatgctggtagagagggaggactactctgcctttatgagaaatacgcgcctgccgcaccagaaggatatggcatttgagaatgctgccatgcaggccatggctgcggaagtcacatctcttgtttatctgtgcggccagggttttgacagcggatggcttaaaaatgccgccacaaagctgtgcgccgggcggcgtgtgttcatgggaaaccatgtttatgccacaggagccatttatctcttaggaagaaaaaatgttgcggacattgattcggctgtgattctcacggacacggtcatgatgtaccaggtcggcatcatggcatggaaccatggaaaagaagaatttttaccgctggtaaaaggagggcgcccgtggtttgagagccgtggcagtgtgaccgtactgatcgatgcagcggcttctgtcccagtggagatcaagccgctgttccccgggaaaggtgacaggatgcgctttttggtgccgctgaaaggactggtcaaaagggagggacgagcgacaaagcttaagatcgaagctgagtgtatcggggagacaaagtgcagggtcaagatcacggatcttggtttcggaaccttatttcctcccacctatcaggtgtttcaacaggtgttatcatgggaaaggaggggacagccgtgagaatggtattgtgtgagacggatgagatcagaaggccttatacgctaaattcctttgggcagaccatttcctcctatgaagaattgtgctatattatttccggacagtatttatattttttggtggagggaatcccaaaagggatgaaactatggatagaggaggagcttgggctgaccctctctgagcaggaagagacaaaaaagcagctggagcagatcatcggttatcggaattatttcacggagccggagcagaggatgctcattcagcagatgcggacggcctatctttactcctccgtgcgcaaacaaaagatgcttggcgatttgtatcttaaacattgcaaatatctgagtgcgtaccatgcatatcataagacactatcaggactgctgcagctgaagcagaaagaacagcaggaggttctgtatcatataggactctgcctgacccggatgttccggtttcaggaggccaaagaattttttcaaaaaagctgccgccttggggatcataaaaagtgccaggaagcatattttattgtttcctatatgcagggggaccaccaaaagtttttagaagacggaagagcgctgtcgtttacggaggaacaattaaaagagatttatgaaaatatctccggtatggaagagaaactgaacggtggcgaagaatcccacgcattaaaaaagattgattatcacagaaagaaacccgatgacctgatgaccagaagactgacctggtccatgctggaacggtggaaaaatgagtacagaagagagattgtctgaaattgaatatcagaaaaaacggatggaattaaaccagcgttttgtggaaatgtatgaagatgagatatcttatattctggagcagaaggaagatatcgaggccatggagagactttcagatgaggaagcgagacttctggaggaagagtccaggaaatacaaccggatctttgccaggatattttatgattccgcaggcggacgagtctccgatgaggagttcttccctctttgggaaagggaggaagagatcaggcagggcctatcccgtatccattccttggaaggggaaaaaaagcagatagaaaaagaaatttcggctcagggagaggaagaagtggaacttaaaaagaaagagaaggagtttcacggaaagttcatcaaccggagagcgtatttcatttctatgctggtcatggcactgaccggggcaggtctctgtgcggcagcggttttgtattttgagattgcgctgacggtttccctgtggcctgtggctgtggcagtgttgggtgctgtgatgattcttctcatactgagggccaggcagcacaaagcggcggacagaaagaagatgtaccagatggtcagaagccataaagagacttccgtccggcgccttcagtcggaatatgatacaattgtcaatgacctggagttctgccaggaaaaatatcaggtgctgtttggatatatttcagaagaacagtggaaattatttgaattttgtgctaaagttgcagcggaattaaattgcagtgaagaactcatggtccagagggcatcctttgtttcggccatggaaaagtgcgggatgcgcgcgcccaaggcgtggtgttattacccgaaagcgatttatgatataccaaaaaggatcaaccgtatggaatggctgtcacgcaggcagatcatctgtgagcaggcaatggtacagcatgagcgggccatccgcaacaatctattagcttagaggatcataagattaaaatagagtaggagatataagatgagtaaagaattggaaaagacatataacccgtctgagattgaagacaggctatatcaaaagtggctggacaacaaatattttcacgcgaaagtcgatcacagcaagaaaccgtttacgatcgtgatcccgcctccaaatataacaggaaaactgcatatgggacacgctctggatgagactatgcaggatattttgatccgctttaaaaaaatgcagggatacaatacactttggcagccgggaaccgatcacgccagcatcgccacggaagtgaagattatcgaggccctgaaagaggaaggcattgaaaaagaagatctgggccgggaaaagttccttgagagagcctgggagtggaaggaagaatacggcggcaccattgtcagccagttaaagaagctgggttctgcctgtgactgggagagagaacgttttaccatggatgagggctgttccaaagcggtggaagaggtctttatcaagttatatgaaaaaggatatatttacaagggatccaggatcatcaactggtgtccggtgtgccagacttccatctctgatgcggaagtagagcatatagatcaggcaggccatttctggcatatcaaatatccggtggcaggaactgatgattatttggagattgccaccacccgtcctgagacaatgctgggggatacggctgtggctgtccacccggatgatgacagatatgcaggtctggtcggaaaaatgctggaacttccgctgtgcgggcgccagattccagtcgtggcagatgaatatgtagacaaagagttcggcaccggggctgtaaagatcacaccggcccatgatcccaatgactttgaagtagggaaacgccatgatcttcctgtgattaacgtgatgaacgacgatgccactatcaatgaaagcggcggcagatatgagggaatggagcgctacgaggcgagaaaagccattgtaaaagatctggaagaacagggatacttggtaaagatcaaagaccatgaacacaacgtgggtacacatgaccgctgtaaatctactattgaacctatggtaaaaccacagtggtttgtaaagatggacgaacttgcaaaaccagccattgaagctgtgaaaaacggagatgtcaagtttgtgccggagcgctacacaaagacctatcttcattggctggagaacatccgtgactggtgtatttccaggcagctttggtggggacaccggattccggcttattactgtgacgagtgcggtgagaccgtggtggcaaaagagaaaccgtcggtatgcccaaaatgcggatgtacccattttactcaggatgaggataccctggatacatggttcagctccgctctgtggcctttctctgttctcggatggccggagcagacggaagaacttgactacttttatccgaccaatgtacttgtgaccggatacgatatcattttcttctgggttgtgcgtatggtattctcaggatatgaacacacaggaaaagcgccgtttgacacagtgctgatccacggactagtaagagacgacaaaggacgcaagatgagcaaatccctgggcaacggcatcgatcctcttgaggtcatcggacagtatggtgcagatgcgctgagatttactctagttaccggaaatgcccctggaaatgacatgcggttctatatggagagggtagaagccagccgtaattttgcaaataaggtatggaatgcctctcgtttcatgatgatgaacttcgagcaggcagatttctcccatgtggagctttgtgacctgacccaggcggaccgctggatcttatccaaatttaatacgctggcaaaagatgtgaccgacaatatggacaaatatgagcttggaattgctgttcaaaagctcaacgactttatatgggaagaattctgtgactggtatattgagatggtaaaaccgcgtctctataatgacgaagataccaccaaagcggcagcattgtggactttgaaaaaagttctttcagaatctctgaagctgctccatccgttcatgccgtttatcacggaggagatctactgcaacctgacaggggaagaatccattatgctggcagcctggccggaatacagggaagaatacagctttgcccaggaagaggcagcagtggagttgatgaaggaagcagtgagaggcatcagaaacatccgcgctgagatgaatgtttctccaaagaagaaagcaaaagtatttgttgtttctgagaaacaggaagtaagggatatttttgaacagggcagggttttcttcggaacacttggctatgccagtgaggtcctggttcaggcagataaagaaggaatttcagaggatgcggtgtccacagttgtaccggacgcagagatctacatgccgtttgcggagcttgtggatattgacaaagaaattgaacgcctgaaaaaggaacagaagaaattaggcggagagattaagagatgtgaaggaatgttggggaatgaaagattcttaagcaaagctccggcccagaaggtggaagaagaaaaagaaaaactctcaaaataccgccagatgctggataaggtagaggagaggcttgatcagcttgcgcaataacatggcggattatgaagaagcaagaaattatttggatcatgtgacgggtttcgctaaaaaaacagccttatccaatgtacaatggattctggatgttttgggaaacccggagaaggagctgtcctttattcatgtggcagggacaaacggtaagggttctgtctgtgccttcctggattccattctcacaagtgcagggatcaaaaccggacggtttacttccccgcatttagtccgcatagaagagagaatacagctcggcggcagagagatttccaaaataagatttgcagaagtctttacggcagtaaaagaagccgtcagccaggccgtgaagaaaggggcagcacatccctctttctttgaattcctgtttttgatgtccatggtctttttccgggaagaaaaagccgaaatgtgcattatagagacaggcatgggtggaagacacgatgcaaccaatataattacgcctgaagtttcgattctcactgcggtgagccttgaccaccaggagttcctgggagacactctggaattgatcgccggagaaaaagcagggatcataaaaccgggagtgccggtggtctttctagagcagagaacggaagttatggaaatcttccgggcagaggcagagcggcagaaatcggaatccataacaatttcgaaagataatcttattttttccgaaaaaagcagtgattatattgatttttttaaaaagagtgcgtatgataaaaagagtaaatgcctgaaattaggccttttgggagattttcagtatgataatgccgcgcttgcggcagcggcagtccgtcggctgtttccagagataaaaaagcaggatgtattccaggggcttgccacggtttctctggcaggcaggatggaggaagtaggtcctgggatctacattgacggaggacataatctccaagcggccgaggcattctgccgtacgttaaacgattactttccccagaggaagttcattgtattcgccccttcccacagacaggaagaggaggggatcttaaagcttctcagggaagttaacaatctggaaggaattcttaaggtcccggtcaagaaccgggaagtgccggatggcgatttcttaaaggcatataaaacgatgatccaaaagacggaggagggaattctctgcttttgcatcggctctttttatttagctggtaaggtaaaaaatttatatggaggaagaaaatgatcaattatagagaagaattaaagaagtttgaaccttgcttagatgtggaccaggcagaagatgcgatttacagtgatgatttaaaagatgtggaagatctgatcaaagaaatcaaagaagacattgaagaagagaaatagtaaggtggcggatatgaagagtaaggaaaagattaaaaacagttccaaatactactacaaccttggactggaaaaagcgggcgccaacgatctgaccggggctgtaaaaaacctgaaagctgcattattttatgataagaatgacatgaacgccaggaatcttctggggttggtctattatcagatgggggacatcgtccctgcgctgagccagtgggtcatcagcagcaatctgaaaaaggaagacaacgcggccattgactatctgaaggatgtacaggagaacccggtccagctggatacggtcaatcaggtgatcaagaagtacaatcaggcacttgtatatgcaaagcaggaaaacgaagatcttgcgatgattcagctgaaaaatgtagtgtcaatgatgccgaacttcatcaatgcccagcttctgatcgccctgctttctattaaagatgagaactataaggatgcccagaaggcattaaaaagggtattggaaatcgactgcaagaatcccagggcgcttgagtatcttcaggagacagagtctctcatgaagcctgcggacatcaaagcggaagacagcagtacagaaaacacagaaggacaaaagaaaaaaggtctgagcagtgtcgtcagcaaatacgaggaactgccgtccaaccgccaccggatggtttacatggtgggagggattgtgatcggagtccttgtgtctttggtgctcttatatccgagtatcaaaaaggcgtccagctacaagtatacatctaagatcgaaaattataaggaacagctgctggcaaaggaaacccagttaaagagcaacgaaaaagatatcaaagaggcaaaggcagctgaggcgaaggctaaaaaggaattaaaagagtttgtaggggacagcaagacggaagggatctatgattccctgctgacagctatgcaatattacggagaccgtaagtatacggagtcagcggatgctctgctggatatcgaccgggccaaattaggttccaagaagatgaaggagatctatgacgatctggaacagaaggtgtatccgtatgcggcgacaggcctctataataaggggatcagcgcatacaaccagggcaattacaaagatgccatcagcactttaaagaaggcgatcaaagtcaaagacaccaacgtgggctcttacttctatctggcaagatcttacgagaagaacggcgacaaagagaaagccatcaaggcatacgaggatgtcatcaagaagttcccgggtacgaacagtgcaaggaattcacagacttatctagatcaattacagaacaaaaaagcgaaaaatctttagaacagcggaaaaagaaacttataagacacgaaagagaaatatatccggaagacagcagatcttccggtgtatttctctttcgtttttttattccataggaaagttctacgaaccgacctatgttattacaaggaactcgaagcgggatgcccgttttgttttagaaggagtgaaaaatttatggcaacagaatatcaggttgaaaacaggacattgtatgtaaggcttgacggtgagctggatcaccatttggcagaacgggtcaggcataaatgcgatgtgatcctgaaatcatatcctatcaaggatattgagttcgactttaaaaataccggattcatggacagttcaggagtaggaatgattcttgggcggtacaagcaactgaagcctttagggggtacagtaagcgtggtgaatgtcaacgatgtagtgaaacggattgtacacatggcgggtctgcataagatcatcaatgaacgataggcgatagggaggataaggaatgatacatttagaattcaacagcgaatcagaaaacgaagggatcgcaagggtactggctgcaacctatatgatgaaatttgatcctacaatggaagagatggcagatgtgaagacagcggtttctgaggcagtgaccaattgtattgtccacggatacaacgatgaccagggaaagatcagtatggatatttcaaatgaaggaaatgtactgaagatcaccattgaagactatggtgtgggaattccagacgtgaagcaggccatggagcctatgtacactacaaaggcagatgaggaacggacaggcatgggattttcttttatggaggcgtttatggataagattgaagtcagctcccaatccggaaaagggacgaaagtcaccatggaaaagaaagtgactgggaaataggtcttttctatggacgagactagagagttattaaagcttacgaaagaaggagatcaggatgcaagagagaaaatagtgctcgacaacatgggcctgatctggagcgtggtaaaacgttttaccgggcggggccatgagcctgaggatctgttccagattggcagcatcgggcttttaaaagctgtggacaagtttgacctgtcctatgatgtgaaattttcgacttacgcggtgcctatgattacaggagagattaaacgttttttaagggatgacgggatgattaaagtcagccggtcattaaaagagatcgcataccaagtccggcaggcaggagaggcctttgccatgaagtacaacagggaggcaaccatcgatgagctttctaaggagactaagatcgccagggatgagatcgtggtagcgctggaggcaaataaggatgtggaatccatttatcaggcttcttatcagagtgatgacagccaggtgcttttagtggacaagctgcctggagaagaaaatgagtcagagacggtgatcaaccatgtaattctggaagaacttatggacgctctgtccggggatgagcgagaattgatcacaatgcggtatttccatggaaagacacagcaggagatcgcaaagaagctttctatatcccaggtgcaggtttcaagaatggagaagaaaattttactgcgtatgagaaaacaaattcttggacatagttgaaaaatgtgttaatataatctaagagggaaatttccctcttatgattacaattctgtagggaccggtcagatcacaggtcatcggatacatcatccattttcccgaactgaaaattgcaatttgaatcaatctaatttatagtattgtgcttttaaacaaaggagaatattctatggtatatgaatctatgtctttgctcgagcttagaaaggcggcaaaagaaaagaatctaaaaggtatcagcggtctaaaaaagcaggagctgattgaatatttaaaaaataatgacaatgaacataagcaaaacgaggcagacctcgataaaaaaacggaacagccaagagaggcaaagcaggagcgcgtacccagagacatcaaaagcctggacagcggcagaaaagccaatggtattctggaagtactcccggacggatatggatttatccgctgtgagaactatctccctggggagaatgacatctatgtatctccgacgcagattcgcagatttaatttaaagtcaggggatattttatgcggtgcgatccgagtcaaaagccagaatgaaaagtttggtgctctgctgtttgtggaatctgtcaacggataccatccggaggcggcagccagaaggaagcattttgaagacttaaccccaatttttccgaatcagagattaaaactggagacagagcgggcaactattcccatgcgtatggtggatctcctgtcgccggtgggaaaagggcagagggggatgattgtatcgcccccaaagacaggtaagacaacactgttaaagcagatggcccagagtatcagccagaactatgaggatatcaagctgatcgtcctgctcattgacgagcgcccggaagaggtgacagatttcaaggagtccgtggagggccagaatgtagaagtcatttactctacatttgatgaacttcctgaccaccataaacgggtgtcagagatggtgctggagagagccaaacgcctagtggagcataaagaagacgtggtgattctcttagatagtatcacaaggctggcaagagcctataatctcacggtgccgcccagcggaagaacgctgaccggagggcttgatccagctgctcttcatatgccgaagaagttttttggggctgccagaaatatgcgggagggggggagtcttacgattctcgccacggccctggtagagacgggaagtaagatggacgacgtgatctttgaggaattcaagggtaccggaaatatggaactggtgttaagccgccatctttcagagcgcaggatctttccggcggtggatattgccaagtccggcacaaggcgggatgatcttttgctatccaaggatgagcagtctgtggtcagcgctcttcacaaagaattatccggaggccgttcggatgagttttttgaacaggctttgaatatgttcaagagaacaaaaaataaccgtgaatttgtagatttcgcaaagaaatccctgttgcgaaaataagcgaaaaaatatttgcattgtaagagatgctgtgatataatgagaaagctgtttaagaataaacaaaaggaatgtttaagataaactaagatcaaagaggtgaagaaacatgcgcgaaggaatccatccagaataccatcaggcaaaggtagtttgcaactgcggtaacgaatttgtaacaggttctacaaaggaagatatccacgttgaaatctgttctaagtgtcattctttttacactggacaacagaaagctactcaagctcgcggacgtattgacaagttcaatcgtaagtatggtactaagtagaaaacgggaaatgataggttgaggttgagaaatctcagcctattttgttgtataagcaattgcattgcagtgaaacaggaaggacggacagaatatgaatgtaaggattggcggacaggcggtcatggaaggtgtcatgatgaagaatgaggaccgttacgcagtatccgtgagaaagccggatggagagatcgagacaaagatcgaccattatacgagtatttccgaccgatatccggttttaaagcttccgatcctgcggggagtcgtaaactttgtggagtccatggtcgtcggtatgaaaacattgacctactccgcagattttatagaagatgaagaagaggaaccgtcccggctggaacagtggctgaacaggcacttctccgaaaagtgggaaggggttctcatgggatgtatcgtggctctgtctttcgctatcgctatcgggctgtttatggtgctgccgtattttctttccaatatatttgaacaatggggaatgagccgtccggcggttcttctgctggaaggattgatccgggtgggtatctttttaggctacatcattctcatatccaggatgcaggatatccggcgggtctttatgtatcacggggcagagcacaaaaccatcaactgcctggaggcagggcaggatctgacaccggaaaacattaaaaagtattccagattgcacaagcggtgcggaaccagttttttgtttgttgtcatgatcatcagcatcctgtttttctttttcatccgggtagacacagtctggatgaaggtggttttaaggctgcttctggttccagtcatcgccggagtctcctatgaattcatccggctggcgggtaattcagacaatccggtgatcacagcgttgagtaaaccaggactttgtctgcagcttttgaccacaaaggagccggatgagagtatgatcgaggtggcgatcaagtcagtggaaggtgtttttgactggaaggcttatctggaaaaggaaaggaacagacgtgaataggaagatttgggtcacttacggtgcacaaaagcttcgggaggcagggatcgacaacccggatggggaagcctggtatctgttttcccacagtttttcgcttagcagggaagattatttgttttccatgactgcaccggtggaagatggggaagaattagagagatacaaagcattgctggagagaagagttacagagaggattcctctccagtatctgaccgggacccaggattttatggggtatacattccgggtaacaccggatgtgctcataccgagacaggatacagaatgtgtcatagaggcagttgtccaaggaggatactctcatgagagtatccttgacgtatgtacagggtccggctgtatcgccatcagcttgtgtctgatgctagagccgaagatctgtgtcggcacggacattgatgaaaaggctttggaaattgcaaaagagaatggaagaagactggctcctatggtaaaatttaaaaagagtgacctcttttccggggtggagggatcctatgacctgatcatctccaatcccccatatattcctacgaaagactgtatggaactgatgccggaggtgaaggatcacgagccgatgctggctcttgacggcaaagaggacgggctttatttttaccggaagcttgtaagagaggccccggactacttaaacgcaggcggcacgcttgtgtttgagatcggctatgaccaggggccggcggtaaaaacgatgatggaggaagctggtttttcctctgtgaagataaagaaagacttggcgggccttgaccggatggtcatcggaacgctgacagaaggagaagaagatgtttgataaattagaaagtttagtggagcgcttagatactgtgctccagcagctcaacgacccggatgtggccggagaccagaaccgtttcagggatttgatgaaggagcagagtgacctgtctcccattgtagaaaagtacaaggaatatgttcaggaaaaacagaacatcgaggaaagcctggagcttttggaagaggaatctgacgaagagatgagggaactggctaaggaagagctctctgagtccaaggctaatgtggagcggctggaagaagagcttaaaatcctcctgatccccaaggatcccaatgacgataagaatattatcgtggagatccgcgcaggggccggcggtgacgaggcagccctgtttgccgctgacgtagcgcgcatgtacagaagctatgcggaaggccgccgctggaaggttgagacactgagctttaatgaaagcggaatcggaggctttaaggagcttgtgttcatgatctcaggccagggcgcttattccaggttcaaatatgaaagcggtgtccaccgtgtccagagaatccctgccacagaatccggcggaaggatccatacatccaccatcacggttgccatcatgccggaggttgaggacgtggaggtggaagttgatttaaatgactgtaagtttgacgtgttccgtgcatccggaaacggaggacagtgcgtcaatacaacagattccgctgtccgcctgacccatcttccaaccgggattgtagtgtcctgccaggatgagaagtcacagcttaagaataaagataaagcgttaaaggtgctgcgttcccgtctgtatgaactggaacagcagaaagcccacgacgcggaggcagaaaagagaaaaagccaggtgggaaccggtgaccgttccgagaagatcaggacctataactatccgcagggccgcgtgacggaccacaggatcaaactgacccttcacaaactggattctatcatgaacggagacctggatgagctgatcgacagtttaactgctgcggaccaggcagccaaattaagtaatatggaagaagagtagattatgaaagatggttttatcaaagcagctgcggctacgccaaaggtaaaagtcgcagatcctgaatataacacaaaagagatcataaagatcataggacaggtaaaagatcagggagcaagtcttctggtcttttctgagctggtggtttccggatatacgtgcggtgacctgtttcttcaggagcctttgctggaggcttctcaaaaagggctgtttgagatcaaaagagccacggaaggtctggatatgatggttgccgtgggttgtcctttgactgtggaacacaagctttacaactgcggcgtctttttgttcaacggacgcattctaggtgtcgtgcctaaaattcatctgcccaactacggagagttttatgaggccagacactttgccaagggtgaaagaaaagtgaaggatatcgtgctggatggagagacagtaccatttggagccaatattctgctggcctgcgaaaatattccggaactgaccattgccatggaaatctgtgaagatctgtgggtgccgcttccgccgagtacgttccatgctttagccggggcgaccgtgatctgtaatccgtctgccagtgtggagacaacaacgaaggaagtttacaggagtaacctggtatccaatcagtctggaaggcttctttccggttatgtatatgccaacgcaggggaaggggaatctacaaccgatgtagtttacagcgcacatcacctgatctgcgaaaacggaacggtgctggccgaggcaaaaaggtttaccaatgagattatttatgcggatctggatttaaagcgtcttgaggcagagcggagaaagatgaccaccttctttgaggaggagacagaagattatcggagagtgccgtttatccttccggtgagggagaaccagctttccagaacatttccgaaaaatccgtttgtgccgtctaatcggcaggaacgggagaaacgctgtgacgagatcttatccattcagtctatggggcttaaaaaacgtctggagcatactaactgcaggcatgccgtggtggggatttccggcggattggattccaccctggctgttttagtgacagtgcgtgccttcgatatgctggatatcccaagggaaaacatcatctgcgtgacgatgccgtgttttgggactacagaccggacttatcaaaatgcagtgtccctgatccatgagctgggagccacgttcaaggaagtgaacattgagaaggcagtaagacagcattttcttgatattgaacatgaggaagacaatcatgacgtgacctatgagaattcccaggccagggagaggacacagattctcatggacatcgccaacaaatataatggtatggtcataggaaccggagatatgtcagaactcgcccttggctgggccacctataacggagaccacatgtccatgtatgcagtgaactgttctgtgccaaagaccctggttcgctatcttgtgctttattatgccgagaccgtggaaaatgagaaactgtccaaggtgctgatggatgtgctggatacgccggtgagtcctgaactgctcccaccagtggacggtgtgatctcacaaaagacggaagatttagtgggaccgtatgaactgcatgacttcttcctgtattatatgctgagatttggattcccgaaggaaaagctttaccggatggcgaagcttacgtttgcaggggactatgacgatgaaaccatacaaaaatggctggataagttctactggcggtttttcagccagcagtttaagcgctcctgcctgccggacggaccgaaggtgggaagtgtggcggtatctcctagaggcgacttgagaatgccgagtgatgccagcgtgaatatctggcagaaatcataaaaagagaaatagagattgttctagttttagaacaatctctatttttttgtcaagataaagaattgaagttgcacgtttgtgcggaaactgagaatttgttgtaagcgatatttgaaaatgctaagatataaccaacttaagtgagagaagttagaggaaaacatacaagttgcataaaaaaggaggtaattatgaaaaacataatcaatgcagagaatatccagctgaacgcggaagctacagattggaaagatgccatggaaaggtcagggaagctcctggtggacagcggttacattacaccggactatattgatctgaccatccggtgtgtggaggaaaacggcccatatatcgtcatcaccccagggcttgcgttgtcacattccagacctgatgccagtgtacataaaacagggctcagccttttgaccttaaaggaaccgatcagcttcggaagcgaaaatgatccggtagatattgtacttactctggctgccacagatgatacttcccatttagagatgctgcagggaatggccgaatatatttcggaggaagaaaatcttgaggcgataaggacagcaagagattcagagacggcagccaaagcaatcaatgaatttgaagctgatctttagggaggagtaaaaggatggaagtattaaacacatttttcacatttatctccaacaacattctcacaagagctgagttatttgtagggctgatcgtattgatagggtacatattactggggagaaaatggtacgagaccatggctggttttataaaggcggtggtaggatatatgatcttaaatgtaggatctgcagggctggtcacagctttccggccgattcttgcggggctgaaccaaaagtttcatttgaacgcagtggtgattgatccgtattttgggttaaatgcagtcaatgcagcattggaaaacatcggtctctcagccgcatggactatgacatctctgcttcttgctttcctgtggaatattctcttactgatgttccggaaggtgacaaagcttcggaccttactgttgacaggacacatcatggtacagcaggcgacaaccgtcacatggattgtatttttgtttgtgccgggtctcaggaatatctggggagccgtggcagtggggattcttgtgggaacctaccaggctgtattttctaatctcactgtagagcccactgatcacctgacggacggagaaggcgggttcgctatcgggcatcaacagatgtttgcagtatggctcacagataagatcgcaccaaagatcggaaaaaaagaggactccatcgagaatataaagcttcccgggtttttacagatattcagtgacaatgttgtatccacgtccgttttgatgtttctgtttttcggagtgatcatggcggttctgggagaagattttctgcggggaatcgatgacagcttttcaaaggatacggctttcatcatctatatcttttccaaggcattgagctttacagtttatctgaatgtacttcaggcaggcgtccgcatgtttgtggcagaactcacggaatcctttaagggtatttcagacaaacttctgcccggggcaatcccagcagtagactgcgcggtagcttacggatttggcccggcaaacgctgtcaccatcggatttttcttcggagccatcggacagtttttggccattgcaggacttctgctctttcattccccggtcatgatcattgcgggattcgttcccttgttttttgacaatgcaaccatcgcagtctacgccaataaaaggggcggcgtgaaagcggcaatgatccttccatttgtatgcggagtggtccaggtaatgggcggcgcagtctgtgccctgctgcttcagctggtggcgtttgggggatggcacggaaacattgacttttcgaccattttcctcggcgtatcctatatagtaaagtatctgaaggtaccgggaattatcctttgtgtaattgcaatgctggtgattccgcagattcagtacgcaagatccgataaagaaaagtattttaagatcggacaggaagaagaatattaatcaggcagatttagaaactaaaaattaagaagaaataaatggaggtagcattatgaaaatcaaagcacttgcagcatgtggaaatggtatgggatccagccagatgatcaaaatgaagatcaacaaggtatttaaacggctgggaatcgacgcagagatcgggcatatgagtgtcggggaagcaaaaggcgtggcaaacaattatgatatgatctttgtctccgagacttttacatcccagttccgtccggggaaagatacaaaagtcataggactgaaaaatcttctgtccgaaaaagagatcgaggaaaagatcagaaccgcattggatatgccgaaagaagcatagaggagaaaaagggatatgtatgacattaaaagaaatcctttaggaatttatgagaaggctctgcctgattccttttcatggaaggaaaagttccaggcggcgaaggcggcaggatatgattatatagaaatctcaattgatgaatcagaagagaggctctcaaggcttgactggacggacagccagatagaagaaatccgtgaatatatgaggcaggaagatatcgtgatccctactatgtgcttaagcggccacagaaaatatccgtttggaagcaaaaacatggagacgaggaaaaaggcatttgaaatcatggaaaaagcgatccttctggcccaaaaacttggtatccggtgcatccagctggctacatatgatgtctactatgaggaatcggatgaacagactgaaaagctttttttggagggaatgaaaaagtccgtggagatggccagcagagcgggagtcatcctggcaatggaaatcatggatacgaaatttgtaggtacgatcttgagggcagtgcattatctgagacaaattccgtccccgtattttaagatttatccggatatgggaaatctgactcaattcagcagcgatgtgggaagcgagctggaacttggtatagccgaaaccgtggccatccacgtaaaggagacaaaaccgggagtatttaagaatgttccgtttggagagggaacggttccgtttacggagattttcgggaaactgaaggaattaaattatacgggcatgtttttgatcgaaatgtgggcagacaatacaaaagggcagtccatggaggaggcggttgagacaatacgcaaagccagagattttgtagaggacaagatgcgcagggctggaataaattctgcggcgtaatggaggaaaacatgtatcagatggtggttactgacctggatggaactttactaaactcaaaaaatcagatatctgatagaaacgaaacagccattagaaaccttcagagaaagggtgttatggtggcagctgccacagggcgtttggatgtcatgacgaagccctatttaaagcagttaaaggtgatcgatgtggtcatcggatgtgacggagcggttacccgggatgtcagcacaggaacgaggatcagcggtatccctcttgcggagtccatttgtctccaggcgtttgaagttttaaaacaccacgggcttccgtattatgttttttccgaggacgaacttgttggggatgatccagagaacgagagactggtcatacacaggaagtttaaccggagacttgatgcagaggacagaattccaatccgcatcgtaaaggatctggaggagtatgtaaagcatgcgcaggtttataaaattgtggccagccatgaggacaaaagatttctggatgatgcggcgaaggaactgaacatgatagaagggctgagtgcggtgcgttcaggcccgagggtgctggcactgaaggcagaaggggtctccaaagcgtctgcgctaaagcagttagtgaacgaattgggtatcccgcttgagaaagtggccgcattcggagatgaagtaaacgatattgatatgctgaaggccgcagggcttggcatcgccatgggaaatgcagacccagaggtaaaaagatatgcggactgtgtcacgttgtcaaacgacgaggacggcgtggctgtaaaaatagaagaattattcggagaataaaagaaaggagatttttatgctggaggatttaaagcagcaggtatatgaggcaaatatggaactgcccagagagggcctggtaacttatacatggggcaatgtcagcgggattgaccggagcagggagttgtttgtaattaagccaagcggtgtggattatgaaagtcttactccagagcagcttgtcgtggtggacttaaatggggagaaagtggagggggatcttaatccttcatcggacacccctacccacctggaactttacagggcatttccggaagtgggaggaatcgtccatacacattccccatgggccacatcatgggcacaggcagccaagggaattccgtgctatgggaccacacacgccgattacttttacggggagattccatgtgccagatctttgacaccggaagagatcgaccagaactatgaaacgaacacagggcttgttattgcggaaacttttatgggaaagaatcctatgtatgtgccgggggtgctctgtgcaaaccacgggccgttttcctggggaaggaatgcaggggaggcggtacataacgcagtcgttttagaagaggttgccaagatggcataccgtacggagcatctgaaaaaaagtgtggaggccgcttcccaggatcttcaggataaacattttttcaggaaacatggggaacatgcatattacggccaataaaggaggattaagatgagtaaaatagaagagattacgagagaaagctggatcatgggtacttttccggagtgggggacctggctgaatgaagagattgagcgcgaggaagtgaaaccggggaccgttgccatgtggtggcttggatgcaccgggatgtggtttaagacgccgggtggctgcaatattacggtagatctatggtgcggcaacgggaaaagaacccacggagacggaaaaatgaaggtgggacaccagatggcaaatatgtgcggagcccgcgctatgcagccaaatctccgggcagttccgtttgtgctggatccttttgcggtgaaacaggtagatgcagtgttggcgacccattatcatcaggatcatatgagtgcagaatatgcggcacatgtgatacagagcaatatgacaactgtagatgagaacggaaaagagatcccggtgccgtttatcggtcctaagaaatcagtggagctctggcagaagtggggagtgcctgaggaccgctgcatcaccgtaaggccgggggattcaattaaaataaaggatcttgagatcatagccctggattcttttgaccgcacctgtcttgtgaccacggattccacaggggccgacagggaagaactgaccgggatctgcccgactgacatggatgacaaagcggtgaattatctgattaagacaccgggcggaaatatttatcacagcggggattcccattactctatctattttgctaaacatgggaaagattatgatgtggatgtggcgtttggttcttacggggaaaatccagtcggcatggctgataagatgacatcctgcgatatcctcagaatggcagaggctcttcaatgtaaggttgtgattccgatccattacgatgtgtggactaactttatggcagacgtgaatgagatcagagtactgtacgatatgaaaaaagaccggctggattataagttccatccattcttctgggaagtaggaggaaaatatatttatccggcagataaggacaaaaaggcatatcatcaccagagaggttttgaagactgtttcgaggcaccgcagaatatcccattccgctcctgtttataagaaagagaggagaacgaatgaaagtaaagaaaaaagtgatcggaaatctagaaaagtgttactccattgcccctctttcttatcaggggaaagactatatgctggtggcagcggaaaaggtgaaccagtgccgtctgtatggcttggatggaaaactggccgatgtgatctgggaaggaccggggggaaccatgtctatggtccagatccccaacactgacggaatctttctggccacccagcggttttattctccaaatgactccaaagatgccaagatcgtaatggtttctcccggagaaagtggatggagtgtaagaacagccgcaatacttccgtttgtccacaggtttgatatcatcaccagagacggcatcagttatgtgatcgcatgtactttaaaatccggacacgaatataaagaggactggagaagcccgggaaaagtgtatgtgtgcaggctgccggaaaatatggacgcaattgatgaaaaccattctctgaaatttactgttttaaaggaagggatgtttaaaaaccatggatactgtaaagcagtgatggaaggaatagaatgtgcgtttacggcatccaatgaaggagtttttcagtttatccccccggcagcaggggaagatgcatggaaaatcaggcagctgacagaccagccttccagtgatatggcatttgcagatatggacggggatggggagccggaaatgctgacgatttcaccgttccacggagatacagtccgtattctgaagaagcagaacggtcaatatagaaccgtttatacttatgaaaagccggcggaattcgctcacggaatctggggcggggacatcctgggaaaacagggagtcctggtcggccaccgcaaaggcgaacggaatcttatgttttttacctgcggggaggaaggctatgaagcagaaatcattgaccggaatgtgggacctgccaatgtcctgtcttaccagactgaggaaaaatcctatattctttctgccaaccgggaaattgatgaaattgctctgtacgaggtggaagaaggggaaacaactgtgatataatgacggcagtgaggtgaggaaatgaaagagtatgattctttaaatgacagtgaaaaacgaaatatgctggcaagtgttgcaaacctatattataatgcggagatgacacagaatcagatcgctgagcgcttttttacctctcgttccaaaatttccaggatgctgaaagaggccagacagcttgggatcgtggagattaccatcaaagaaccatgggaccggaatacagtgctggaacagaaactgatgaagcagttctgcctaaaggatatccgcgtgatcataccgaaggagtccaatgatactctaatcctgcagaagctgggcgaagtggccgcctattatctggacagccagatagatgaagacacagtgctcggaatgtcatggggaaacaccatgtaccacacagtgaaagctgtaaagacaagtaaaaatatatctctgacggtcgttccgatcatgggagctgccagtgtggggaaacccgagagggatgcgctggatctttccaaagaacttgcccatgcctacggaggagattaccattacatctatgctcccctgtttgtgaattcaagtgatatcagggatagccttgaagaagacccaaacataaaagagaccctgacgatagcaaagagagccaacattattctgaccagtgtaggatcgattgtgtataagagctggaagtcttacttaagcacaaaagatttatattacttagaaaaaaacggggcgatcggccatatcggcggccatttttacaatcaggatggaatagaggttgagacaccgtttgtaaagaggatgatcggcctcagtcttgaggatattaaaaaggcggaaaatgtgatctgcgtggccggactcgagatgaaagccgaagcaatccttggggctgtcagaggcggatatattgacacgttgattacggatgaaaatgccgccagaaaaatgatagaactgattcagcaatagcagataaaacaggtccttaccaccttcttttttgtggtttcccaactttcttcatcagatagaacaaattaaaagttatgatagtcgtgttaagacacccttttgcggggtgtcttttttgtcataggagattcgtaagaatatcatgtggcttcgctgaattgtattaactttcattttcttttatttatgcttgcaaaatgaaagttaatatgataatatacaagtacaaagtaaaagataataaaagtaaacaaaatggaggagtcaaaaagatgaagttaagtgcagagctaatagcaggtatggtagaccacacaaatttaaaagcattcgcagacgaggcaatgtttgaaaaactgtgcggggaagcgagagaatacggttttaagatggtggccatcaatcccgcacagacagtacggtgcaagcgtctcttagagggatccccggtacacgtaggtgcggcaataggtttcccgttaggacagacaacattggagtgcaaagtatttgagacaaaagatgccattgaaaaaggcgcggatgagatcgactatgtcatcaacatcgcagagttaaaaaacaagaactatgactacataaaaaaagagatggaagacatcgttgcagagtgcagaaaagccggagtgatcagcaaagtgatctttgaaaactgttatcttacagatgatgaaaaggtaaaggttgccgagatcgcaaaagaagtgaagcctgacttcatcaaaacgtccactggatttggtacaggaggagctacaccagaagacgtaaaactgatgaaaactacagtgggtgatgaggtgaaagtcaaagctgccggaggcatcagagatttaaagacagcgcttcaaatgatcgaagcgggggcagaacgtctgggaaccagtgcaggtgtggaaattgtggaagaattaaaaaaacaggactaaagaggtggacaaaatgaagaaagtaaaagtatgtttgatcggttccggaagagcgggaatgattcatgcaagaaatatggctggaagcgttcctgggggagaaatctatgcagcctgtgatcccgatgtcaaggcagccaaagccgcggcagaggaacttgggatcgatacctattatcaggactacaaggaagccatcggcgatgaatccatcgatgcggtcatcatagcctgcccgacaaaatatcacagggagatcgcagtggcagcggcaaacgcgggaaagcatatcttctgtgaaaagcctatggctatgaatgaagaagaatgtgatgagatgatcaaggcagccaagagtaataacgtaaagctccagatcggatttatgagacggtttgacgacagcttccgggaagcaaaaaaaatgatcgaggaaggtgagatcggggacgtggtcttggtgaaatcccacacaagagggccgagcaagccgcgtgagtggatgtatgacattgaaaagagcaacggtccattggcagaagtctgtagccatgatattgacactgtgcggtggtttgcgggaagtgagttgaaaagtgtatatgcactgggaggcaacttccgaaataaggagatcgcagaacagtatccggatttctatgacaatgtgatcgtgaatgcagagttcgaaaacggagtgcatgccagcatcgagggcgcccagtatgtgcagtatggatatgatgcaagagttgagatccttggaaccaaaggagtcatctgcatcggggatatgcatgagaagaagatcaccagcgccaacgaaagccaccagttaaagaggccttccatgcacagctggacccatctgtttaaggatgcgtatcttttggaggacagaagttttattgaggcaattttaaatgacagcgaagtggagtgcagcggttacgacggaaaaatggcagtgaagatcgtgaaggcggggaatgaatcaattgtacagaagaaaatagtcatgttataaggataggagggtattatgggaaatgaagcgacaggattccgtgccaggatccagaagttcggaggtgttttaagcggcatggtaatgccgaatatcggagcgtttatcacttggggactgatcacggcgatgttcttaaaaaccggatggtttccaaatgagaagatcgcagtattaatcgatccaatgctgaagtatctgctcccgacattgatcggttatacaggaggaaagaatttttacggcgaccggggcggcgtcatcggtgcagccgctaccatgggtgttatcgtaggatctgacattcccatgtttatgggagcgatgatcatggggccgttggcagctatttgtatgaagcgggtagaccgtctgtttgaggggcggatcaaaccgggctttgagatgatcgtcaacaacttttcctgcgggatcttaggaatctttttagtactggcggcgttttttgccatcgggccgtttgtgcaggtattaaaccatgtgatgtcctccggggtcaatgtgatcatcgaccatggactgacaccatttgccagcgtatttatcgaacctgcaaaagtattgtttttaaacaatgccatcaaccatggaattttagggccgctgggcatcactcaggcagcggaggcagggaagtctatcttatttatcctggaaccgaacccggggcctggagtgggagttctgctggcctatacattcttcggaacaggaacagccaaaaagaccgctcctggtgtagcgatcatccatgcattcggcggaatccatgaaccttattttccatatattcttatgaagcctcagatgatcctagcttccatctgcggagcagtgtcaggaaactttattttccagatgtttggatgcggcctggtagctactgcttctccgggaagttacttttcagtgctggcggtggcaccaaaatctgactatctcccgatcatagcaggaatgcttgtgtccacagccgtgtcatttgctgtcggtgcctttatcttaaggctctgccacgattccgatgaagaagcactccagaaggcagtggcaaagaaggattcaatgaaagcagaaggaacaggaggaggccttataggtgcacaggaagtcattgatttcacaggaaaagtaatcaagaaggtgtacgtggcatgtgatgcgggaatgggatccagcgccatgggagcctccatattgaaggacaaagcaaaacaggcaggtctggacattgaggtgaaaaatgtggcgatcccgaatctcccggaagacgtggatgtggtggtcacccatgaatccttgacagaaagggccatgagagagcggccggaggcgatccatatctccgtggacaatttcctctccagtccaaaatatgatgagattgtgtcaaaattaaaacaggcatccagtccactgccggttttaaaaaaagaaaatattaaagtgatccataagcttaattctaaggaagatgccatccacatgatcgctcagatgctcttaaaagacggttatgtcacagagggatatgaagagggtatgctgctaagagaaaaagaaactccaaccaacttaggcaacggaatggcgattcctcacggtgtcctggaagccaagaaagagatcaaatcctccgggatcgcagcactaatcgtaccggacggggtactgtggaacgatgagactgtcagactaatcatcggaatcgcaggggctgaccaggaacatctatccattctttccaatgtggcgctgaccttaaatcaggaagaagcggtgcagaagatcgtggatgatcaggatgtggaagagctttatcacatcctcaccaaataatcagatcacagttgaaaagctgcaggggcaggaactcccgcagcttttccttttgggcccgctgtgctataatttagcttgaaagcagataagacaaagcatggaggaatcgtatgtttgcagaagaacggaaagaaaagatcatggagcttttgaggcagaataagaggacaagcatcggggaacttactgaactgtttcaggtcagcgggacaacgatccgtacctacctcacagagcttgaaaaggcaggaaagctgatccggacacacggaggagccatgctgaatgaggatgtgctggatatggaggagtccatatcaacaaggaaagacaagcggacagtcgaaaaacagaacatcgctaaagcagccagggcaatgatcgatgacggtgacatgatccttctggacagcgggaccacaaccctagagctggcaaagcttctaaaggatgccaataatctcacggtagtgaccaatgatctgcagatcgcgctggagttacagaagcaccagggcatctatctgattttcttaggcggccatgtgaggaaccacttcgaatgtaccgtgggtaatatgggacttaaatttttggaggacttgtctgcggacaaggcctttatgtctgccaatgccctgtccatggcaaagggcgccacaacgccgaacctggaacaggcggagatcaagagggggatgatgggaatcgcagagaggaagtacctgatctgtgacagttccaagatcggaaaacgtaccatctgctcttatgcaaaggcggaggagtttcaccggctgatcacagatacccaaataccggaccatgcaaaagaaatgctggaaaagcaggggatcgaagtagtctgctgtgaagaataagaaatttaaaaatcccgcagacagtgcatgcaccgtctgtgggattcttgcaaaatctatttaattcaaaaagaaaaagattaagctaatttggatacgttctcagcctgttttccgcgaggtccttctgcgatttcaaagctgacctgctgtccttcttctaaagttttgaatccatcaccagagattgctgagaagtgtacgaatacatcgtctccgccttcctgagaaataaatccgtaacctttttctgagttaaaccattttactgtaccagtgttcatttgggtacctccattaaaaataaaaaattaacattactttcattaccagtgaatcatagaaaaagaccacgttcttgtaggatacatagcaatgtaatatctacccggacgtgatctatacattcactaataacagtaattatcataccacaaccattgtttttttacaaatacttttttaaactatcaatactttcctcgtagagttttacaagatcagatgacatcgacaaattgtccttggaagcgtcacaattcttgtgggaactctggatcagctggatcattcccatggtatatccctggatggacatctcagccagatggcttgtagatttatccgccatggctttcattttggtcatccactccgcgtattttttctgaatttcgccgatttcttccggctgttgcatgtcttttgtcatggcctgtttgacccttgaaaagaagtcttggaactgctgttcctgctgttctagacatcctttgagatcgcagtctgtgctcgcctgggtaagttccggcatggtatttaacaccatctgcagattttggtacatttcatttaataagttctgattatccataatgaatctcctttcaaatacatctgttacaggtagcatttacacaaaagagaaatattatgcaaaaaaggatcatgtgtgttaaaataggcagtaacgaaaaactagaagaagggaagtgagtcttatggggaacagagagagtttcgaggcaaatatgaggaggaggatcgaagccatccgtcatatgagcgaccacagtatctttaatgaactgagaggtacgattatagattataactatgataagaagagtctgactatggagttttatgccggagattttcatagaaatggttttaatatcatgttcggaggttccctggtagggatgtttgacataacgttcggaacgctgacaagcggtctgggtgattatgatattgcgcctacggtccagctgtccacctctttcctaaaggggattccaattggatccacggttacggtcaaagtggaggcagtatctacaggaaaaacaatcatgaattttatgggtaaagcgtttgttggggaggaactggtaggcagtgccaccgggatctttaaaactccgagaccgtttaagtcgtatcattaagcagaagggatttggttcggaaaattatttttattcgtatagaaaaagctgatcatttgcgggaaagttcgcaaatgatcagctttttaagagtgacgttccttatcagctttctgtacagcgttaataatattttcataaccggtgcagcggcacaggtttccggccatatatttccggatcatgtcccgggtcagttcctgttccccgcgttccagaagtaccgtggcagacatgataaaccccggggtacagaaaccgcactggatggcgccttcctcaataaatgcctcctggatttttgtgagttcaccgttgggtcccataagaccctccagggtgcggatctgttttccctgtgcccagacggcaagataaatacaggaatcaatggtctcaccgtccacgatgactgtgcaggcaccgcattctcccacctcacatccctttttcacagatgtgagcccgaggtgatttctcagcagttccagcagggattctctgacatccacgtattctgcaacttcacggccgttgaccgtaagggttacaagctttttttgcggttccatcctatctcacctcctgtaattctatggctctttttaaagcgcgccgggcgatctcgcctccgatttgaagccggaaatcccgtgaagcgcgccaggaatcccttggatggatctcttccctgacagactgctctatggtgtcgtagagtttatctcccaagggcatcccgcccagccgttgctgagttttttcacagcagaaggggaccggagccgccactccaaaggtgatttttacgtcctcaaggatctgtgactgatcggttttgcacagcacacagcagcttagtgtggcgatgtccatggcatttctcatggcgtatttgatatagcagccggtgtacccctcataattttccctggggatcagaatgtgggtcagcagctcgccatgttctagggcaacccgtcccggccccagataaaagtcctggatgggtacagtccttaccccgttttcaccgaggatccttaagcggacgttcaggcagaaacaggcaggagcactgtccgcactgactgcgccgttgcaaagattcccgccgatggtccccatgttgcggatctgggggcctccggcctgatcgacagcctccccgagcacggggacatgttttttgatgaccgggtcctctgtcagctggcggaaggtagatgccgccccgatggagatggtcccgtccgaatctaaggtgattccgtgcagttctttgatgtccctgatgctcacaaggctgcatccggaaagctttccttcccggatacggatcagtacatcactgccgccgcagacggggactgcattcggatgttcctgtaaaagtcttacggcatcggatatagattctgcttcataatagctggtgaaatcatacatattttgcccctccttataccagtccggcttttcttagttcttgaaataccctctgcggagagagggggatctcgttgacagcgactcctgtggcgttgagaaatgcatttcttatggccggagcagggggaatggcaggaggctccccgagagctttgtttccaaacggaccggtggggtcctcaagctccacaaaatccagatgaaggtcaggggcatccatggcagtgggaagcttgtaatccagcagggtcccgtttaatacccgcccagtttgttcatccagcagcatctgctcgctgaggccataaccaatccccatggacataccgccgtggacctgcatggaggcaagctggggattgatgatcttaccgctgtcgtggacgttgataatatcaaggattctgatttttgaaagtttcaagtccacctcaatctcggcgaaacaggcaccgaacgcgatggtattctttttgatctgccgggagatgtcggaggtgatggcagaagaggaggagcggctgtagtagctctccaaagccagttcctccagggacagtaccgattctttgccgcaccagatctgtttttctgacaatttcagttcccggtctttatattcctcagagatcaaagtcctggcatatgaaagaatcttttctctcagaagttcggcacattcctttacggcggttccgctgatgtatgtctgtctggaagcgtaggcgcctgtatcaaacggagtgatgtccgtatcctggaaggactggatgtgaacgtcctccgggcaaaggccaaggacatccgccgccatctgtgtaaagactgtgtctgaaccctgcccgatctctgccgcaccggtctggagctggacactgccgtcctggtttaagatcagcctggcgccagaaatctccagagaaatgggccatacgcctgttttatagctgaacagggccatacccactccgcgccttttatcgccggtctggttcttatataaatcacgtttttcttcccagtgtatgtaatcagcaccacgcctcatacattccctgatgccgttggtatttgccgcaatgggagtcaaaacaggatcttcaaagtatccgtcatataggttgagttcccgaaacttcaaaggatccatggaaagcttgtgtgccatatcatccatcaggcattctgacacaaaacaaaactggggaataccgtagccgcgcatggctccgcctacgggtgtgttggtgtagaccgtataagcatcggcgcggatatttttaacgtcatacatatggcgccatgcggtggcgccgtttgccgcgatggcatggccgtgggaggcataggccccctgattggaataggccttcatatccttggctaggatctttccctctttggatacacctgctgtcagatcgtactcaatggaatgccgggtccttgtgttggcgaaggtctcttccctggaaaggtcaagcttcaccgggcggccgcccaccaatgtcgtcaggaatgcattgagcggttcgtacaggacatcctgtttgttgccaaaacctcccccgatatatggctttatgacacggacctttccccatgggattccaagggcctgcccgatgactctttttacgatatgcgggatctgcgtggaactgaccaccacgatcctgtctttttccatataggcgtaggagataggagcttcaatatggcagtgctggaccataggtgtgcagaaggattccttcaggacgatgtccgatgccagaagagcttcctccacatggccgatctcgtagccgctttttgccaggatattgtccgggttttctgcatggaccggaggagagctgcccttcatggcatctctgggatgcagaacaggcggatactcctcatattctgccttgatcagcttcagggctcttgaggccgtgacttcatcctctgctacaacggtggcaatatcatcgccgtagtaacggatccttccggtcagcagatggcggtctgccacatcctgatgggactgctccacagaccatggatggcccggcgtgggatatgtatgtgttggaacttcatgaaatgtgacgactttcacaacaccgtccaaagcctcggcctcggaagtgtcaatggaagtgacgatgccgttggcgatgggagcatgcagcaccttggcaaaaagacagcggtttaaaattaaatcatctgtatatttggctctcccggtaaccttttcataagcatccactctttttatactctgaccaactgttttcataggcaattctccctttggatctcatacatctgagcatactactaaatcattctatgtccttctacggccttacttgttatatagtttgaacaaaaagtaaacgtctgtttaaatatatctatggaaaaaagtgggcatgcccactttcaaagtctgtttcatatgataaaaaagaaattagggacaaacagtgtgttgccccgggtgtcctttaaaattgtatcaaaaataatacaatgtgtcaacgaacagcaaagaagaagaggagggtcctccatggcttattttgtgtaagcctattggccggaacctcccgttgtctgtctgtattgttatttatgaaagatatatatagtggcggattcagcataaaagactttgttttttatcattcctttaagttctatggtgcggcctttttttacgtcatggatacttccttttcggtatttcgtttttgttcccatgtcataggcatcacacacagtgaccttcagatctttcctgtattttactgtgatatggatgtccgtactttccgagatgtcacctcctgtttttttgtctttataggtattgatcttggtgatggtaaaacttccggattgaatatctacgactgttccattcagctttttctttttagcagaggattcagaggtcatgatatcctcgtcgtttcccggaggatcggataggaccacgatatccgcgtgattcttcttttttgaaaaccagacagacaccttggaattctttttgacggacttaagctgggacagactgcagcgtttatacaccgtgtttatctgatgaagactggctttgtcgttttcataacttaaaaagaagaccttcgtgtcagaagtgacggatatggaagagggatccccatacgtttcgtctatgtcactggtgcagtggattgcctcagcacttccggaaacaaagtaaccgttatagtctggatttctttttggaatgtcctccccgcctatggtttccgatttgtagtgcacaaggcccagcctgtttccgaattctatataagcgatggaactggcagcagcaaatgaaatgcacccaaggatcaggctggtgacatagatgcggcgctggtcttttctgcataaggcagttagtagcttaaaacataggatccctgtgcatgctcccagcacatttaaaatgagatcatcaatatctgcggatcctagataaaaaacatattggctggtctcgaaaaaaaggctcaaaagagctgagagaagtataattttaagtttggagcctttggatcctctcagaagggcaagaaggtaaccaaacgggaggaataccaggctgttccccaaaagatttgaaaggctccataagaaatttccctgtcctgcaatacgcgagaagcttacaaaggtctggaaaggtattaaatttagtgagcggaatccctttttctctccggtcagaaacattgggagagaagagagttccgtatcttttagaagtacgattttgataaggatcagcagataaaaaataaacactgcccagaaaaaccgtttaaaatatttgtttgaattttctttcttcatagtgatctccttttaaatgtggggagatcaggcaatacaggatcattccgtctggcttatttcaagatgctggacgaatttcccgttgtttgtataggagtttaaaatgatgttcggatacttttccaatattttatgaacgatcatcagcccgttgcctcgtcccaggcctttgtccgagataccaggcaccacatccttttctttccggatagagtttgagatgacagtttcataagtgtctctatttgaaacaaaccggatatcgatccgtttttccgcagtaaactcagcttcttccatggcgttgtcgagaaagatccccagaatgcggatgaaatccaggaaatcaatatgatcagtgatcaggctttctttgaaagcgccgtcaaaggacagatggatgtccaagtgttcccgaaagccggaagaaattttataatatagaaaagctctcagctgctcatcgtctgcctgttgcagctgggcgtataaatcgtttttctttaattcactctgaaagtacgggttgaccgtttgcttaaaatactcttttaatggttcatcatggctgttctcgattagatggctcagagtaaataaaatatttttcatatcgtgttttaagttccggatctcgttcagattcttctccaggtcattgctgtagagaagcagattttcttcattcctccgttttgcgtcaatggtaaaacggtacttggaaaacatcaaaagagtgaccagaatgatgatctggattaatagcacacaaattgttataacattaatacatgaattgacctggttataaaaactggagtaactatccatataataatgtactagcagcataaaaagctgatactgaaagatcagtccgaatccaaacaacagaattgtgcagatgataaaattacgggcgatctttggataggatttttccagtatggacacctttaaaagatatttgccgaacagcctgcggatcaaaaagacaaacagagcgtcaaccagaatcacagccgccgatagcagcacaaaaatcccgattttgatcaaatactcagcctgctgcccgtttgcatagtcgaaataaaaactcatgaatgaattataaattgcccggaggaacagccggttgaccacatatagaataaaagtgatccatgaaaaaaatactttgccattctgaagttctcttctgtagtagctgatgccgaagatcagaaagaaaataaggaaatctgaaaatgcctcaatataagagggtttcgacacaaccagcaagatggcagaaaacagcagtaaataatcaggaagccgtaatcggagcagatttaaaatggcgatggataaaatggaaacaaggctcatcacaaagtactgcataaaggtggtgcctgtcatgtaaataatccgccaaaacaatatataccagatcagcccgagagcggcgggatacaggacccacatgatttttctagtctttgtttccatagatgactccttttatctcgttcctctgccggaaagaacagggagcggtgtccccgttgataaacttgatcattccgtccgagagaccgatcatatggcatttttgcacgatgacggaacgatggctcttcatgaatccgtcacccagacattctaaagcgtgatcgatggtctcccgcacggtgatggaagaaccgttgactgtgtgatagcatatgcagtgggattttgtcttgactgcttccacatacaggatatcagctttgggaagtgagacttcttcatcagtgccgatcttcaaagtaatagagtccgcatctgcctctggatcgccggacggtaaacttttttttgccagatagatatactggtagcaacattggttcatttttgtgatgtctgtggttttttcaataaagccaaaaggctcgaccccggattttagaacgtttagtgccagttcataatggttggtgacaaatacaatctttgaccctggaaaattctttttaatctgttttgcgatgtcaatcccgttaaattcattgctcccgaaatccagatctaaaaagaatagatagtcgccgggattcttttttaaatagagaaacaattcctgatagccggaggcaacacatgccacgcggccctcggagatagattctgataaaatatgttccacctgttctttgatgatctttaagataaaagggtcatcgtcacagagaatgatttctaacataaaactcctttctgtctgcctgatctctattgactcctatacaagaaccactataaaagatgaaagcaggcatgtcataaaaataacctataattacgcaaacgcaacgcgaagtaatccgtgtttgttacgttcaggacaaaaaacatgcggccaggatatttgataaaataaaacctgtcatcgatataacgattatatcataagtagaaggtatacccaaacctatgtgggtatttatggaaataaatacaatataatcaacattgcccgtagactttgcatgcattctatgctaatatattgc

SEQ ID NO: 12 - DNA, 107960 bp, Anaerostipes rhamnosivorans
tagtatttgcggcaggtggaagatattcacaagtgctttgtatggggaatttaaatggaggtttatatacacgagttaaaattaacggatcctggtcaggatggtttgcgaagtaaataggaatttaaataacaaatatattgtcacttataaataatctacataaaccaatttaagaaaataagataaagagttacaacaacagagaattatatgactatagactttttaaagaacatagatatcacctatctactcttctttcatcatccaacatatgctaaaatagaatctgacaaaacagatagatttgacaactgcatttcggaggataaatagaatggaaattaaattacttgagcaggatttttccatctgcaaactgaaggatttttcacaagcggatttaagccgggatttttgctttgtaggcaaaacggatcaggagaattccttggtgtgccccacagaatatataccccaaaatattattgaaaaagaggatggatggaaagcattccggatacaaggaatacttgatttttctctgatcggcattctggcagacatttctggtctgctggctgaaaacaaaatcggcatttttgttatctctacctataacacagattatattctgacaaagactgaaaattttcaaaaagctgtctctgtgctgagggaaaatgggtacattatcgtgtaaagcacgcccacccaaagggtatgacattttcaccagttctccggcttgctgtctcagggacgtaagattttctaactttcagtaaagcctctccggcggcccgttcggaactcgctgacgcgggggcagtctcactgcgcaatgcgcaccgcctacgagtctttacttcaagaagaaaaactaacgtcccttcgaatgcaaggcctccgaactggtgaaaatggacgtaatgtctgctggaaatggctgttgcgagacaaaaggcgccacctacgatagttttttcttcattgtcggaaggaggcctttccagagccgactggagacaatggagaaaaactattgtaagatggctccttttgtttttctgaattgcatctatcaacagatattacgtctattttctaatgagttaccaataagcctgaacgaatatgtaactcttagagaacagacaaaaaagtaaaacgatataagtcaaaagaagcccttctccagcagacattacgtccatattctacatgattggagtgaggcattctaagagccgaactgaaatcatgtggaaaatgtcataccttattatttagtaagaaaaatctggattgaaggtttggaaactttggaacaatatgatatgatggagtcagtgattccgggcagggcacagagtgctctgttgattcgggaaagagattagggaagaaaggaacgacagatgttagacggaaaaaaatcattattcagtggcatgcaggccacagggaccatcacattaggaaattatttaggagctttaaagaactgggtggatatcgacaaagatgagtacatgtgcttttacagtgttgtggatatgcattctatcactgtcagacaggacccgtcagagcttagaaaaagagccaggagccttttggcactttatattgcggcgggactggatccggtagaaaattgtatttactatcagtcccatgtttcagcccacgcagaacttatgtggatcctgaactgctttacctatatgggagaaatgaaccggatgacccagttcaaggataaatcccaaaagcactcagacaatattaatacaggtcttttcacttaccctgtgttgatggcggcagatattcttctgttccagtccgatgtggtgccggtgggcaaagatcagatgcagcatctggagatcacccgtgatattgcggagagatttaataagatatatggggatgtgttcacgattccggaagcgtacattggaaaagtggggcagaagatcatgagtctgcaggagccggaaaagaagatgtccaagtccgatgaaaatgccaactcccatatcctgcttttggatgacccggatactattatgaggaagtttaaaaaggcagtgacggattctgaggcatgcattgcttattcggaaaataaaccgggaatcaaaaatctgctggatatttactgctctatcaatggcaagactccggaggaagcggtagctgagtttgacggaatgggctatggcaagctgaaagaacgagtaggagaagtggttgtggaagaacttcgtccgatccaggagcgttacaaagatattatgaaggacaaagattatttaaacatgatcatcaaggacaatggggaaaaagcatcttattatgcaactaaaaccttgagaaaggtacagcacaaggtaggtttcccagaccgcatccgctgatttgggaccgggaagaattgatgatgaaagatccggggaaacggtttaagacagccgtttttgccggatcttttttttgtgtagggcttgcccggtccgttcttctgttaaacggctttcctgctttgttttgccgggattctgaaaaggcaaatgtatcttgcagtggacaagcgcttttgatataattctattatcatttaatgcgcgtaagcgcagttttggcgtccagggttgggatgccggacagaaggaggaaggttcatgaagaaaaagattttgaaagtcactggcatttttttgtctttggttcttgtcatgggtatgatggcgggctgcggttccaaaaagacaacaagcgacaagaaagaggagaagaagcagtttaagatcgctaaaaaagatcttaagatcggtgtgattcatatttcagatccatcagagggatcaggatatacttacacacatgatcaggggattgtagccatgcagaagaagcttggcctgaaagacaatcagattgtccgcaagaacaacatcacagacactgatccgacaaagacagagactgctatcaaagagtgtatcgaagacggatgtaacgtgatctttggtacaagctggggttacatggatacgatggaagccatggcaaaggaatatccggatgtagttttttcccacggaaccggatacaagaagaatgattccaactttaacaattatttcggaagaatctatcaggcaagatatttaagcggtatcgcagcaggacttaagacaaagagcaataagatcggctacgtggcagcgatgggcaaggacaacgctgaggttaccggcggtgtggatgcatttgccatgggtatttactcagtaaataaaaaggcaaaagtatatgtaaaagttaccaacagctggtttaacccaaatgaagagaccaatgcagccaaagccctgatctcacagggatgtgatgtgattggacagcactgtgatacaccgaatcctcagctggaggcagaaaaagcaggtgtatggggagttggatacaattctgacatgagcaaggatgctccgaaggcaaccctgacatcgacgatctggcactggggtgcttactacacagaagcagttcaaaagatcattgacggaacatggaaacctgaagtatactatggcggtatgaaagaaggactggttgacattgctccgctcaacaagaagctcatcgctcctggcacagagaagaagatcaatgaagcaaaggagaagatgctttctggagactttaatgtatttgacggtgtcattgagaccaacgacggcaaaaaagtcggcaaaaagggcgagactttgagcgatgaaaatatcaaaggcaagatcaactggtactttaaaaacatcgttgtaaaataggcagcgcagaagtaatttccatggacagcatggatgaaaaagaagggcattgtagattctgtaacagaaggcagtgcccttctttcttggaacttattgaagaaaaaagagaggcagagaacacatgatacgaggtgatgaaatggcacaggataaaaaggatacatatgccatagagtgcagaggcatccgaaagaccttcgggagtgttgttgcaaacaacaacgtagatctggatgtaaaatatggtgagatccttgccctgctcggagaaaacggatcaggaaagacaacgctgatgaatatgctctccgggatttaccacccagatgccggaacgatcaagatcggaggacaggaagtttccattaattctccgacagacgccatcggtctggggatcggcatgatccatcagcactttaagctggtagatgtgcacagtgcgatggataacattgtgcttgggacaaaggaaaagagaatccgtccgaaagagctgaagtcgagaattgaggagatcagctctaagttcggattagaggttgatcctgaaaagaagatttacaatatgtcagtcagtgaaaagcagacggtggagatcttaaaggttctctacaggggagcgagcattctgatcctggatgagccaacggcggtgctgactccccaggagacggaaaagctgtttgcgatcctgagaaggatgaaggaacagggatgtgccattgtcatcatcacacataaactgaacgaagtgctggctatcagtgaccgtgtagccatcctcagaaaaggggagagcattggcaccgtgcccaccaaggaaagcgatgagaaaaaattgaccgaattgatggttggaaggcccgtgacactggagatcgagcgtccggagaaaaaggcagatgcaactcctgaaattatcgtaagaaacttgagtgtggaccgcccggacggcaccgctggactgtctcatgtgaactttgacctgatggagggtgagatcctgggagttgcgggaatcgccggaagcgggcagaaagagttatgtgaggccatcacaggacttacccagatcaaagaaggaagcatcatccaccggaaggaagagctggtgggtatgacctttaaagatatccgaaccagaggcatccgcatctcttttgtgccggaggaccgtttaggtatggggcttgtggcgtctatggggatggtagataatgtgctcttaaaacactatcaagatcagaaggggatttttatcgaccgaaaagccccgaggaagatggctgagaagatggtagaggagctggggattctgactccgagtgtggacgcgccggtgaggatgatgtccggaggaaacgtgcagaaagtactgttgggaagagagatcattgcggagcctaatgtactcctcacggcttatccggtgcgtggtctggatatcaattcatcctatacggtctatgatttactcaacgaacagaagaaaaaaggagtggcagtgctgtttgtgggagaggatctggatgtcctcttatccatcagtgaccgtatcctggtgctttgccacggagaagtatcggggattgtagatgccagaaaaaccacaaaagaagaagtcggacttctcatgaccggagtaaaagaaccaaaagaagaaatggaggaaagcacagatggaagcaagtaagaaaacaggaaaagaaccgtttctccgtaccgtcaagagagcggagctttcccggaagaagacgatgattctgcgcgttgcttctgtactgcttgccctggtggcaggaggaatctttcttttgatcatcggattcaatccctttacggtttatcagacgatcatcagcggggcttttcgaagtgaaatggcagctcaggcgacgatccgtatcatgatcccattgctgatctcttctctgggtgtcactatggcatttaaaatgagattttggaatatcggggcggagggacagatcatcatgggagctatttttgccacctattttgctctgtaccaaaatgccatgccacatgtcctgctgctgatcgttatgtttattgtcagtgtcatcggcggcggactgttcggactgatcccggcattttttaaatcgaagtttaatacaaacgagacactgtttacactgatgctgaattatattgcattgaatgtgatcgtttacctcagggacggcccatggaaggacccggcatcttcaggatttccaaagatcgcaagatttgatatcaacgcgcagctggacccggttttcggtgttcaagccggatggatcattgccctggtgctcacggttatcgtatatatttatttaaaatacaccaagcagggatatgagatctctgtcgtgggagacagccatgccacagcaaaatatgcggggatccctgtaaaacgggtgatgctgcgcacgatgtttttaagcggcgctgtctgcggcattgccgggatggtacaggccacggggtctgatatgacgctggccacctcggttgctgggggagtcgggtttacggccatcatcgtagcatggctggcccgcctgaatcctatgggtattgtgatcgtttcattcctgttcagtatcctggaaaagggaagcagtgtcatgcagtccacctatggactttccagctattcggcggatgtactgcagggaatcattctgttttttgttctgggatgtgaattctttgtacgatataagtttgtggccagaaaaggaggtgccggtaaatgaatacggtattaaatctgtttgttgcggcagtgctggccggtacgcctttgctgttcggcacagtcggtgaaatcatgaacgaaaaggtaggacacctgaacctgggtgttgagggaatgatgtccataggggcatgtgcaggttttatggtcggataccagacggataacgtggtatttgccctgctggccgcctttggggccggagtgcttgcagcattgatctatgcagtcttgaccatcactttcatggcagaccagaatgtaacgggtctgacgctgacaatcttcggggtagggcttgcaaatttcatcggggaatatatgctggatcattctacgacccagtcactaaagcttccggaacatatatctgcacagattgcgaatctgcatatcccggtcctcagtgacattccggtgctgggaaagctgctgttttcctataatatctttgtgtatatcggtttagtgatcgctgtggcctgctggtattatctccagagaacaaaagcgggcctcaatgtgcgggctgtgggtgaaaatcccggagctgctgatgctgccgggatcagagtcatccgggcaaaatatatcaatgtactgatcggcggcgggatctgcggaatcggcggagcatattccgctatgatcatctgcggaggtgtttggatcagcaactgcgtcaacggattgggatggatctccgtagcgcttgttatttttgcatcgtggagtccggtaaaagccatttacggatctctggcattcggatgtttcagtgtcctgaaatattacgtgccgaaaagtatcatcagcataccaaatgcgatttatgacatgcttccgtttgtgatcaccgcactggtccttgtggtctcctccatcaggcagtccaaggaaaacaaccagccggcatcctgcggaaccaattacttcagggaagaacgctgagcagaaacaaggaaacggtacgaaaaactctatgtgaacggactagttctgtccacatagagttattttatttcataggaaagtgcgactatgaaataaaaaacgttccgcgagaatcgcactgcggcggtaaggaatcatgtcgccaaagcgacccgccgcaggcagagaatcccgcaagcgggattctttcttatttcataggatttcataggaaattgccgttatgattttatctttctgtaatgcataactactacaagcagggtgctcgccatgagtccccagagatatccgttgatcccaacgtacggtaccacaaaaacgataaacgcaatcctcagcataagagagactgagttattaaatagggttgtttttgtctttccgaggccatttaagatgctggatagtgtcccggacaagtaaaggaccgggcagaggaaggaaagcatccgaaggaacatgcctgctttttcactgtggaacacgatcactccgatggagggccccaaggcaaagaacaaaaagaaacttacaatcccaaggagaaaacagaaggaaagagagtattttgttgccctatgtaatgtttgatagtcctgttctgccgttgcggctgaaaccttcggcagcagcatcacggaaatggagttggtgatactggagggaaagttgataaaagggatagccataccggtcaggataccgtagatctccacggaatagtgctgattggcataaaaacgggtcagcattagtggaatcaggatattttccagactctggagcagcgtgatggacagtgagttgcaggtcagggggaaacttaaggacagaagattgcccagaagctttctggaggaagctgccggcagtctgcttttttggcgctttaccttcaatagatggtagatgaccgtatagaggcaggaagccatttcacctgcgaccattcccagcactgcgatcaatgcaggagtttcaagctttaaaaagaaagtaacggagatcgcgtagatgcctaacactcttgatatctgttcaatacacagtgagacagagggaagtccgggcttgcccagccctatgtgatagctgtggatgcacgctttgatccctacaaacggcatggcaaagacggcggctttaaggcaggggatacagtccttttcgtggagaaatttcatgcatagttcatccgcaaagaaaaacaggaagcaggcacagatcacggacagcaggattgtgacggacaaagtgatctttaaaatttttctgcagttttctgggcgtcctttggccatctgggcagctacgatctgtgacaatgccgtttcatagccgtggaagcatagggcgaatccgaccagatagatcggaaaaattaattgatagactcccatttgatgggcaccaatcaatccagccagaaatattctattatagaatccaatgaatctggaaaaaatattagcggctgttaaaattaatgtaccttgtacaaaagggctggattttttcatatgaactcccccattgttattgttttattgtatgttaagaaatacgcggttatgattgggattgtgttgacattggaagccccaaatgataacatagcaatgtgatatccgactattttggtcgggattggagtgatgagatgaaattatcaacaaaaggaagatacggccttcgcgccatcgtagatattgcagtgttcgcagagacagaacctgccgcggtcagcgcgatttcagagagacaggatatttctatccgctacctggaacagctgctttcgaagcttcgcaaagctggacttgtgaggagcatccggggagcccagggaggatatgtactgtccagaagtgcaaaagagatttcggtgggagatgttctgagggcactggaaggcgatcttacaccggtagactgtacggaacttactgatacagaggagacatgcagcagctcaaagtactgcgtgaccaaaactgtatggaagaggatcaatgacagcattgcaaagaccgtggatgccatctatctgagtgagctggcggatgaggcaaaagctgttcagcagggaaaaccggcagaaagaaaatgtgaaagataggagtagttatggagaagatcatatatttagaccatgcagcaacaacaccggcaaggccggaagtagtagaggcgatgatgccttattttacagagaaattctggaatccgtccagtgtgtactcaccggcgtctgaggcaaaaaaggcagtaagcgaagttcgtgaacggatcgcagacagtcttggtacccagagccaggatatttacttcactgggggaggctccgaggcagataactgggctatcaaggagacagcggaagcctatgcgtccaaaggaaagcacatcatcacaagcaagatcgagcatcatgcagtgcttcatacctgccagtatctggagagaaatggatatgaggtgacctatctggatgtggatgagatggggtatattaaactggatcagcttaagaaagcgatccgtccggatacaattttaattaccattatgtttgcaaacaatgagattggtacgatccagccggtgaaggagattggcgcaattgcaaaagagcacggaattctgtttcacactgatgcagtacaggcatacggacaggttccgatcaatgtggatgagatgaacattgacatgatgagtgccagcggacacaaattaaacgggcctaaaggcatcggatttatgtatatccgcaaaggacttaagctgcgttcctttatccatggtggagcccaggagcgcaaacgccgggcaggtacagagaatgtgaccggtatcgtgggacttggcaaagctgttgagattgcttttgagaccatgaaagagcgcacaggcaaagagcaggagctgagagattacgccatcaagaagattctggcggagatcccgtactgccgtctgaacggaggaagagaacaccgtcttcccaataatattaatatcagctttcagtttattgaaggggaatcccttttgatcatgttagatatggcggggatctgtgcttccagcggatctgcgtgcacatctgggtcactggatccgtctcatgtactcttagccatcggacttcctcatgagattgcccatggttcccttcgaatgactttgggagaagagactacaaaagaagatatggattttgttgtggagaagctgaaagagatcgtagataagttgagaaaaatgtcaccgttgtatgaagattttgtaaagaagcgttagaaggcgcagatgaactgaatatataatagaagaaaaaacaggaggtactgttatgtatagtgaaaaggttatggatcattttgaacatccaagaaacgtaggagaaattgaggacgccagcggtgttggtactgtagggaatgccaaatgcggagatatcatgcgcatctattttgacattgatgatgatcagattatccgggatgtaaagtttaaaacattcggctgcggggcagccgttgccaccagtagtatggctacagaactggtaaaaggtaaatcagtgcaggaagcgctggaagtcacaaacaaagcggtgatggaagcgctggatggtcttcctccggtgaaggtacactgttctcttttggcagaggaagccatccatgcggcactctgggactatgcggaaaagaacggcattaagatcgaaggtttaaagaaacctaaatctgatatcggagaagaggaagtggaagaagagtactaggaggcatccgtgaaagagaaagtagttgtaggtatgtcaggaggggtggattcctccgtggcagcctatttattgaaagaacagggatatgaggtcatcggtgtcaccatgcagatctggcaggatgaagaacaggctcttttggaggaaaacggagggtgctgcggcctgtcagctgtggacgatgccagacgagtggcccaggcgcttgacattccttattatgtgatgaattttaagcaggactttaaggaacatgtcattgactattttattgaggaatatctggacgggcgcacccccaatccgtgtattgcatgcaaccgctatgtcaaatgggagtctcttttaaaaagatctttggatatcggtgcggattatattgccaccggacattacgcgagaatcgaaaaactttccaatgggcggtatgccttaaagcggtctgcaacgcttgcaaaggatcagacatatgccctatataacttgacacagaaccagctgtcgaaaactctgatgccggtaggcgaatataccaaggatgagattcgggagatcgcagaaaagatccatcttccggtggcacaaaaaccggacagccaggacatctgttttgtggatggagactacggagacttcatcgaggaagagaccgggcggaagataacggccggcaattttgtggacatggacggaaatatcctgggtacccataaagggatcgtctcctatacggtcgggcagagaagaggtctcggcctttccctgaaacagccggggtatgtggtgaggatcgacaaagaaaagaatgaagttgtgattggcagcaatgatgacttgatgacagatgttttatatgggaatcaactgaatctgatgtctatcccttctctggaaaacggaatgagatttgtggccaaggtccgctataaccacaagggtgctccgtgtacggtgcagatggccggcgaggataagatccaagtccggtttgatgagcctcagagggctgtgactcccggacaggcagttgtgttctatgatggagattatgtggcaggcggcgcgacaatcttataatgtgaattggagctttaatcgtgatgagtctatattatcttttgtcctatttttttatttatggttttctcggctggtgcagcgaagtcgcatttgctgcattgaaagagaggaagtttgtaaaccgggggttcttaaacggaccgatctgtccggtttacggttttggtgttggatttgtggtttctctgctgatgccgtataagtccaatgtttttttcatgtacatcggttcggtcatcgccgtgtcagccattgagtgggttactggtttcgcgctggaaaagatctttcacagcaggtggtgggattattctgaacagccgtttaacctaaacggatatatctgtcttccgttttccctgatctggggagtagcctgtatgctcatcgtgtatgttctgcatccgctggtcaccagaatggtgggattcatccccgggcttttgggcaatgtgctccttgttgtttttttggcaggtatggccgcggatgtctgggtaacggcggcaggtatctttaagatgaataggcggctgcgcaagatgagtgagatcgcggatgaactgcacaatatctcagaacagctcggagaaaacatctatctgagtgtcatgacagccgtggaaaagcaggaagagacgaagaaaaaactggatgaagcgggtcaggaactgaaggaaagaaagaatgctgtccaggaagaactgaaagagcgcagagagaatctgggcggagaacttgaacagcgggtggaagaactgaaagaccgataccaggagatcgcgggtaagaagagtcagaccagcagacggcttctgaaagctttcccggcttttgattccaacaaatacaaagaggcattgaaagaattaaaagagcggatgaaaaataaatagcagacagaaatgaaagaggactgtgatctctgaaattgagatcacagtccttgcttttatgtaagtttaaaattgtcccggtcagctagaatacagcgaatgatgtacgcgataccgtcctttgtgttggcccgggtctggtatacgcagatatccttgatggcctctgtggcatttgccatggccacggaatgaatcccagggatagaaagcatagaatagtcattctcgctgtcaccgatggctacaatctcatcaggaacaatgccttttctgcccgcatagtccatcaggccgattcccttctgtgcttctacggatgtgatctcgatgtcggtaggtacggtggatactacggcaagcccggggatcttttccagctcagcacgcagtctgatcagtgaatctgggtctgtagactgggagatcaccttcaaaactcggtgttcactgtgaaacagaccgtcttccccgtccacatatgtgacctggctgaccagttcttcaaaatccttgtctgtatatataaagtcaggatggttgatctgcatggccgggatcatgacatcctttgtgtactgctttaactcttctttggacagtagggaaatgcgtcccatctgagaaaacggagtcggcaccagatcaaacttatgaaacgtctcaaagatctgttttacggtctcctgtggaatggaatgttcaaacagcagatttccctctttatcataaccgcaagaaccgttgctgcagatcatatcacactgaagtcctgccttttctaaaattccggtcacattttggtattctcgtccggtattgatcgtaaattcgacgccgctgtcctgcagggtacggatggcatcaatattgacctgggtgatctggcggtagctgtccagaagcgtcccgtccatgtcagacgaaattaattttatcatgatagaacctccttgatgttcgtaattttgtaaaatgaatcaatattatactaccataaatgtcagaagaaggacatagtttcataaatccttaaggttttcttgctttttattttacatagtgtgtgatataatacaaaaagttgtgttgggacagatcccagcaattgtcattgtttttaaaacaaaggagttcatatgttaaactttattcggggattttgtatggcgctggctgacagtgtaccgggagtgtccggcggtaccgtagcttttctgcttggattttatgaccgtttcatctcatcccttgacgatctgatcacaggaaataaacaaaagaaaattgaggcagtgaagttcctgtttcgtatcggtgtgggatgggttgtaggcttcggtgcggcagtatccatactcgccagtatttttacagacaggatctatgaaatcagctctctgtttttagggttgatcatctttgcgataccgatcatttgggctgaagagaaagactgtcttaaagggaaatataaaaatgcagtatttgcggtcatcggcatcgttatggtcgctgccatcacctatttcaatccggcgtcaggaaaaggcatgaacgtaagtgtggagcatctgaacttaggactcggcatatacatttttcttgtggccatggttgccatatccgccatggtgcttccgggtatctcaggttctaccatgcttttgatctttggtttatatgtacctatcatatcagcggtaaaggaagcaatgcattttaatacagcgtatttcccggtgatcctgatctttggctgcggtattctctgtggtattgcatccgtcgtcaaattgatccgcacttgtcttgagaagtttcgctcccagatggtatatttcatcatcggtatgatggttggatctctgtatgctatcagcatggggccaactaccttagaagtgccgaagcctgccatggcagtgggcaatttcagttttgtgttctttatcatcggaggagtcatcatctttgggcttcagaaactgaaagctatgtctgacagggacgaagcggcagcaggggtttcagaggcagaatagaaatcaataaaagtcttagacatcagcattttgagggctgatgtcttttttttcacaattttatcataaacctgtggtacactatagattagaaaatatccgaaaatggaataatatcgcaggaggatcacggatgaacgatttaaaaatattagtagtggatgatgagagcaggatgagaaagctggtcaaggattttttaaaccgtgccggctatcaagtgctggaggctgcggacggtgaggaggcagtggatgtattcttttctacgaagggaatcgatctgcttgtattagatgtgatgatgccgaggatggacggctgggaggttgtacgggagatccgcaaggtgtctgaagtgccgattatcatgttgacggccaaagaccaggaaaatgatgagctgcagggatttgaccttggagtagatgaatacatctccaaaccgtttagcccaaagatcctggtggccaggatcgaggccatcttacggaggacaaagcagcaggatggggaagtgttaaaggcaggcggtattgtcttggatgaggctgcccatatggtggccatcgacgacaaaagcatcgacttaagctttaaggaatttgaactgttgtcttattttatgaaaaacgagggaagagccctcacaagggagaatattctgaatcaagtgtggaactatgactattttggggatgccaggacaatcgatacccatgtaaaaaaactcagaaataagatgggaaacaagggatcttatattcataccatctggggcatgggttataagtttgaggtacaggaataagtgaaagaaaaaatactgaagaaccaatccatcaaggtgaagatgacgctggtgctgatcgtgatcatggcatccacgatccttctctccatctgtattaacatcttgatgatcgaaccatactatgtgtttaaggaaaaaaagaatattacccatgtatatgattctatcaaccatctgtttaatacaaaaggagcccgcaataatacttacaagatttccaaaattgtaagggagtacaattaccggatgatcatcgtcgacaatgcaaacggacaggtgatatattcctcagaaggcaaacaggggctgatgtacaatgatatgatcagcaccttggaggatatgggcaaaatcaaaaaacagatcaatgaggaggggtatgccgtagtatccggctcagacaaggaatctacaggaacaagtatcaatcttctaggctattttgacaacggttatgcggtggtcatcaatacccctatggagagcatccagaccagtgcggtgttgtcggggagattcactgcatatgtaggtgcgctcctgatcgtggcgggaggaatcgccatgtatatttacagcaagcagtttacaaggcccatcgaggagatggcggcggctgccaaccggatgagtaatctggattttgatgtgaaagtgatggactgcggggaagacgaactggggcaccttggggagagtttaaatgaactttcttccaaactggagtataccatctcggagcttaagactgccaacaatgaactgaggcaggacatcgagcaaaaggtacagatcgatgagatgagaacagagtttctatcccatgtatcccatgaactgaaaacgccgatcgcgctgatccaggggtatgcagaaggtctgaaggacaatgtttctgcagatgaggagagccgggaattctactgtgatgtgattgcggacgaagccaaaaagatgaaccggatggtacagaagctgctgacattaaatcagatagagttcggcaaccatcaggtcagtatggaacggtttaatatccaggagctcgtgcagaatatgctgtctgccaatacgatattttttgaaaaagaaaatattacgatagagtttgatgagccgccgacttacgtgtgggctgatgagtttatgatcgaagaggtgtttggaaattatctgagcaatgccagaaaccatgtatataagaacggaaagattgccatcacgttcaagcagatcgggcaagatctgcgggtgacggtgtttaactctggaaatcatataccgaaagaggatctggataagctctgggtaaaattctacaaagtggataaggcaagaaccagggaatatggaggcagcggcatcggactttctatcgtggctgccaccatgaaagcccacggcaaagagtatggagttgccaatgtggagggcggagtggaattttactttgatgtggattgtgcaaatgcctgaaaatgtgataaaatagtgcatatttcacatggaagcaaaggagcggcatatgttaaaagattatgttagcaggatacaggatgcggatatggttctggtgggcatcggaccggaactctccgcacataaattggtggattttaaaaaagagatcacaaatgagcattatcagaagcttttagagatgaacgacggggatgacaatgtcagatggatgaggcaggtctatgagcgctttcatctactgaaccttgttcaggtgccatatttcaaagttctggaggaggcgctttgccaaaagaactattttgtgatcacaagcaatgacgacggactcatctttcaatcaggtcttgagaaaggccgtctggcggctccctgtggcagtggggactttttccagtgtgaggagccgtgcagcgagcaattatatccggcaaagctggggcttgaagacctgatctgccactatgagaatacaggggagattgagcgtctggaatgtccaaagtgcggaaaaccgctgatatttaatattcgtacggaggatacgaagagcacttatattgaaggggcttatctgaacagctgggcagcttataccaagtggcttcaggggaccttaaacaaaaagctttttatccttgagctgggagagggatttaacgtgccaagtttgtttcggtggccgtttgaaaagatggctttttataatgagaaagcatatatggtgagagtgaaccgtactctgtatcagatcggggaagaattgaaaggtaaagcagagtcggtaaagatggacagcagagattttctagggattgagaggtaggatatggtagcgattattgattatgatgcgggaaatatcaggagtgtggagaaagcagtccagtttctcggtgaggaagccgcgatcacaagggacaaggaacagatcctaaacagcagccacgtgattcttccgggggttggggctttcggggatgctatggaaaagatccgccaatatggactggaggagactatccatcaggtggtggaaaaagggattccgtttctggggatctgtctggggcagcagattatgtttgagaagagtgaagaagcgccgggagtgaaagggctgggacttttagaaggagagatcgtaaagatccccaaaaaggatgggcttaagattccgcatatgggctggaataacctttccatcaaggaaggcgcaaagctgtttaaaggagtccccgatgattcttatgtatacttcgtacattcttactatctgaaagcttcagatccggatattgtggcggcttctacagagtactcagaggtcatccatgcctctgtggagaaagggaatgtgtttgcatgccagttccacccagagaaaagcagcaccgtaggacttcagattttaaagaactttatttcactgtaggaggaaaaattaatgcatacaaaaagaatcattccatgtctggacgtacataacggccgtgtggtgaaaggggtcaattttgttaatttggtcgatgcgggggatccggtagccatcggggcagcttatgacaaggcgggagcagatgaacttgtcttcttagatatcacagcatcctccgatgccagaaatatcatggtggatatggtaagaaaggtagcggaaaccgtttttatcccgtttactgtgggcggggggatccgaactgtagatgatttcagagcaatcttgagggaaggcgctgataagatctccatcaattcttcagccatcaatactccggatttaatcagcgacgcggcagataaattcggaagccagtgtgtggttgtggccattgatgccaaacggcggggggacggcccgggttggaatgtatataagaacggcggaaggatcgacgttggcctggatgccgtagaatgggccaaagaagcagagcggcgtggagccggggagattcttttaaccagtatggactgtgacggtaccaaggcaggatatgataatgaactgaccagagccatcgcggaagccgtggatattcctgtgatcgcatcgggaggtgcagggactatggaacacttctatgacacactgacagaaggaaaagcggatgcggcactggcggcctccctgttccattttaaagagatggagatcatggatttaaaagaatatctggatgacagaggaatcagtgtccgcaggtaaaacgattgacagttccatccagttatagtactgttgtgtcatagtaatagtacaatgatgataggagggatggagatgaaaaaaacattttatacggccgttgtgatcctgtttgcagtcagtgtattttctggatgctccgtaaaacaggagccaaaaaagaaagagaccacaaaacaacagacaaagatcagcgaagtcagcaaagcacagaagatacagattatatccctgaaagaacagaagactgtggcggacataaaagataaagatgagatacgcgctctgctcgaagatctaaagatcgaccagtgggagacggtgaagtctgttcccgagggagcagaggctgtttaccgatgtgatctgtaccaggcagggacccagaagctggatcaaaagaaaccgggaagcgtgaagaagatggggtccttgacgttctatgaggacggtccgtatgtgtcaatgaaaatcctatccttccggctgaactttaagatcccggtggatgcggtacagatccttaaaaagctttaatttaaaagaaggcctgcaggccttcttttttaatactctttattcaaaaatattctgcatgagatacggtaggatccaagggaaatcatcagtatgattgggaccggcaggaattttccccagccctcaaacaagcccagtattgattttatcggcagattcaagaatattacagcttttccaagaaggatgacgatcacaaagatggaagcaaatacgccgaacattacaaaccgtcctttttctgtgccaaaccggtaggcgatgggatacataagggacatcataagaagtcctatggtaatacccgcataagctgtatagaagatttcctcataagccaggggtgcctgtttgatcagagtcacggcaaaggataaaacaataccgaatatggtgcctaaggccaagaggactgtggtaataataaacttgctccggacgcagtctctgggttccactgggagagtcagggaataggcatcccagtgatagtaatcgtcatagctgatgagagacaaacaaaggattgaaaacatacagggcagcgcagaggccaggaaggagtaactttcgttgaagaaagtgatacctgtaaacataatgacgatcaaaatgagattttttacataggactgcagcagaagcagttccttttttaataagccgatcatattttttcccccttaatatataaaagcatcagattctcaattgttatcttatcaatcactgcattttggtaaagacggcggatcttatgccggtcttccaccagcacttcataattgtaacggtttttgcggtagcggatcacatcagaagcttccaacatgtgaaattgtttttcgtcacactttaagatgccgtagccgtcgagaatctcgtcccttgttttaaagaaaagcatggtcccgttgtctatgaaggccagataatccgcaatgtgttccaggtcgctggtgatatgggtggagagtaaaatactgcattcctcgttgtaaatgaagtcctgaaaaatatccaggatttcgtttcttaccaccgggtccagcccgctggtcggttcatccaggatcaggagctttggatggtgagagagagctgtgaggatttccagtttttttctcatacccttggacaattctttgatcttttttgacggatcgatgccaaaacgtgacaggtaatcataaaaaagagaggaatcccattgtttataaacacctttcataatagtatcgatggacttcacttttaaaagttccataaagaagctgtcatccagcacaacaccaatgtccgctttgatctccttcatgcaggtccgggtatcctttccgaagatatatacctcaccctcttcaggatggaccaatcccagcattcctttgatcagtgtggtcttgccggcaccgttctcaccaatcaatccgacaatggagcctttcgggactgtcagatccacctggttcaaacggaagtctgtgtaggattttgtcatatgtttgatctctatgttattattcatggcgtccgccctcctcatataggtaggaaagaatttcatctaattcttcctgtccgattccatatgatattgccatatgtacggcattgattaagtgttcctcgatttttcttaaaacttcttccctgagcagttctgaactttttgttttgacaaagcatccctttccggggatggtttctataaacccttccttttccagttcttcataggctcgtttggttgtgatgacgctgatccgcaggtcttttgcaagagagcggatggatgggagcagctcccctccggaaatttcgccggacagaattttttctttgaagctctctgcgatctgttcgtaaatgggcaggtcactttgattgcttattatgatattcacacggcacctcctatctgtatatatacagtatatacggtatatgcacagttgtcaatacatacataggaaaaaccgcactagttgtatttataggatgaatatgttttaattaggaaaggatcaacagacagaggaggaatcacgatgagcaaaagagaagaagcggtcagaagacacaaacaaggatataactgtgcccaggcagtagcttgttgttactgtgaagagatgggcatcgatgaacggacagtgtttgagtttatggaggggtttggtcttggtatgggaggcatggaagcaacctgcggtgcagtttcaggagcggtcgcagtcctgggaaggctgaacagcacaggaaatcttggaaaaccggattctaagggtgccacgtatcagctgacaagagagctggtgaggcgttttaggataaagaatcaaagcacagtgtgcagagaattaaagggaatgaccacaggtacaatgatcagaagctgccagggatgtattgaagattctgtgaagattctggaggatatcctcgacagaatggaatagggatctgcatcatacaggcagcagcgggaggaggttttcttgttatttaaacaattaaagtattttacagaggtaataaaatgcggaagcttcacggaagcggcagagaggtgctttatatcccagtctgccatatctcagcagatacgggctttggaagaaagtctgggcgttgagctgatcaagaggaagaacagaaaattctcgatgactcccgccggagaatacttttaccggcatggcctggtactgctggatgaggcagaacggctgaaaagagagaccgtgcggatcggcagccataaggaggaacagctgaagattggttatctaagatgctacggaggcatggaattccgacaggcagtggcagttttttcagagaaatatcctgaattagaactggagatcgtcacaggcaatcatgaggaattatatgatctgctgcgctttggaggagttgacttaattctcaatgaccagagaagggcattttccgaggaatatgaaaattatcaactggtcacaagcagctgttacattgagctatcagagaggagcgcgctcagcgcgctgacatacgtcactttggaggacttacggaagatcccatgtatcctggtggcctcagaggatcagcaggagagagaaaaggatcattatgcaaaaactatgggatttcctgataactttttatttgcggtgaccttggaggaggggaggcttttggcggcagctaacaaaggcttcctgccagtagaagggacatcggagggggcctctaagccagaacctgcaattcgccgtatcccgctgtgccgggatggaaagcagataaaaagaaactactgtgctttttggaaaaaggaacggaccggctattacattgaggagtttgcagaaatcctgcgccagatgtttttgaagaaacaagaacaataaagacagatataaaggtatgaatcacagctcttgaatttatcgacagattatgataatataatgacatacaaaagagaaaaaacagcagtctgtaatttttacagactgctgtttctatttatacctacaatgaagaaaaattatcgtaggatggcaccttttgtttagctgtcatccttatccagcagacattacgtccatgttctacatgattggagtgaggcattctaagagccgaacggaaatcatgtggaacatgtcataagttttttacggctgctgagagcatcagcttgatccggttgatctggttgacttcactggctccgggatcgtagtcgatggcaacgatgttggactcagggaatgcctggcggagttctttgatgacgccctttcctaccacatggttcggcaggcaggcaaacggctgtgtacatacgatatttggtgcgccgctgtggatcagctccaccatctctccggtgaggaaccagccctccccggtctggtttccgatggaaacgaacggtttggcataggctgccagatctttgatgtaggcgggctcgtcaaaacgtttgctcttagagagctctttgcgcagggtctttctatactgttccaccacccagataccggagttgcagatgatggctgtcttcttagactttccaagatatcggtatttgaagttgctattgtagaaaccgtacataaagaagtccagaagatcagggacaacggcctcggcgccttcccgttccagaagctctaccagatggttgttggcatccggcaggaatttaacaagaatctcacctacaattccaactctcggttttttctcgtccgtcaaaggaatctcatcaaagtcccggatgatgcctctgatgttctttgagaatgtggtcaggctgcctttcataacatcacgtttacacttggcttcccagcgtttgtgaaggcggtttacggaccccttttccttttcatatggacgggttcggtaaacgaccctcataaataaatctccatagacaatggcctggacagcccggtttaataggccgggagagagtttaaaaccgctgtttttctcaatcccctgggtactgatgccaatgaccggaatatgcccgtatccggcattctgaagcgcccgccggatgaagctgatatagcttgtggcacggcagccgccgccggtctgactgatagccagggcaatcttatctgtatcatatttgcctgacaataaagcgttcatcagctgaccgatgacgatcagggacggataacatgcatcattgttaacatacttaagccctgtattcacgtctttcattccgccctgttttaaaactttgaccttatatccgcaggattttaaggctggttccaacatagaaaagtggatcggtgacatctgtgggatcaaaattgtgtattcttttgccatttcttttgtaaattctatacgcttcatggcagcagacaccggttttggttcaatgttatgtttttttctgacgcggaccgcactgatcagagatcggatcctgattctggctgcgcccaggttattaacctcatcgatttttaacactgtatagatccttccggagcgggtgaggatctcgttgacggtatcggtggtaactgcatccaggccgcatccgaaggaatttaactggatcacttccagctgcttgttggatttggcatagttggcggcaccatacagtcttgagtggtacatccattggtcagatacattcagaggacggtctaccttggataaatgggaaatggaatcttccgtcagcacagcgatgccgtaggagttgatcagttcagggattccgtggttgatctcaggatcaatgtggtacgggcgcccgcagagcacaataccggtccgcccggtttccgccagataggccagaacttcttccccctggttctgtatgtcttttctcacatgatccagttcatcaaacgcagccctcacggcctcgttaatctctggcgcagtgatgccgtatttctcacccaattcctcaaaaagtcttggtttcagagcttcctggttatccagggcaaggaaaggattcatgaagttgatattctctgtccgcagttcttccatgttgttcttaatattttccgcataggatgtcacgattggacagttgtagtggttgttggcctcttccgtctcattgcgttcgtaaggaatgcatggatagaagatatccttgatcccctgtttgatcagccacatcacatggccgtgagcaagcttcgcagggtaacactcggattcacttgggatggattcaattcccagctcataaatcttcctggaagattcgggcgacagaactacagaaaatccaagcttcgtaaaaaatgtatgccagaacggataattctcgtaaatgttcagaacccttggaataccaataactccgcgcctggcttcatcggcgggaatagaatcataaccgaaggttcgctccagtttgtagtcatacaggttcgggatattgtccttatttgctttgccgccgactccgcgttcgcagcggtttccggtgatgtagcggccgccgttggaaaacttgttgatggtcagcagacagttgttggtacagcccttgcagcgtgtcatagaagtgtctacggtcaaggcaaaaatatctttcattggcagcatctgtgtctgtgtgtgttctgtcttaaaacgttccttggcgatcagtgcagccccgaaggcccccatgataccggcgatgtccggccggatggcatggcatccagagatgcgctcaaagcttctcaaaacagcgtcattgtagaatgttcctccctgaacaacaatgtgttcaccgagagatttaggatctgtcagcttgataacctttaaaagcgcgtttttaatgacagagtaagcaagaccggcggagatatcccccacgctggcaccttccttctgtgcctgttttacctttgaattcataaatactgtacagcgggacccaaggtcgatcggtgtctttgaggtcagagccactttggcaaagtcctgtacagaatagttcagggacttggcgaaggtctcgataaaggagccacagccggaggaacaggcctcattgagcagtacattgtccacgactccgttcttgatcttgatgcacttcatgtcctggccgccaatatccaggatacagtctacatttggatcaaaaaatgcggccgcatagtaatgggcaatggtctccacttcaccgtaatctagattcagcgcagctttgatcagatgttcgccgtagcctgtggaacaggaagagacgatgtttgcctctttcggcatctgcgaatcgatctctctgagggcgtcaatggtcgcgttaagaggatttccattgttattggtgtagtaactgtaaagaagatctcctttttcgcttactaatgccacctttgtagtagtggagccggcatcgatccccagataacagttgccttcatatgtagagagatccccgcgctttacaatgtggcggttatgatcttttaaaaacatctggtattcctgatcatctttaaataaaggctccagccggtcaacctcatggttcagttcgatcttcctgctgaagtgttccaggagatcagtgaaatttgtcgtcacctcatccttggaattcagagcagctcctacggccgcaaataagtgagagtggtttggagcgatgatcgcctcaccttcaagaccaagagtacgaatgaaagcctctttcaattcagagaggaaatgcagaggccctcccaaaaaggccacgttgcctcggatcggttttccgcaggcaagaccgctgatggtctgattgaccacggcctggaagatggaagccgctagattttcttttgtggcgccttcgttgatcaaaggctggatgtctgatttggcaaacacaccgcagcgggctgcgatggggtagatcgtgtcataattcttggcatattcattcagtcctgcggcgtctgtctgaagcagagatgccatctggtcaatgaatgaaccagtaccgccggcacagacaccgttcatgcgctggtcaatgccgttggtgaaataaatgatcttcgcatcctctccgcccagttcaatggccacgtcagttctcggagcgtagtcctggagtgctgtggaaacacagacaacctcctggcagaatgggatttccagataagaggaaatagaaagtccgccagagcctgtcactgtaggggcaaaggtgagatcgccgatctggtctttggcctttcttaaaagagaagccagggtttcctgtatatttgcataatgtctctcatagtctgagaacagtatattgtgctgctcatcgatcaccgccactttaacggtggtagagccgatatcaattcctaatcgtttcatcttaattgtaacctactttcctttcgatagtagtcttattataaaataaagaaattgaaataacaagattcaactgatctcttcttacctattaaatagtgcaggaaaaaaggatgagaaaaaaattcactaaaattaatcggaaacaaatgaaaaacaaggcatagtctataagaaaaaggcaaaggaaagaataaaatatgacagaacggggaaactgtaatggaattgtttatgtaatcaaggaaaaagataccttatatcagattgcaaaacaatataatgtgagagtaagggatatcatgaggaggaatccttatgtaaacatttacaacctgcagattggtgatgagttatgtattccggcagcgggaccggtgatttcaggtgcttttgagccatatgtggtgaaagaaggcgacacacttatgaatattatggaaaataagaatgtttcctttgaaaaattagcgaaatcaaacaaaagtgtcagtgagcttaccctgcctgtagggacagttctgttaattgacaaagagaaataatatctctataatgaaacgtgaactcgtggaaaacaggcggatggtgtcatctgcctgttaccgcagcgaagtggaaggagacctaaatgatacaaatttttcggacaatggatggccggatcaacgaaatatctgagtccatagagggctgttggatttctgtggtggaccctacagccacagagttggtggaactatcccaaaagtatcagattgatttggatcatttaaaagcgcctctggatgaggaagaacgttcccgtatcgaggttgaggacaactataccttgatcatcgtggatgtgcccatcacagaagagagaaaagaaaagaactactttgtgacgatcccgtgcggaatcatattgacagatctgtgcctgatcaccatctgcctgatggacacgccggtgctttccaacttcaaagagggaagggtccgaaacttctggacttataagaagactagattcatactgcagatcttgtttcgcaatgcctcactctaccttcagtacctgcggattattgataaaaaaagcgatgaggttgaaaaacagcttcatatttccacaaagaatcaggagctgatcgagcttttggagctggaaaagagtctggtttatttctccacttcactgaggggaaatgagcttgttttagagcgcctgttaaagatcgagaagattaagcagtatccggaggatgaagaacttctggatgacgtcatcattgagaacaagcaggcaattgagatgtctgacatctacagcaatatcctgagcggcacaatggatgcctatgcgtccgttatctccaataatctgaacattgtcatgaaggttctggcggtgatcaccattgtcatgtccataccgacgatgatcgccagtttttgggggatgaacgtgcctgtgccctttgcggacagccgttttggattttttggacttgttggggtgtctgtggtgctgacagtgatcggaagtattgtattaggaaagaaaaaaacattttaggaaaggtaacatatgaattggttaaataagcttgagaggaagttcgggcggttttccatcccagggcttccaaagtatattattcttttatacgtggttgggatccttgtacagtttgcagcgccggagttgtacagtctgttttcgctgaatccttatcttgtaatgcatggacaagtatggaggatctttacgtttttgctgatcgcaccgtctacaaacttgttctttatgatctttgtgctgttgttttattattcgatcgcatcgtctctggaacaggtatggggaagcttccgctttactatgtattacctgatcggtgttatcggaacagttgcaggggcttttcttacatatctgatcctcacggtttcaggagggcagatgagcgctatgtttgtggagatggatactttttatctgaacttatctctgttcctggcttacgctatgatgtttcctgacatgcaggtactcttttatatgatcattccgatgaaggtaaaatggctggcatatcttgacgccgcgtaccttttttatacattttttatcgcaacagactttacagtcatgggaatttcgattaaagtatctatagtggtcgcactgcttaactttgttctgttctttttctcaacaaagaaaatgaaagcaaagggagccagattcagccagaaagtaaaacagaggaaacgcaaagcccagttcggggaaccggctggacatgtggaaccaaagaaaaatggcgcaaggcatgaatgtgccgtctgccaccggacagaattggacgatcccacactggaattccggtactgttccaaatgtgacgggaattatgagtattgccaggatcatctgtttactcatatccatgtcaaaaaggacgataaaggaaataattaattattacaattaattgattatacattgttatgaaaaggagattaactatgctgacaaaaaaaacaaagattgtttgcacgatggggcctgcgacagatgatgatgcggtgctcaaacagctgatgctggaaggaatggatatcgcgaggctgaatttctctcacggtgaccatgaggaacagcttggaaggatcaagagaattaaaagattccgtgaagaactgaatattccgatcgcgatcttactggatacaaaaggacctgagatccgtacaggacttctggagacagacggagacgtggaattaaaagaaggaaatgaatttgttctgaccacaagggacatcaaaggaaatgattctatcgtagcaattacatacgaagagcttccgcaggatgtcacagaaggaaatacaatcctgatcgatgacggtctgatcgaactgagagtcaaagagatcaaagacggaacagatattgtatgtgaaattgtaaacggcggacttttaggaagccgtaagggagtgaacgtaccgaacgtgcgcgtaaatcttccttccatcacagaaaaggataagagagacattgagttcggacttgaaaacggcattgattttatcgcggcttctttcatccgtaacgcagatgcagtcaatgagatcaaggacatcgtaaaagcccacaacatggaagtcggcgttatctccaaaattgaaaacgtggagggtgtggaaaatattgaatccatcatccaggcttctgacggaatcatggtagcccgtggagatttaggtgtggaaattcccgcagaggaagttccgtttatgcagaaagcaatcattaagaaatgcaacaatgcatttaagccagtcatcacagctacacagatgttagactctatgatcagaaacccacgtccgacaagagcggaagtaacagacgttgccaatgctatttatgacggaaccgatgcgattatgctttctggagaaaccgcgaaggggaaataccctgtggaggccgtaaggatgatgaaccagatcgccatctccacagaactgcatctggatacgaagatcaaagattttcgttccatctatgtaagccgtggaatctcagcagcggttgcttattctgctgtacagactgctcataatattaacgcaaaatgtatcctggcgtccagtatgtccggatttacggcaaggatcgtatctaagttcaaaccggatgcacagatcattggcttgtctccggatgaagcggttgtgcgtaagatgcagctttactggggagtgcgtccgtttaagtcacataaggcttcctctaccagagaacttttggatgaagctacggatatcgtactgaatgcagatcttgcacaggagaacgacatcctggtactgaccggaggaggtccggcagaccaccgtggaaaaggcgtgacaaacatgctgaaagtagtaaaaatcggcgaataaggatagacagggggtgtgaaagcatcccctttttggtaaggtgataatttatgaaggttgctgaaaaagtttacatatcggaaattttaacgatcacaaaagcaaagttaataaagcggattgtaaagggaaaaagcattccttcgttatattgtattacactgccgcttggaaatgtaggaattctggaagtatacgaataccgggagcttttaaaggactattatcaggacaaagaggttaccgttgtgggatgtgccgtctctaaacaggacgccttcgttatggtcagaaggatcgtggaagagataaaacagcagggttgccttttgcaggttcctgaattttttgaagaggagtgaggcaatggcagttttatggatcattttaaaaatcataggaatactgctgctgtgtctccttgcattgttacttctggtgctgtttgcgcctgtcggctatgcctgccggggtgtctggaacggcagtgagaaatgggccagaggccgcatttcctggcttttcttttttgtccgtatgaaggttgtgtggagagaaggagaggagccaggcattactctaaggatactgggactccccgtctacagctctgatgagaagcgatggtcctttctcaacaggaaaacagaggataatgtggtagaaatcagggattctgggaaggatataaaagagccggacagagcagcccagaagacttcccggccgctttcagaggaaccggcaagtgagaaagagcaacttcccgatgatatcctggattatacctgggacggggaagatttggaatcctttgaggaggaagagccaagaaagccgtctttcacaaaaagggtgaaaagtttcctgcaaagatgctataatacaggtaagcgtctgtacaaaagattaaaatacattttaaacagggctggttcttttaaggaactgctggaagatgaggaattgatcagtgcagtcaggcgtctgtttggatacagcaagaaggggatcagacattttcttcctaagaagctctcgggagagatcacctttgggtttgaggaccccgccgcgacagggcaggcacttgccgctgtgagcgttttgatgccgctgttcagaggaagtctgtatgtggaaccggattttgaagaagcaagatttgaagccgacctgactgtttcgggacggatttatgcgttttattttctgaagcttgcctgggatatctatcgggataaagagctttggagacagaaggagcgtatcttaagaacaataggaggttagtttaatgagcaaagaaaagtttaatgagaccgtggactcgttattccagggcattgagggatttatgacctcaaaaacggtagtcggagatccgatttatgtgaaagacacgatcatcctgccgctggtggacgtatccttcggcatgggagccggggattaccgagcagaccggaaagcccgcggatacggcggcatcgggggaaagatgactcccagcgccgtccttgtgatccgtgatggacagacaaagcttgtcaatgtgaaaaaccaggagaccattaccaagctgcttgatatggttccggatgtgatcgacaaatttacaaaaaaagaagagacactagaagacattgtggaagacttggaaaacgaatgataacctccctattgggaaatgccctgtattatcagaaatctataatacagggcatttttattcaatactttccgtttgtttgcatatactagttaataagcttaaataggtgtgtatgtatgaaacgtgtttgcggagtcgcttttttctttttcgggctgggactgtttatcggattatttatccaaagagatttcacacagtttgcaatgacaggggtctgtatttcattgtcttattttctgttttttcaatagaataatagataccggaagagtccgccttttgcagtaaataaagaatcaaaaaaagagccggaaattccagctcccctaaggtttataatcaatcgggaaagattatgctctttcgactttacctgatctcagacaagaagtacaaacgtacatttttttagctgcaccgtttaccttcactcttacagatttgatatttgatttccacatcttatttgatcttctatgtgaatgactgactgcattaccaaaatgagcgccttttccgcagatagcacattttgccatgttagcacctccttaactcgatcttatccctctctgggactgacaactatttcattctaacagattgatttataaaaatcaagaagaaattctcttttctttttgggaggtaaatagtataatctaagtagcgttccgggcgtacggccctgtatggacgcaaaagaatacgaagtatggaggtaaagcgatgaaaggacatatgaacacgaagaacggcgagatttctatcgaaaatcaagtgattgctaagtatgccggaatttgtgcccttggatgttttggcattgtcggcatggcaatggtcaatatgaaagacggaatcgtaaagctgctgaccagagataatataagaaaaggcgtttttgtttctgtgaagaacaacaaaatttctatagattttcacattattgtttcttatggagtttccatttctgcggtggcggacaacctgatgtcttctgtgaagtaccgggttgaagaattcaccagcctggaagtggagcggattaatgtatacgttgaaggcgtgaaagatataggataattacggaggcaggataaatgaagcaaatcgacgcggctttgctcaagaagatgttcatcggcggagcaaagagactggaagctcaaaaagagcatatcaacgaattaaatgtgttcccggtaccggacggtgacacgggaaccaacatgaccatgacgatcatgtcggcggcaaaagaagtgggagctattgaggaccccaccatcgaggatctggcaaaagcaatctcaggagggtccttaagaggagccaggggtaactccggagtgatcttatcccagttgttcagaggattcacaaaacagattaaatatttggacagcctgaccaccagagatgtggcggcaggttttaaaaaagcagtggacactgcatataaagcagtcatgaaaccaaaggaagggacgatccttacggtggcaaagtccgctgcggacagcgccatgagatcagccaaaaaaacagaagattttgaagagtttgccaagactgtcatgcaggatgcaaatgctacgttattaaagactccggagatgctgcctgtcttaaaggaagcgggagtggtagattcgggcggacagggactcatggaggtccttcagggagcctatgatgtgctgcttggcaaagaagtagaccttgaggtggcagtggcatcgaaacagaaacagaaacctgtgggtgctgccatgggagagacggcggatatcacgttcggttactgtaccgagtttattgtcatgctggaaaaggatttcggttcaaagcaggagcaggagtttaaggattatctcacagccatgggagattccattgtggtagtggcggatgaggatatcgtaaaggtccatgtgcacacaaaccatccgggcaaggccattgaaaagggcctgagctttggatccctgaccagtatgaagatcgacaatatgagagaagaacacgaggagcgtttaaacttaagccgccaggcagaagaaaaggcaccggctccgagaaaggatatggggtttgtagcggtatccatcggaagcgggctcaatgatattttcagggaactgggtgcggattatctgattgaaggcggacagaccatgaatccaagcaccgaggatatgctcaacgccattaagcaggtaaatgcggaccatgtgttcatccttccgaataataagaacatcatattggctgcccagcaggcaaaagccctggtggaggacaaggagatcatcattatcccgacaaagacggttccgcaggggatttctgctttgatcgcatttgagacggagagcagtgtggaagagaacgaagcggccatgaccgagatgatgaacggtgtcaagaccggagaagttacctatgcagtccgagatacgtccatcgatggaaaacagatcagagtaaatgacattatgggcatagacgatgacgggatccaggaagtgggcaaagatgtccaggaagtgacgatgggactcttgaggagcatggtggatgaagacagcgaactgatctgtatctattacggagaagagacgccggaagaaaaggcactagagctttccaagaaggcggaggagttatacccggactgtgaagtccaggtggaatacggcggacagccgatttactatttcctgctgtctgtagaataaaatcagcaagtagaaaagaaaagggagcagcggatgttcccttttcgtgttttaaaggagtaaccatttcatgaacggggatacgaatatacagtgcctgaaagggatcggggagaaaacatataaaggatttaaaaagcttggggtggagacggtggacagcctgatcacaatgtatccaaaatattatctgacctatgaggatccggttctgctctctgagctcacagcaggggagagggcagcggttttagtgaggatcgcatcggatgtgaacatccggtatgtaagaggcttaaaaatcgtttcgtgccttggaagggacagttccggcaccatgacttttacatggtttaatatgccgtacttaaaaaagcagattcaccggggagaggactatatctttgtgggaacaccggtgtttaagaacggacgtctgatgatggagcatccggagatatttcaggagcaggactatgctgcaaagcaggagacacttcagccggtctatccgctgacttccgggatcacaaacaagacagtgagcaaggcagttttgcagaccgaagagtatataaaaagcatccgggaatatctcccggaccaggttttgtcagaaaaccgtcccatggattatagtgaggcgatctggaacgtccattttccaaaggataaaaagacacttgtggaggcaaaaaaaaggctgatctttgacgaattttttatttttatggctggtatgaacctgatgaaacaggaacatcgggaggagaaaaaccgatatcagatcccggtatgtgatgaggcggacaagctgacggcttctcttccgtatgaactcacaggagctcagaaaagggctttaacggagatgcagaaggatctgatgggagagaaggtcatgaaccgtcttgtacagggggatgtcggatcaggaaagacgatcctcgccgttattcttctattgatgtgtgccaaggcggggtaccagggcgttttgatggctcccactgaagtgcttgcaagccagcattacgagaccttcctttcgttgctggggccgttcggtgtgtctgtggcactgctcactgggtccacaaaagcaaaggaaaaaagggagatctatcaggggatcaaaaaccatgagtatgatattgttattggtacccacgccctgattcaggacgcggtggagtacgaccagcttgccctggtcatcaccgatgagcagcatagatttggtgtgaggcagagagaaattctctccaagaaaggggaacagccccatgtgctcgtgatgagcgccaccccgattccaaggacgctggcgatcatcatgtatggggatttggacgtatcgatcattgatgagctgcccagcaaccgtcttcctattaagaactgtgtggtgaaccagagctaccgccccaatgcctaccgttttatggagcggcaggtggcggaggggcgccagatctatattatctgccctatggtggaggagagtgaagccatggaaggcgaaaatgtgattcaatatgccaatatgctgaaaggacaatttcctcccagtgtacatatcggggtacttcatggtaaaatgaaaccaaaggaaaagcagaaaatcatggatgagttttcagagcgccgcatcgacattttagtttccacaacggtcattgaggtgggggtcaatgtacccaacgctacggtgatgatggtggaaaatgcagagagatttggactggcccagctccatcagctgagggggcgtgtcggaagaggcaaacaccagtcttattgtatttttatgagcggagccaaaaagaaagagactatggagcgtcttgaggtgctgaacaagtcaaacgatggtttttatatcgcgaatgaggatctgaagctgaggggtcccggagactttttcggtgttcgtcagagcggcatgatggactttgttctggctgacatatacaccaatgcagatcttttaaaacaggcaagcgatgcagtgcatcagctgtgtgaggaaggatttgatttttccacgctgagaaacagccgccttgggaaacagatttcgcttgccaacagaatataaaggagggagtgctatgatgcgtgtgcgtttgcattttacagggagagtccagggagtgggattccgctattttgcccagatgaatgcctcacagtttaacgtgacaggatgggtgaagaatatgtatgacggctctgtcacagcagaggctcagggaacgaaaaaacagattgaaagttttattgaagccatgaaacacgggcacaggttcatgcggattgaccacatgacagccgaggaatgcccggttttacagggggaaaaggacttcaaagtcaagtattaaaatctccttgaaaaaaatgttattccatgtaaaaactctcagtgtatcttttgtgttattaaacatactatcttcgtaacaaaaaacaacaaaagaaacggaggtctttcaaaatggaagaacgtacttcagcaaacagcaaaggtaacaacagagtggaagttccagaggctagagaagcactggacagattcaaattcgaggttgctaatgaaatcggtgtagacttaaaagaaggatacaacggacatttaacaactgctcaggcaggttctgttggaggagaaatggttcgtaaaatgatccgcagacaggaagaggaaatgtctggacgttagtcaacaggctcatacgaatttgttttaactcgtaatttcgatgaaagaacgaaagaaaaagaggggcaatcagagcatcagttctgattgctccttttatgtgcgctgaactaggcttgtctgctttgatcttaattcacaggaaattccttgttatttagttgacaaattatctgaatataatacaatagtagggagaaaaaacaaaggaagataaaattatgcgagtgatttcaggaaaagccagaagcttgaggctcaaaacgctggaaggtatggatacaaggcccacccaggaccgcatcaaagaaacactgtttaatatggtccagcatgatgtggcgggaaaggattttttagatctgtttgcgggcagcggcgctattggtattgaagccctgagccggggatgcagacaagccgtgtttgtggaaaatcataaaaaagcggcggcctgtatccgggagaatctaatacatacgaaacttaccggggatgcccaggtccttgtgacagatgttttaagcgcgttgagaaagcttgaggcagaaggcagaacctttgattttatatttatggaccctccgtataataaagggatggagggatccgtgctcagagaacttgatcattcttccgtgtgcggggggcagactctcgttattgtagaatccagtctgcagacagagtttgaggatggaatgttcgaccatcttaaaatagtaaaggtaaagcaatacaaaacaaacaaacacacttttttgcaaaaaatgcaggaggactgatcaatgagcatcgcagtatatccgggaagttttgacccggttacctatgggcatctggatattatcaaacgttccataagggtctttgacaaagtcatcatcggggtattaatcaacagtgagaagaatccgatgttttcaacagaagagagggtggaattcctgctggaagccacaaaagatatggataacgtagaagtgaaatctttttccggtctattggtggacttcgccagggaaaaccatgcggacatcacagtccgggggcttcgcgccgtgactgattttgaatacgaactgcagatcgcccagatcaacaataagctggactccaatctggatacgatgttttttacgaccagcacggaatatgcttatctaagctcaacgatcgtcagagaaattgcatcctaccatggagacatcagtgaactggtacctccatacgtggaacaaaagctgaagcaaaaatttagagaaagtatagagggagaagcatgagtgagaaatatttgcatgaaatgattgatgacattgagattttaatcgatgaggctaagcctgctagatttaatcccggtaaagttgtcattgacagggatgtgctgattacggttatcgaggagctgagaaagcagatccccggtgaggtggagcgcagccataaggttatgatgaacaaggatgcgattctggaggatgccaggatcaaggcccagaacatcgtggatcaggcggccagagaggccggagaactcatcgatgagaatgagatcgtggagatggcgaagatgcgggcaggagagatcgaggaggcggcgttagaacatgccaatgaggtcatccacaatgccaacgaggaagccgaacaggtgagatacggagcactccagtacacctgtgacattatggaggacgtacaggattacataaccaaagtaaaagaagggcagcagagcctgtttgaccagctgctttctactttagagagtgatatcggttccatcagcactaactacgaagagatcaagcagcagcttgacagcgcttccaggacaaaaccaagaactgtggaagatttcgtttcacaggaggaagagtagcataccgctgcttatgacagcaaatatcattttaaagattaaatagcttttcatagacagctgcgatttttggcagacgctcttgacctgcgccatactgcataggccgccgaaggagctcactgcaagaatggcagctgctttctgtctgaaattaagagataaaaggctcacatgggagatcccggttgtgatctccagcataccgatgaccggagatgagacggcagcggaaaggactccactctgcagcagagaggatataatggaaaatatcatgataaaaatgcctatggtgaagatcgtctttaagctgtcaaagatgatatcatcaaaagattttatagccgctgtcataggtttttgctgatggatatgtaaaaagccgctgcctttattcttgcagaagataaaaataaaatacagaaggtttggaacataaaggcagcaaaaataaagggggacagacaaagcgccctttaagatcaaagtgagggtgaagccgatggaaaacatagggcttacgttattgcaaagtacaagaagggcttccccttctttttttgtataggaaccggataataccaggtcgttgatgatcttgccgcccagtggataaccgcataaaaaccccatgagaaccgtgtaagccagatccttattcagccatgggaacaatctgaataaaggataaaacagataggagatgtagtggacagtttggtatttcatcattaggttggtcaggagaaaaaacggcaggagggtgggaacgatggtaccggaccagagcagcaggccgcttttggcacctgccacacactgctccggaaataggaacaataggaatgctgttagaatcaaacaaagctgataaaagtatttacccatagaaaaaccccctgtcctctacagcctatgaaaggaaaggttatattatgatttgttcttccttaagctttgttttaaatttggcgcggagtatcatctgatagagagcgtccgctttttgctctgtaaaaagcatctgttcctggacgtttgtcagaggatcctcaagaggtctcagatggcggaccataggccattgtttgttgtttttgatttcacgtattaagacggaagcatctttacggaagccgaggatctggaagtagagaggctgtcctgaattcacgtaacggtcattgcaggactgcttcatattgaggaggatgtgcagaaatcctctgctgatccggctccaggtgagacttttgttttttacagcttcgatctggcaggaaaacggctgcccgggtacggtcatgtttctgatacggtcgcttagatccccggagatgtcccaatagtcttcaaaagaggattccgtgcagagtttataggacagaagatccgagaaatcgtccaataacacagggaactggcgctgatacgtgttacgtaacagcgggtgcagattttccgggacacttccaagggccttatttaaaccgtcataaacagccagccgtgaccggatagcggaggcagagctgatatccccggaaaggtcaagactgtggtggctgctgtgttttcttgggatgcagaatggacggatgctgctgtttctgcgcttaagtgccatgatatattcaagtcccagcagattgttgggctctttcaggacttcggtgtcacttttggagcatcccagtgatagaaatgcattctccctcgctttgggataggagatgccggtctttaaaagcagtttgatctgttctgtgagatcctgttccctgtcggcgagaaagttgcccagagaaagcaggcggctcagagaaccgcattcactgccgaaggaaaggatatccacaacccccagggaatccagaagggcgatgctgccgtcggcaaagtagggagcgctcccggcagaaaaccacaacggcagctccagcaccagatcggccccattcatcaaagccatttttgttctcagttttttttccatgacagctggaccaccgcgctgtacataatttccactcatcagtgcaatgatataatcagcacctaaaatacgttttgtcttttcgatatggtaaagatgaccgttatggaacggattgtactcacaaatgattgccgcagttttcattgctggtctcctttcttttgtgaaatcattataacaaagaactggaaaaaggtaaaattgcacaaaaaagaggaaataaaaggctgaaacttgctattaaaaataaaagatagtaaaatgaaaacattatgagatgagatgtacagggaaaagtacaacaaggcatattgtatacaactaacgaatattgtataatttccatgataagaattcatctttgtagaaagttggaaggagcaacgtaatgagttttattgatgtgattaaagaacgagctaaaaatgaaagaaagaagattgtcctgccggagaccggagatccccgtacgattgaagcggctgacacagtattaaaggaagggatcgccgatgtgatcctggtgggaaacaaggaagacattttaagccgggcagagggatttgacctttcccaggcaacttttgtagatccagataactgcgagagactcaatacatatattgaatctttgtgtgaagctagaaagagcaaaggtcttctgccggaagacgcgaaagagatcctgctctccaatcctctgtttttcggagctacgatggtgcgctccggggatgcggacggtatggtggctggtgccgtaaactcatctgcaaacgttctgcgctctgcgcttcaggttgtcaagacagctccgggaacaaagatcgtttctgcctttttccttatggtagtgccggactgtgatctgggtgccaacggtacttttgtatttgcagactgcggactgaaccagaatcctaattcagaacagctggcagctattgcaggaagttccgcacagaccttcaaacagctcgtgggcgaggaacctagagttgccatgctctctcattctactgtgggaagcgcaaagcacgatgacgtgacaaaagtagtagaagccactgccatcgcaaaaaaagattatccggatacattgatctgcggagaactgcagctggatgcggctattgtacctgaagttgcggcttccaaagctcctagaagcgaagtggcaggaaaagccaatgttcttgtattccctgacctggacgccggaaacatcggatacaaattagtccagagacttgccaaagcagaagcctacggaccagttacccagggtattgcaaagccggtcaacgacttatcccgtggatgtaaggcagaggatattgtcggtgttgtggccatcacagcagtacaggcacagctcacagaaaataattagagattagagtatataggagaattaagaatgaaagttttagttatcaattgcggaagttcctcactgaaatatcagctgatcgattctgacacggaagacgttttggcaaaaggcctctgtgagaggatcgggatcgacggagccctgacccatgagccggcaggaaaagacaagattaagacagctcctgccatgccggatcataagacagccattggcatcgtattagaacagcttacggacaaagaaaacggagtgatcgcttccctggatgagatcagcgcagtaggccacagagtcgtacacggcggagaaaagttcacaaaatcctgtatcatcacagaggatgtgttaaaagagatcgaggcatgcaacgtattcgcaccgctccacaacccagctgccctgatcgggattgaagcatgccaagaactgatgcaggacaagccgatggtggcagtgtttgatactgcgtttcaccagacgatgccggaaaaagccttcctctacggaattccaagaaagtactatgacgaagacggcatccgccgttatgggttccacgggacatcccatcagttcgtctccaatgaagccgcaaaaatgctcggaaaagacatcaaagatctcaatatcatcgtatgccatttaggaaatggagccagtgtcacagctgtcaaaggcggagaatccgtggatacttccatgggattgacaccgcttgaagggctgattatgggtacccgttccggtgatctggacccagccatccttgaatttattgcaaacaaagagaataagacggtatccgaagttgtaaacatcttaaacaaagaatccggagtgctcggactgtcaggcggagtctcctctgatttcagggacgtaaaggctgcaaaggcagaaggaaacaaggccgccaaggcagcactggacgcatacgcataccgtgtagcaaaatacattggggcatacactgtggcaatgaacggagtggatgccatcgcatttaccgcaggactcggtgaaaatgacgatgcgacaagggcagccatcggagaatacttagagtgtattggtgccaagatcgatgctgtaaagaacgatgtacacgggaaagcggcagtgatctccacagatgactccagggtaaaagtgctctgtattccgaccaacgaagaagtgatgatcgcaagagacaccgttgctcttgtaaaataaaattacttgacaaacaaatatgacgtttgtataatagacaagtatgaaattttaggagatagtatgctaattcagttatcaaaattattgtcaatgccaaatcatgaacagacagtggagtgttctctggatatggacgagcttgtccttaaaaggggaagttatccggtccttgaaaagtcttctttcccggttgttttaaggaatgaaggaaaacggacggtatccattgcgtttgagacaagtatcacagtcgggatgccttgtgaccggtgccttactgaggtcccggaaaagattcggctcaatgtctataaagcattggattttgatgacatagaagaaacttgtaaggatcaagtgtctttcctagatggaagcagcctggacgtggatgaacttattcttgaggaagtgattcctctgctgccgacaaaggtgttatgcgatgaagattgcagagggctttgtccggtgtgtggagcgaacctgaacaaggaagagtgcggctgcgaccggacggtccaggatccacggatggcagctatccaggatatttttaagaattttaaggaggtgtaataccaatgtcaatctgtccaaagaataaatcttcaaaagcgagaagagataaacgtagagctaactggaaaatgactgcaccggctttagtaaagtgcagcaagtgcggtgaattaatgatgcctcacagagtgtgcaaagcctgcggatcttacaataaaagagaaattgtaaatgctcagtaagaattgacagcagcacatgttgtcttcgattgccatgcgtttagactatattagtttaagcggatggcatttcttttaatttaagaatgatgtatcaaggaggttttatatggaaaagatagttaaggttgcgctggatgccatgggtggcgacaatgcgcccggggagatcgtcaagggcgcagtagacgcggtcaatgaaaacagcaacatcaaggtatatcttgtgggaaaatccccgaggatccacgaggaactgaaaaaataccgttacaaaagtgagcaggttgaagtcgtcaatgcagaagaagaaatttcttgtgatgaatcaccggtggaggcgattcgtaagaagaaagattcttccatggtagtcggaatgaaaatggtgaaagaccagactgcagatgcgtttgtctcagcgggaagctcaggtgcgatccttgtgggagggcagttcgtggtaggcaggatcaaaggtgtgaagcgtgcgcctttggcagcgttgatgccgacgaccaagggtgtctctctgatcattgacagtggggccaacatggatgccaaaccggaatatcttttggagtttgcaaaaatgggctccatttatatggaagacgtggtgggagtcaggaaaccgaaggtggccattgtaaatgtaggtgtggaagaggccaaaggaaatacgcttgtaaaagacacattcccgcttctaaaggaatgcagcgatatcaactttaccggaagcatagaggccagggatattcattccggacaggcagatgtggtcgtgtgtgacgcttttgtgggaaacgtgatcctgaagctgtcagagggactttcttccacgctcatgtccattgtaaaagacggaatgatgcagagcttacgtggaaagatcggtggacttctcgtcaaaccgtccttgaaaaagacattaaaacgatttgacgcgtcagaacacggcggagcgccccttctgggactaaacgggctggtagtgaaaatgcacggaagttccaaagcaaaagaaacaaagaatgccattatccagtgtatcgcattctcagaagccaaaatcaacgaaaagatcaaagaacagattgtaaaggaaaagtaaaaggtatgaatcaatcaaatcaggaagattttcagaaaaggatcaagattcgtttccatgaccagaaattactgacaacagcattgacacacagttcctatgcaaatgagcgaaaattacccagagggaaagataatgaacgcctggaatttttaggggacgcagtgctggaactgattatgagtgactatttatttaagacttacagagacgaaccggaagggaaactgacaaaaatgagagcaagccttgtctgcgaaccaacgcttgcgttttgtgccaaggatatcgcattgggagattacctgcttctcagcaaaggtgaggatcttacaggaggacgggagcgcaactcaatcctttcggacgcgtttgaggctgtcataggagctgtgtatctggatcagggatttgaggaggccagaaagtttgtggagacttatcttcttcaggatgtggatgaaaaggtgctgttttatgatgccaaaacttcacttcaggagttggtacagagtatatccaaagaatccctctcgtatatactgacgaaagaggaagggcctgaccatcaaaagacttttacggtggaggccaaactgggcggaaaggttatcgggaccggagccggcaggagcaagaaaagtgcggagcagatggcagcctatgaggcaatgaaacataaggacagaatattgaggtagctatgtatctgaaaagcattgaagtaaacggattcaaatcctttgccaataaaatgatttttaaatttgacagtggtatcacgggcatcgtgggacccaatgggagcggaaagagcaacgtggcggatgcagtccggtgggtgctgggtgaacagagcgccaaacagcttcggggcgccaagatggaggatgtgattttctctggcacggagatgagaaagcccatgggttctgcttatgttgctatcacgatggataacagtgaccagagccttcccatagggtttgacgaagtgacagtggccaggagggtttaccgttccggagaaagtgaatacttgatgaacggaagtccgtgcaggcggaaggatatcgtagagttattctttgacactggaattggaaaggaaggatattctatcatcgggcagggccagattgaccagattctgagcggaaagccggaagaccggagagaattgtttgatgaggctgccgggattgtcaagtataagaaaaacaagcttgagaccgagaagtctctggaggctgaacgggacaacttaaaccgtgtgactgatattctttctgagttggaacgccaggtgggaccgctaaagcaccagtctgaaaaggcaagggaatatctcggataccgggaccggttaaaagaatatgatacttccatgttcctgctggaaaacggcaggctttcagaggagatggaagccctggacgaaaagataacgattgcccagagggaagtggacgatgcaggaaggcgtctggaacagacaaaagccgagtatgaaaaacaggatcaggcactcaacgaattaaagtctgagatcgaaaccaggacagaagggctttctgaagccaaggtggacaaagaaaagcaagaaggccagatcaaagtcctgagagaacagatgaatacggagcgcatgagagagacgcatctggcttctgacattcagcgtcttgccggggaaaaggaagacaagcaaagccagcttgctaagcttcaaggggaacaggaagagatcagagaagcgttaaagaaagcccaggaagaaactgtggagagtgagagccaagtcgcatttctccagaaagagatccaggacacagaagcggaactggaaaaggtcaggagaaaccagcaaagctttgccaacaatcagatgaatctatccaaccggctgcagcacgtggagactgtacgcgagcagctggaggtgaggatctcccatgttgattctcaggcccaggaatccaggcagcacagaatagaacaggaacagagaaagcagcaggaaaatcagagaaagcagaggcttttagcggagaaacagaagctttcaaacgacctggtggcggaaagaaatctctacgccgtgctggaaaaagaaagaacttcagcgcaggaaaaccttgcgtcccaaaaagagagcttccatcgcagccagtccagctatgaaacactgagaaacatggcagaacgctatgagggatatgggttcggcatcaaaagggtcatggaacagaaagccaagcagccgggaatcatcggcgcagtggccgatatcatgaaggtaaagagaaagtacgagcttgctgtggagaccgccctgggcggagctatacagaatgtggtaacagactcccagcagacagcaaaagaaatgattggattcttaaaaaggaaccggtacggaagagttacctttctgcctttggatgccatcaagtccaggggaggatttccgaggcctgacgcactgaaggaggagggtgtcatcggcacctgtgaccagctggccagctatgacgaacggttttctgacctgtttcattcccttttaggacgtgtgcttgtggtggagagtatcgatgacggtatcaggatcgcggggaaatacaatcattctttccgcattgttacactggaaggggatgctctgaaccctggaggttccatgtccggaggtgcctacaaaaataagagcaatctactgggaagaaaccgggagttaaaagagttaaagcagaagctttcaaaagacagggagcagatttctagttttgcagaagttttggatgaaaaaacggcagagctacaaaaggccggggaaaggatcagacggctgcagagcagcattcaggaatattctctccgagagaatacggtggtgatgacacttagatccattgaaaagcagatggaggaagaagtaaagagggagcaggaatttcttgctcaggcccagtcgctccgtcgggaatacaattccatggaaggtgacgtgacctctttatctgacaaaaagcaggtgctggaggaggcgaaccagtcggaggagcaaaagatccaaaccctttcgcaacgtctggatgaggccagaatcaaggcagaagaaaaagccagggaagtcactgaggcgcatatgaaagccgggcagctcaagcagcagcaggattttatcatgagcaacagcgagaggatacggctggagatctccaagatcgaagacgatctggataccctgagaaagcagacaggttccattgagacatcgatggatgacattaaaaagcagattgaggaaaaaagccaggccgtccttacgaaaaaccagtggatcgagacagaagaagaacagatcctggaccggcagagaaaactcggggaaacggaagagagataccggcagagccttggcgccagggaagaactcatggagcgtatgaacgggtttgacaaggaagtctaccggctcacttcagccagagaaaagttcgatgaaaagcagcaggagctgctgaactatatgtgggaaaactatgagcttacataccatcaggcaaaagcggccgcaggcgtcgaacagccggcggaaagcctccaggagttaaaaaagaagatcgcagagctcaaagcgcagatgaaagatctgggaccggtcaatgtaaacgccattgatgactacaaggatgtgctggagcgatacgagttcttgaaaaaacagcatgaggatatcgtgaaggcagaggcacatcttgtgggtctcatcgacgaactggaagccgccatgaagaaccagtttcaagagaagtttaaagatatccaggaaatgttccaaaatgtatttcaggaactgtttggcggaggatatgcgcgtctggaactcacagacgacgatgtgctggaatccggtatccggatcatagcgcagccgccaggcaagaagcttcaaaacatgatgcagctgtccggaggagaaaaagcactgactgccatatcccttctgtttgccatccagaatctgaagccgtctccgttctgtctgctggatgagatcgaggcggcgctggatgactccaacgtggcaagatttgcacaatacctgcataagcttacaaaagagacacaatttattgtaattacccacagacgtggtacaatgacagcagcggatattttatatggaatcaccatgcaggaaaagggtatttccactctggtatccgtgagcctgatcgaaaacgatctggacgagtaaacgaagacgggaaggagatttaaaatggcagaaaagaaaggattctttagcagactggcagaggggcttacaaagaccagagacaatatagcttcagggtttgattctatttttaaaggcttttccagcattgatgatgatttctacgaagagctggaagagatcatgatcatgagtgacatgggaattgatacgaccatgagtatcattgagaatctgaaacaaaaagtcaaagaagaaaagatcaaggagcctgaggaatgcaggcaggtcctcatagattccatcaaagagcagatgaagctcggggacgaggcttatgattttaaagataagaaaagtgtggtcttagtcattggtgtcaatggtgttggtaaaactacatccgttggtaagatggcttccctgctgaaaggcgagggtaagaaggtcatgatggcagcggcggatacgtttcgggcaggcgccatcgaacagctgaaggagtggtctgtgcgcgcaggcgtggatatcatcagccaggcggaaggcgcagatccggcagctgtggtatttgacgcggtctctgcggcgaaagcaaggaatgtggatgtgcttctttgcgacacggcgggaaggcttcacaataaaaagaacctgatggatgagcttaaaaagatcaaccgcatcgtagaacgggaatacccggaagcgtataaggagactctgatcgttctggacggaaccacgggacagaatgctcttgcgcaggcaaaacagtttaaagaggcaacggacatctctggtattattctgaccaaattagacgggacagcaaaaggagggatcgccatagcgatccaggcagagttgggaattccggtgaagtatatcggtatcggcgaacaggtggatgacctgcagccgttcgatccggatatgtttgtgaatgcactgtttgatagaggagatgaatagatgttaacattaaacaagtttgaaaaagcgtacgataaggtacaagagatcgttctgcccacaaagctgatgaaaagtgaatacttttctgagcagacaggaaacctggtttatttaaaaccggaaaacatgcagttaacaggggcctataagatccgcggcgcttattataagatcagcactttgaatgaagaagaaaaggcaaaaggactgatcaccgcttcggcgggaaaccatgcacagggagtggccctggcggcaaagagacagggagtgaaggccaccatcgtcatgccgactacgactccgcttttgaaagtaaaccgtacaaaggatctgggagctaaagtagtcctccacggagatgtttacgatgaggcatgcgatcacgcgctgaagcttgccgaagataaaggttttacctttgtgcatccgtttgacgacctggaagtggcgaccggacagggaaccatcgccatggacatttttaaagaacttcctacagtagattatatccttgtgcctattggcgggggcggccttgcgaccggtgtctcaacacttgccaagctcttgaatcctaagatcaaggtgatcggtgtagaacctgcaggggcagcgtgtatgaaggcatccctggaagcggggaaagtgatctcctgcgaccatgtaaatactatcgccgatggtacagccgtgcagactcctgggaaaaagatttttccgtacatacagaataatatcgatgatatcatcacagtggaagatgaggaattgatcccgtgctttttggaccttctggaaaaccacaaaatgcttgcggagaattcaggccttctgaccattgctgcattaaagcacttaaaagccgaaggaaaaaaagttgtcccgatcatcagcggcggcaatatggacgtgatcacaattgcttctttggtacagcatgggctgatcatcagagaccgtattttcacagtttctgttttcctgccggataaaccgggagaactcacaagggtctccaaggtcatatcacaggcccagggcaacattgtaaaattggaacataaccagtttgtcagcattaacaggaacagtgcagtggagctgacgatcacgatggaggcctttggcaccgaacataaaaataagatcatcaaagcactacaggacaccggatataaacctgagatcaggagttcaaaaagtgtattctaacagttttaacaaatgataaattgagagttttcaaaaaaacagtttccgttaaagacagaaactgtttttttgcactttttgatgcagccgtatgtaacaaaaagtgcaaaattgaggttttcaaaattaacaaaaaaaggacgggaaaagtgtattaaattttgtacaatttgttgtataaagtcccctttttatgttataataggtttatgaaacagatgtcagcaatttgatcttgtaaaggacagcatcggttacgttctagttatacagaaattttttttaagtagattaggaagtgtgattttgaccatttgcaaggacaaaatggtgaaatttgcactttttttatgagcttgtacatataataattattatgtatttgaaggaggaggatatatcccatggaaacaaacattagtaaagaggacttatatttatttcagacgggaaaagcgcagaaagcatatttaatgtttggatgccactacttgaaggaagcggatgcccacgagtttgtagtatgggctcccaatgcgaaatctgtcagcctggtcggagactttaaccagtggaatccactgtcacatccgatgaagcagacggaaaaagggatttattccatccaggttgaaggactggaaaaaggcgatttatataaatattacgtggagggtatggacggcagatgcagatacaaaagcgatccgtttgcgttccattctgagaacaggcctgacactgcatctgtggtctgggatgaactggatggtttctcctggagggacaagcggtttataagccgcagaaagaaaaagcaggatgtaagccagcctatgtctgtctatgagatgcacttgggcacatggaagatgccgaaagaggaagacagggagttttataattaccgtgagattgcggacatgcttgtaccgtatctgcaaaagatgggatatacccatgtagagttgatgccggtgacagaatatccttatgatctgtcctggggataccaggtgacaggttactactctgtaacttcacgctatggaacgccagaagattttatgtattttattgacaagctccacagagcagatatcggcgtgatcttagactgggttccggctcattttcctagagatgaacatggtcttgcattgtttgacggatctcacatttacgatcatgcggatccgagaaaaggaagccagccggattgggggacactgctgttcaactacggcaaaccggaagtacagagtttcttgatctccagtgctgtattttttgcggagaaataccacattgacggtattcggatcgatgcggtcagcgccatgctgtatctggatttcgggaagaaaccaggagaatttgtaccgaatgaagacggaacaaatatcaactacgaggcagtagattttctgaagaatttaaatcgtaccatgcgctccaactttgacgggttcattacggttgcggaagaatcaacagcctatccgaaggtgaccagcgacattgatgacgaggaaggacttggatttacatataagtggaacatgggatatatgcatgactctctctattatatggagcttgattctctgttccgcaaagagaaccacggagcaatcgtattctccatggattatgcttacagtgaaaattatatcctgccgtattcccatgatgaagtcgtgcacggaaaaggctctatgatcaataagatgtttggagaatacgagcagaagtttgcgtcactgaaaacgctatatggatttatgtacgcacatcccggtaagaagctgctctttatgggagatgactttgcacagtttgtagaatggagagacaaggaagaattagactggttcctgatcgatgagtatgagacccacagaacgatgaatgagtatgtggcaaacttaaacgagctttaccgcaaagaaccggcgctctatgaattagacaacaaaccggagggctttgagtggctgctccagaaggatgcggaccacagtgtggtggcatttatcagaaaatcaaaaaaacgcagagggaaacctcaggaacagatcgtttgtgtctgcaactttacaccggtcgaatgggataaatatcacatcccgatgccgaaggacggcaaactaaccaagattttggacagcagcgagaaggcgttcggaggagatggagaagtcagccagaagtcagcaaaagtgcgcaaaaagaagatcaaaggaaagagaaacgcctacgagcactatgcggtactttcattaaagccgctcagtgtcgttatgtataaatatacgctggaagatacaccggctaaaaagaaggcggagccaaagaagacaacagccaagaagacagcgtcgaaggcgccagaacaaacaaaggctgagacagtaaaaacacctgagaaaaaggaggccgcaaaaccggcagcggtaaaagaagaaattacaaagaccgcaaaaccggcagcggagaaaaaagaaactccaagatcagctacggtgaaaaaagtggagaagacagaaaagaaagcagaacaagcaacaaatgataaacaaaaatctaagaaggaggagaccaaaaaagaaggaaaacagcagactgtagaatccactaaaaagacaacagcatcgaagagtgcagataaaaaagaaacaaattaggcattgtgagaaggaggaaaactatgattacaaaaaaagagtgtgtggcaatgttgctggcaggcggccagggaagccgattatttgcgttgacccagaagaaggcaaagcctgctgttccctacggcggtaaatacaagattatagattttccgttatccaactgcgcgaattcaggaattgatactgtgggtgtcctgactcagtatgagcctttggaactgaattcatatatcggaaccggagggttctgggacctggacaatatgaacggaggcgcttttgtccttcctccgtatgtaagaggagaacaaggtaactggtaccggggaactgccgatgccatctaccagaatatcaactttattgataattacgatccagaccatatcattgttttatctggtgaccagatctgctgcatggattatcagaaaatgctgaactaccataagaaaaaaggcgcggactgtacaatctctgtgctggaagttacattggaggaagcaaagcgttttggtatcatgaatacggacgaggaaaataagatcgaggagtttgaggaaaaaccggctcatccaaagagcacaaaagcatccatgggtatttatgtgttcaaatggaaattgatccgccagtatttgatcgatgatgccaatgatccggattccgagcatgatttcggaaagaatatcattccgagaatgctggaggaaggaaagaagatgtatgcttacagctttgacggatactggagagatgtaggaacgatctccagcctttgggaagcaaacatggaactattggaagaaaatcctcagctcaacttaaatgatgacaagctgaaagtctacacaaggacttatggacttcctcctcattacatagcagagggtgccagtgtgaaaaagagcatcattgcagatggttctttcattgaaggaacggtggaaaactgtgtcatccattccggcgtaaagatcggaaagggagctgtcgtaaagaacagtgtcattatgaaggattccatcgtccgggaaaacagcgagatcaacaaagcgatcattgacgaagaagttgttgtggaagaaggaagcaaagtcggagagggcaacgaggttaccgtcatcggctatcacagtgtggtactggaagatgcagtcgttgaggatggtgcaatgatctatccggaatctattttacactagggaggtagaaactatggaaaatcaaatgcttggaatcataaacgcaggagaagaaaacagaaaacttcaggatttggtgcgtaccaggagcttatcggctcttccggtaggcggaagatatcggaccatagatttcctcctgagcaatatggtaaactctgcgatcaaaaatgtcggaatcatgacaagatacaactacagttctctgatggatcatgtgggatcaggaaaggactggggacttaacagaaaacgcggaggactctatacattccctccttacatatccggaagcggaaggtcaggcgaatacgccagtgttatggacggtctgagaggaacattaggatttcttaagaaagcctccgagccgtatattctgttagggcgttcctatgtgatctttaactctgattttaatgaaatgctggaaaagcacattgagagcggagcagacatttccatgatgtattttgataacagtaatgacgctaccaactgcgattatgacggcgtttacctgaaaccggatgagagcggacgcatcactgacatgtgttattctgagacaaaacaccgttacggcaagaaaagtatggatgtctatatcatgaaacgggaacttttgattgatttcatccaggaagcagtttctcacaacaggaagcatttcttctttgatgttctcgttccaaactttgaccgtctgtttatacagggttatgagtataaagggtatgttggatgcattacatctgttgaggcatactataacatcaatatggatttattaaaacaggacgtgcaaaaagaactgtttttcggtaagaataagatatatacaaggacaagcgacagtgctcctgcccgctacggcattgaggctaatatcagcaacagcctgatcagcagcggctgtgaagtggacggaactgttgaaaattctgtgatcttccgtggatgtcagatcgagaagggggcggtgatcaaaaattccatcgtaatggcagaaggatttatcggaaaaggtgcagatatcaaccataccatcatggaccgccatgtgaagatctattctaacgcacatttatccggatcaaaacagcatccggtgtttataccgaagggagccagcgtcaatgaataaaaggaatgagtgtatgatgaatgtactgatggttgcagcggaatgcgctccctttgtaaagctgggaggccttgccgatgtcatcggtactctgcctaaggagctcaataagctccaggtggatgccagagtcatgatgccgttccaccgtcagataaaagataaatacgcagctcagacaaagcatatggcagacttttttgttcattttgcaggaagagaagtctatgtgggagttgaaggattgtttttcaacgatgtcacatactattttatagacaatgaagaatatttcggcgatgcggtttacagaggcggcgacgcagaaggagagcagtatgcatttttctgccgggcagtggtagaggctgccggaaggatcggattccttccggatgtgctgcactgcaatgactggcagaccgggttgatcccgcttcttttgaaaacccagtacagccattgggagattggacgggcaaggacgatctttacgatccacaatatgatgtatcaaggtgagtacagttttgacgcgttccatcactggctggggatcgatccgagatatgatactccggaatttatgcataactatgagtgtgccagttttatgaaggcggcacttgtgttcgctgaccgcatcagcactgtcagcccgacttatgcacaggagatcaagactccggaattctcctatcggctggaaggtatcttaaatgccagagcgtgggatacatggggaatcgtaaacggcatcaacacagaagagtttgatcccgagacggatccttacctggaatatcattttaacaaggatgatctgactgggaaaaagaagaacaaagaaaagctgatcagggacctggggcttaatatatctccgggggtaccgatcataggcatggtaagccgcctgaccgcacagaaggggttggatctagttaagtatattctggatgaacttatatgtacggaggatattgctttcgttgtgttaggcaccggcgaccatgattacgaagaatttttccgctttatggagaataagtataagggtagagtatgctcatatatcgcatacaacaatgcggtggctcatcagatttatgcggccagcgacctgttccttatgccttccaaatttgaaccatgcggtatttctcagatgatcgcgcttcggtatggaactctgccgatcgtccgtgaaacaggtgggctttgtgacacggttcaaagctacaatgaatttgaagagacaggaaacggattttctttcagaaattataatgcacacgagatgcttggagtcatccgttacgcattgaatacactgcgcagtccaaagcgtaagaaaggcctgatccaaagggcgatggagtctgacaatagttttgcgtcatcagccagaaaatatctagaattataccagagcattctttagacaactggtgaaaggagcaacagaggatgaaaattgtaaacaataacagcaaagttcaggagatcatcagcaatgttgaaaacaaactgaacaataatttcggaacaacattggaggaggcaaccagggatgagctttataaagccggagctggctgcattcgggatgatatcatgcatctctggacaaagagccggaagaagacagaggatctggggctgaaaaagttatattatatgtccgcagaattccttatgggaagagcgtacagcaacaacctgatcaattccggggtctttaaggactacaaagaagcgtttgagaagatgggaatcgatttcgatgacatcttagacgaggagagtgatcctggacttggaaacggcggattgggacgtttggccgcatgtttcctggattccttgtccacactgaacctgccggccatcggatgcggtatccgctatgaatatggtctgttccagcagaagatcattgacggcagtcaggtagaggtagaggatgactggctgagagacggttttgtatgggaggtggaacgaccggagcttgccatggaggttcgctttaacggtgagatcaaagaaaactggaccgaggacggattaaagattgagcattacaactatcatacggtgcttgcagtcccttacgatgtaccagtgatgggatacaagacaaacgctcctgctacattgagactttggagcgcaagaagcaaacagaatttcgacctgcactcctttaatgagggaagatatgagaaggcttctgctgattcagagtttgcagaggtaatctccaaggtgctgtatccggcagatgaccatatgcagggaaaacttttaagattaaaacagttctacttcctgacgtctgcgaccatgcagctcatggtgaaaaatcacaaggaaaaaagaggagatctccatacactgcctgagtatgccgcagtgcagatcaacgatacccatcctaccctggccattccggaacttatgaggatcctcatggatgaggaaggctttggatgggaggaagcagaggatattgtaagccagatcttcaattatacgaaccatacgatcatggctgaagccctggagtgctgggacgaaaatatgttcaaacttctgctgccgaggatctatcagatcatctgcatcatgaaccagaagtactgtgagcgcttaaggacttattatccaaacgacgaggcgaagatcgcctatatgtccatcatcggcaataaccagatccgtatggccaacctgtgcgtggcagtctgccacagggtaaacggggtgtcacaacttcacggagacattttgaaaacgaatctgttccacgattcctacaatatttatcctcagaagtatcttgccattaccaacggtatcacccacagaagatggcttgccctggcaaatccggaactgtgcgacctgattcaggaacatgtcaggggtgacattctttcagactaccgtctgtttgagaagatccttccgttggcagacaacgcagacttctgcaaaaagtatgacgccatcaagcagcgcaataaaaaaaggctcgccaagtatctgaaacagaaacagggcatcgagattaatccggattctctgatcgatgtacagtgcaaacgtcttcatgagtataagagacagctgttaaaatgccttcatattatttatctgtacaaacaggtgaagaaaaatccggacttcttaagcaaaccgatcacctttattttcggtgcgaaagcggctcctggataccagagggctaaggagatcattcgtctgatcaattccatcggggatatggtcaacaacgatccggataccaaagataagatgcaggttgtctttgtagagaactactctgtgtctgtggcagaagttctgatcccggcagcggacatcagcgagcagctttccacagccggactggaagcttccggaaccggaaacatgaagtttatgatgaacggtgctttgacactcggtaccatggacggcgccaatgtggagatctttgaacaggtaggggacgataatatctttattttcggagccactgtggatgagattaattctatgaaacaataccggacttacaacccgggtaccatttttgagaaaaacccaatgatccgtgaagtgtgtaactgtctgatcgcaggggaacttcctcggtacggtaagagaaaatactctgatatttatcagtctctgctgtttggggagtataatataccagatcagtactttgtcctgtatgatctgccttcttatgtggaagaatttgagaaggtatatgacacttatatcaatcaccatgatgaatgggtgaaaaaagcggtgattaataccgccaaatccggatttttctcttctgaccgtacaatcgaagagtacaatgataagatctggaatttaccaacatataaataggcagggtgagagaacatgatccataatgcatcaattgagcagtacagagaacccatcggggctgtcacaaaaggcgaagaggtaaaacttcgcctttttgccttagagggaactgctgcgactgtggaagtggtcttattttcggaagagtatcataagacctttccaatgagagagaaaaagggcatctatgaatgtatcatagagatgccggaaaaagcgtgtatcctatggtattacttcaggatcacagaagggaactacacgtattattacggggcaaagccgggacgcacctgcggagagggtatgcaggtagaggaagatgtccgcggttttcagataactgtatacgaaagagggtttgaaacgcctagatggctttcaaaaggcattatgtatcagatattcccggaccggttctgccagggaaaccggcaaaacaccgaaaagggagaagaataccatagaaaaatgggccgtgatatttacgtgcacaaaagctgggaagaacggccgctgttcgggccgatggagggaaaagaattctacgatccgtgtgatttcttcggcggggatctggaagggatcaaaaagcacctggatgatttgaaaaagctgggtgttacatgcatctatctgaatccgattgtggagtccagttccaatcacaggtacaataccggcaattataaaaaagtagatccgttccttggggataatgaggacttcagagagttatgtgaagttgcaagaagaaaagggatccatattattttggatggtgttttctcccatacaggggcagacagcctttactttaacaagaatggaaattataagagtgtcggcgcatatcagagccaggagtcgccgttttatgactggtactcctttgacagtaaaggagactacaaaagctggtggggatttagaagccttccggaagtcaatgaactgaatgaacgctttttatcgtatatcatcacgggaaaagactccgtattaaagcactggtttactctgggggcttccggattccgcctggatgtagcggatgagcttccggatgagtttattttcctgatgcgcaagacaatgaaaaagatgtttaagaattacgctttgatcggggaagtctgggaggatgtcaccaccaaagagagctacggcgtcaagagaaagtatgctctcggcaaagggcttgacagtaccatgaactatccgtttaaagtaaactgtgtcaactatctgcttgggaatgaggacgcgtatgcaatgcagcagtttttgctggggcagcagtgtaactatccaaaaccgttttattacagcgtgatgaacctgctgtcatctcatgatatcccaaggatccggaccactctggcatcaggcatgaatgagatgctgccgtccagggaaaatcagattgactatgtggtcacatcagaaaatgaccgcaaaggagcaaggctttccaggctggcttttgcgatccagttttttattccgggaatcccatcgatctattatggagatgaatatggaatgaacggattgatggatccttttaacaggggaccgatgtttaaacatgacacaaagatatttgaggaactgaaaacagtttccgttttccggagcagagagaagatcctgcagacgggttatgccctttatatcgccgcatcaaaacatgttttggcgattctcagatttgttccgggaacaaaggatgtctttggggaaccgtgtaaccagggagcttaccttctgcttgtaaatacaagtgacgaggaagaagagattgattttgatttcctggatcacaaagaaggggtaccggaggaagaacacaggcgtctcatcaaaatgcttgataacacccgcgttcacacaaaggtacagaaattagactataagatcatgcatctgtcatgattcaaccagcagttcttcgtcagacggatccatcacggagaatgcaatatttgttccatggtcagcgatccgctccagggatgaaagcatatcagaaaataacagaccggcccggggctcacagatgccctgggccattctgtttagatggcgcttttgatagcggcgctccatggcatcgatggcctgttcgtgtttataaaattcaggaatcatttcttttttatgttctttaaagatcacaacggcatcctcaagcagagcagaaactgcgttatacatattgaccagttcacgcttggcatccttgctcaggcgggaattgtggtcagctgcggaacgggcgctgtcagcgaagttctcggcaaggtcaccgatccgttcaatatccccaacggcatagaacatactgcccaggatctcacggtcaccgaccggcagttcctgaaggtttgagttgacaaggaagtccgtaatcttctggcttaagctgtcgatttcctcttcccgctgatagatctcacccagatgctttgtattgcagtttaagaaagcctggaaagccagttcaaggtttttgttggcaagctctgccatacgggagatttcctggcggacctgagggatggctgagatcggagaacggtattccccgataaaattaagctcagaggcggaaggcttctcctcatcgccgggaacaattttttccgccagttttacgatcaggcctgtgcttggaaacatgatcagaacctcaaagatcttaaagaatgtatgagcattggcgacactccgcccaacatttccacttgatatatgtaagatcatctctgagatcggataaagaaagaaggtgagtacggtaaagatagccgcgcttccgaatatgttaaataaaaaatggatcactgcggcccgttttgcatttttcttaccgcttaagctggccaagagagctgatacacaggagcccatgttacagccgaggatgataaagaagcagatcggcagatccagaagaccctgggaggccatcaggagtacaatgctgacggtcacggaggaactctgcaggatcgcagtgatcacaaagccgatgagcacggcggcaaaatggttgtccaatccggcgagagcgttcatgacagccggggagtcttttaagaaggacatggtggaggacatggtcgtaaggccggtgaataaaacaccgaagcccaagactacctctccggctttcttgattctggggttttggacgaacatgaccatgaccactccggacatcaaaaaaataggtgcggcatctgataagttaaaggcaaccagctgggaggttactgtggttccgatgttggctcccaggataacgcccgctgcctgggaaagattcatgagtcctgcattgacaaagcttacgaccataactgtggaagcgctcgacgactgaatgatggccgtaaaaaagatgcccaccagcatccctgaaaaacggttggttgtaaagaactccaggattccccgaagtcttgccccggcggctttttcaagaccgtcgctcattaatttcattccgtataaaaacaggcccagaccgccggccatcggtaataaaaaagaactcattgctgcctccttggttttgtatgcactttaacatagattttacaaactcgttacttctattttactttaaaaggagcaaagagacaagaaaaacagattgtcatttttcttgggacaaggtataataaaccaaatataaggaggaagtttatgaaacattatgattatattttagtcggcggcggactttttaacggagtcattgccagagaagcgagaaagcaggggaaaacctgtctggtagtagaaaagagagaggccctgggtggaaatatcatgtgcagggatgtggagggcattatggtccacgaatacggggcacatatttttcacacaagcaatgaggaagtgtgggagtatgtaacttcgctggtggaatttaaccactacatcaacagtccggtggcgaactatcacggtgagacatataatcttccttttaacatgaacacattcagcaagatgtgggggatcgcatttccttctgaggcgaaaaagatcatagaatcccagagacaggctgtagaaggagagccggaaaatcttgaagaacaggctatcagcctggtaggtacggatatctaccaaaagctgatcaaaggttacacagaaaagcagtggggaagagactgcagggacctgcctgcttcgattatcaagaggatccctgtccggtacatttacgataacaactattttaacgatccacatcagggtattcctaaaaaaggttataatgagttgatcagcaagctgtacgaaggctgcgatgttatgctttccacagattttttagaaaagagagaggaactttcacgtctcggagaccaggtgatctacactggtaccattgattcctattatggataccggttcggaaaactttcctacagaagcttaaagtttgaacatcaggtactggaggaagagaaccatcagggtgtggcggtcatgaattatactgaccgggagacaccgtacacgagaaagatcgagcacaagcattttgcgttcggcacacagaagaacacagtggtcactgaggaatatccggtggagtgggatgacggcatggaaccctactatccggtgaatgatgagaaaaataatcagttgtttcaaaaataccgtgatctggcggatcaggaagaaaaggtcctgttcggcggaaggctcggagaatacaagtattatgacatggacaaggtgatagagtcagcactctgttttgccaaagaccggctgaatctttagacggagatggaaaccgcccaaattcttttcaggatttgggcttttttcattgtttatggatttgcacgattttttaaatattgttataatagattccatatgtcaagaaatgaaaaagaacggagaaataccaatgccaacatataaaaatgaagcacaaaaacagtattcctatatggaagggatgaagggatgggtaaaggcacaggaagaacgtctgggcagacggctcacctgccatatcactaccttcggctgtcagatgaatgaaaaggattcagaaaaacttctgggggttctggagacgatcggatacgaggaaaccgacacggaacaggcggatctggtcctttttaatacttgtacagtccgggagaatgccaatacaaagctgtatgggcatctgggtcatgtaaagaaagccaaggagaagaatccagaaatgatcgtagggctctgcggctgtatgatgcaggaagaacaggttgtggagaagatcggaaagagctatccgtttgtggatcttattttcggcacccacaatatctttaaattggcagagttgttgaaggccagagtagattccggcggaatgatcgtggacatctggaaggacacggaccagatcgtggaggatcttccaagcgaccggaagttttcttttaaatgcggagtcaatattatgttcggctgcaacaatttctgcagctactgtattgtcccctatgtgagaggccgggagagaagccggaagccggaggacattatacgggagatcgagggacttgtgaaagagggagtccgggaagtgatgctgctcgggcagaatgtaaattcttacggcaagaacctggatgagccggtgagctttgcagaacttctgtccatgatcgaacagatcgaagggctttcacgcatccggtttatgacaccacatccgaaagatctgtcagacgaactcatcgacgtaatggcatcctccaaaaagattggccgccacatgcatctgccggtccagtcagggagcagccggatcttaaagctgatgaaccgacattataccaaggagagctatctggctctgacagaaaggatcaaggagaagataccgggcattgccatgaccacggacattatcgtgggatttccaggggagacagaggaagactttgaggaaaccctggatgtggtcagaaaggtcaagttcgacagcgcctatacctttgtctattcaaaaagaacagggacaccggcggccgccatggaagatcaagtggagccagacgtagtgaaaaggcgattccagcgtctgcttgaggtgatcaaggagagctctaaggacaaccggaaggaaggaatcggaaaagtagaagaggtgttggtggaggaaaagaatacacacgaggacggcatggtcacaggacgcctttccaacaatatattagtacattttaagggggacgaaagcctgatcgggcagatcgtccacgtgaaaattacggaagaaaaaggtttttattatatgggagaacaggtaaatggctaaattaactccaatgatggaacagtatatggcgatcaaagaacagaatcaggattgcatcctgttttacaggctgggagatttttatgaaatgttctttgaagatgccacgacggcttccagggaattagaaattacactgacagggaaaaactgcggaatggaagagcgcgctccaatgtgcggcatcccgtttcacgcggtggattcctatttgaataaactggtggaaaagggatataaggttgccatctgtgagcaggtggaggatccgaagcagaccaaggggatcgtaaaaagagaagttatcaggattgtgacgccgggaacaaatatttcccagcagagcttagatgacgaaaaaaacaattatcttatgtgtgtcttctgcagcgacgataattttgggttgtctgtggtggatgtcacaaccggagatttccggaccacctccatggatgagctgcaaaaggtagtggatgagatctttaaatttgcaccggcagagatcatctgcaacgacgcttttatgatcagcggtgcggatattggcctgatcaaagataaactcggggtatccgtctccagtattgaccactattattttgatgaggagcagggaacagccgccatcaagtcccagttccatgtggggaatctcagcggtctgggcttatcggaccatcctatgggcatcatcgccaccggtgccatgctgctctatctccatgaaacgcagaaaaatgcgttgaatcatcttatgtcaatatcaccgtatgagacaagcgaatttatgatcattgacagttccagccggagaaatctggagctgtgcgagaccctcagagataaaagaaaaaagggttctcttctgggggtattggataagaccaagacggctatgggagccaggcttttaagaagtatgatcgagcagccattgatcgaccgtgataagattgaggagcggtatgaggcactgaccacgctgacaaagcaggccattgtccgggaggagatccgggagtatttaaatccggtctatgacctggaacggcttatgacgaaggtcagttaccagacggtgaatccaagagatatgattgcattgaaggtatcgctccagtggctgccgcccatcaagaccattctggaagaatgcagtgacggcctgttgaccgggcttcgggaggaattggacgtactggaggatgtggcagggcttctggaggatgcagtgatcgaggagcctcccatttccattaaagaagggggcatcatcaaagacggcttctcagaacagatcgaccagcttaaaagtgccaagaccgacggaaagcagtggctcatggagttggaagagagggagaggcaggccaccggcattaagaacctgaaggtgaagtttaacaaggtgttcggatattatctggatgtgaccaattcttataaggacaaagtgccggagcattacatacggaaacaaacccttgccaattccgagagatacacgacagaggaattaaacaagctggcggatacgatccttggagcggaggacaaactctgcgctctggaatatgagacctttgtgtcgattcgggaaacgctggccggagagatggagagaatcaagaaaagtgcgggagtgatcgcctatctggatgtgctctgctccttggcttatgttgcggagagaaacggttatgtacggccaaagctgaacacaaaaggtctaattgacatcaaggagggccgccacccagtggtagaacagatgatgtccaatgacatgttcattgccaacgatacttatctggacagcaaacggcaccgggtatccatcatcaccggtccgaatatggctggaaaatcaacatatatgaggcagtctgccctgatcgtactgatggcgcagatcggctcctttgtgccggccatgaaagccaacatcggtattgtagacaggatctttacaagggtgggggcatccgatgatctggccagcggacagagcacctttatggtggagatgagtgaggtggctaatattttaaggaatgccacaaaggacagtctgctgattctggacgagatcggacgggggaccagtacctatgacggactgagcattgcatgggccgttgtggagtatatcagcaattctaaactattgggagccaagacgctgtttgccactcactatcacgaactgacagagctggaaggaaagatcaccagtgtaaacaattactgcattgcggttaaagaacagggtgacaacatcgtgtttttgagaaagattgtaaaaggcggggctgacaagagctatggaatccaggtggccaagcttgcaggagttccggatatggtcatccagagggccaaagagattgtggctgaattaagtgacagtgacattgtctccaaggcacagaagatacaggtgtccgatgagccgcagcagctgtctttgtttgccaatgacagcgagccgaccatggagcacccgtttatggcggagatcagagaaaaggatctgtcaggaatgaccccgctggaagcgttgaactatttgtatattctgcagaacaaacttagggaagaggaatagttatggcagaaattcagttattggaccagaagacaattgataacattgcagccggagaagtgatcgagcgtccggcttccgtagtaaaagagttggtggagaacgccatagatgccaaggccacggcagtcacggtggagatcaaggacggcggcatgacgcttatgcgggtgacggacaacggatgcggcatcccaaaggaagaggtaaagactgcctttctgcgccatgccacgagcaagatccgcacggtggaagacttggtctgtgtctcgtcactggggtttcggggagaggctctctcaagcatcagcgcggtggggcaggtggaagtcatcactaagaccgctggggctttttcaggggtctcctacaagatcttcggcggggaagagcagggctttgaagagatcggcgcaccagacggcacaacctttcttgtaaggaatctattttacaacaccccagctagacggaaattcttgaaaagtccagtgacagaggcgggttatgtggagcagattatggtgcacatggcattgagccatcctgatgttgcgtttaaatttatccataacagtaagaataagatgtatacctctggaaatggaaacgtcaaagatatcatttaccatctgtacggaagagaggtggcgggagccctcctgcctatctcagtagagagccagacggccaaagtggacggctatatcggaaaaccgtttatttcccgcggaaaccgcaactatgagagttactttatcaatggcaggtatattaagagcaagatcatatataaggccgtcgaggatgggtataagacttttaccatggcacataaatatccgtttgtatgcctgaacatccaggtagagcctgaacttttagatgtcaatgtgcatccgaccaaaatggaaatccgtttccgcaacgaaagggagctgtatgagctcatagagtcaggcatcaaggaggttctgacccacaaggagatcattcccaaagcggagattggaaaacctgagaaaaaagaaaagaaagtgctgccggggaaaatgccggagccgtttgagcaggtcagaagaaacgggaaaagtcccgatgagccggaaaaggaagccgtaccagaaccatgggcggccggcagggactttcaaaaagcgcagaatccggctgtgcaggtacaaaagagtgtttcggcaggtgtcaactacaatgaacaggcaaagacagaggagataaagcagatcactctcaatgagacctctctgctggatgaggaggcaaggccggaccggaaagtcatcggccagctgtttaagacttactggctgatcgaatatgaggaccagctgttcatcatggaccagcacgctgctcacgaaaaggtgaattatgaaaagctcatgaagtcctttagggagaaaaaggtttacagtcagggagtggagccgccttacgtggtgacactttctatggctgaggcaaaggtgctctcggagacaaaagaggtttttgaacagcttgggtttaccatagaggcatttggaggcaatgaattctgcatccgtcaggtgccggcaaacttatacggattaaaagagaaggagctgtttatggagcttttggattccctcactgcagacgggataaaaaaggatccggagatgatcacggataagatcgcatccatggcctgcaagatgtcagcgaaaggaaatcagagaatgtcacttcctgaggtgaaaaatcttttggaccttttgatggaatgtgaaaatccgtatacctgtccccatggacggcctacgatgatcaagatgagcaaatatgagatagaaaagaaattcaaaagagttttgtaacatttgatttatatttatgccagattaggaaatgggtggttttatgaacgatagagaattgttgggtttggcgaaagaggccaggaagcgggcgtatgctccgtattcgggtttttttgtgggggcggctcttttgtgtgcggacgggagtatctataccggctgtaatgtggagaatgcctcttacggcgcggccatctgtgcagaacgcaatgccatcagcactgctgtggctgatggaaagagagagtttgaggccattgccattgcggcagagggaaagggctgtgtctatccctgcgggatctgcctgcaggtgatgaacgaattttccaaagagatgcgggtgatctgtcaggatcaggagcgctttcagagtttttcactgggagaactgctgccgaaaggatttgatgagttatgaagccgttaatcatactgacaggacctacggcagcagggaagacagagctgtctataaagcttgcgaaaaaagtgggaggggagatcatctccgccgactccatgcaggtttataaaaaaatggacatcggcactgctaagatcatgcccgaggagatgggaggtgtccgtcattttctcgtggatgagctggatccggcggaggaatttcatgtggtgcggtttcagcagatggcaaagcaggcgttaaaagagatttatgaaaaaggaaagattcctatcgttgtgggaggaaccggattttatatccaggcccttttatatgacattgatttctccaaggaagattcagaccaagagtaccgggaagaactccgacagctggcggaggaaaaaggaaatgcctatttgcataagatgctctctttagtggacccggaatctgcgtatgcaattcatgaaaataatacaaagagagtgatccgggcgctggagttttataaaaagacagggagcaagatttctctgcacaatgaagaagagagaaaaaaggaatcctgctatcagtttgtctattttgtcctttcccatgacagagaggttttatacgacagaatcaatcagagagtggacaagatgataaaggcaggattgataaaagaagtagaacggctggccaaagagggctatacgaaagatatggtgtccatgcaggggatcggttataaagaagtgtttgattatctggaaggaaggcagagcttagaagagactacagagcgtataaaaaaagatacaaggcattttgcaaagcgtcagcttacgtggtttcggcgggaaaaagaggtgacgatgatcaaccggcaggatttccggggagaagacgagattctggcttttatgctggaaaagataaaagagaaaggcatttatgatggagcagttaaaagagtattataggcagcttggtgtatcagaagaggtttacgattacgcaaaaaaaattgaggcatcgttggctggaaggtttgccaagtttgatgccgttgcggagtttaaccagctgaaagttttgaaggcaatgaagaaaaaccgtatttcggaagcacatttgggagagacaacgggctacggatatgacgatatcgggagagaggccatcgagggcgtctatgcagatattttccagaccgaggatgcgctggtgcgtccgcagatcacctgtggtacccatgctctggggcttgctttgagtgccaacctgcggcccggggacgaagtgatgtcaccggtaggaaaaccttacgacacactggaggaagtgatcggtatccgtccgtccaaagggtctctggctgaatatggtatcacctacgcccaggcagatttaaaggaggacggctcctttgactatgacgccatcaaagcggccatgaatgacaggacaaagctggtcacaatccagagatccaaaggctatgccacacgtcccaccctgtctgtggagaggattagggaactgatatcttatgtaaagggtattaatccatctgtgattgtcatggtggacaactgctacggggagtttgtggaagagacagaaccgagtgaggcaggagcagacttagttgtgggatcgctgatcaaaaacccgggaggggggcttgcacccatcggcggttatatctgcggtaaaaaggaactgatcgaacagtgcgcctaccggctcaccacaccggggcttggaaaggaagtgggggcatctctcggagtgaaccgccagtttttgcagggactttttctggcaccgactgtggtcaacagcgcgttaaaaggagccgtatttgcggcaaacctgtacgagagcctgggctttcatgtagttccaaacgggaccgagagccgccacgatatcattcaggcagtggaatttaacgatccccaaaagctgatcgctttctgtgagggaattcaggcagcttccccggtggacagttatgtgaccccagagccgtgggacatgcctggctatgacagtcaggtcattatggcagcaggggcgtttgtgtcaggatcttccattgaactcagcgccgatggccctatgaagccgccgtatgccgcttactttcagggaggtctcacctatccacacgccaaatacgggataaccatgtccctgcagagaatggtagaaaaaggattgatcaggctgtaatgtcgtatgccggttttttatgtcaaagcgataagaaaaacttaaggaaaccgtcatagttcctgggtatacaagaaaaagatcttatggtaagatttattaatgagaaatgtttttttgcgtattcctttgaggaaaggaatctatggaaaagagacattatacaataaaagagcttcctgagtctgaacgcccctacgaaaagtgtgagcgcctgggaccagaagcattgacggatgcagagcttttagcggctgtcctaagaagcggtgcaaaggacaaacgggctacagtcctggcagtggagattttggagttgcacccgtattacgaaggactgctcggcatctgccatgtgtccatgaacgaactgatgcggatcagaggcatcggaaaggtcaaagccatacaggttctctgtatcgcagagctctccaggcgtctgtcctcacagaaagtacataagaagattagttttcatactccaaagtccatcgcggattattatatggagaaaatgcgtcacttgaacagggaagaaatgattttaattctttttaatgggaagaataaagtcatcaaagaactgaaggtatccgttggtacggtcaaccagacagtggcgtcgcccagggaagtttttctggaagctttgaagtatgaagcggtatatttgattttactgcacaatcacccttccggggatccaacccccagcaggcaggatgtctctgtcacaaaacggatgaaggaggcaggcgaactgcttggcatttatctgtccgaccatatcattataggagaccgttcttatataagttttaaagaagaacaattactatagccttacaggcggtatggaatggagtgtttatgaaaaagggactgattggaatcgagcttggctcaaagaatctgaggatttattcgagagagaaggaccagatcttaaggctcaagaatgtcattgccctgaccgaggattcggaaacggcagcagtgggaaacgaagcgttttctatgtatgagaaagagccgcaccagattcagattatcacaccgatggttcacggagtcatcggtgattatacgaatatgcgaaggcttctcgctgagattctcagacgctatctgagaaagctaaaaaaatatgaattttatatggcggtgccgtcagacatcacaggagtggagcgccgggcattttatgatcttatgctggagtctttccgctcggtgagagaagtaaagctctggccgaaacctatggcggatgccgtggggctgggcattgatgtgggagctccctgcggcaacatggtgatcaacatgggggcagatactacagagatctctgtggtatctcttggaggcatcgtaaggagccgcctgatcaagcagggaggcagccagattgaccaatggttgatctctaagttaaagaggaaccacaacattgagatcggtatgaagagcgcagagcgtctgaagcttctttattccagaatggaagcggaagacaaggatgcctacgtgaaaggccgtgatctggtcagcggtcttcctaaaaaaatccaggtcccaggggatatagcacaagagaaggtaaggaactatgtcaatgatattattatagaggccaaggctatgctggaagtgatcccgccggaactggcgtctgatatcatggtggagggaatctatctctctggaggaaattcttctttttcaaagataccggagtggatggaggaagccatcgggatccgcgtccattctgcggaacagccggaggaaagcgtcatacgaggcttgaaggcgattatgaacaaagacaacaaatactagtgaggaaagtggaatgaaatttcagaagaaaaatatgcgttcaaggcattacctgtttatttttgtaggaatatgctttttgttgatcggaatcagtgtttttgcaggaggtgtgctgtctcctgtcaaggcggtggccacaggggtcttaagtcctatgcagaaagggattaattccgttgggaacagcattttttcctggaatgaaaatataaagacaaagaaacagctgaaagatgagaataaagtccttcaggagaagattgattcattgaagatgcagaaccggattctctcccaggaccaggtggagttaaaccggctgcaggatctcctgaagctgaaggcaaagtataaaaagtacaatactgtgggggccagggtcatcagcaagggatccggcaactggtttgagatctttgccatcgataaaggaagcaaggacggcattaaaaagaatatgaatgttattgctgacaacgggctggtgggcattgtatacgatgtctctgaccattacgcaaaggtccgaaccattatcaacgacacgagcatggtcagtgccatgtttatgaagacaaaggattcctgcattgtcaaaggaagcttaagcaccatgtccgatggatatctggatgtggtttacatcgataaaaatgccaaagtaaaagaaggcgatgaacttgtcacatcctatttaagttccaaattcgtggaggggctttccattggaaaagtgtccgatatcaagctggattccacaaagcttacaaagactgcgagagtgacgccgatcgtggatttcaagcatttgaaagaagtcctggtgatcacggacctaaaagaaaatgtcaatctggatgaagatacaaaagaatagggcggtggaaggatgaatctgaaaagaacaatattttatattctatctgtgatcttttgttttttgctgcagacgtcagtatttcaatttttaaagctggctgatgttatgccgaacattctcctgatcctcacggttaccctggggctgatcagagggaaaaaggcaggcatcggcattggattttcctgcggtcttttgattgacatatttttcggtgacgttctcgggcaatatgcccttctttatctgctcatcggctatatcaacggatgttttaattctctcttttatgaggatgacgtccttctgccattcgggcttttagtcatcaataccctggcttacagctttgtgatctttttctttttctttgcactgagaggaagattcgcatttttcagttacttaaaagatatcatgataccagaagcagtctatacggggctcatcgcgctgccgctgtataaattccttctgttcatcgacgtacgcatcagtgattcagaaaaaaggagcatgttctagtgttaagaaagatacaaaaccaagtagaaaaattattggcaaacaggcttctggctatgtcggttttgtttgccgtgctgtttcttgtgttggtctaccgtctgtttgtcattcagatcgtgcaggggcagtcacataaggaagatttcacttacaaggtggaaaaaacggtcaagacttccgggaccaggggcaatatctatgactgcaacggaaagctcctggcctacaataagatggtctatactgtcaatttccagaatgacagcaagttcaaaaccctggcccagaaaaataatacttcagagagctatgagaagaataaagtcatctacgaagtgatcaagatcctggaaaagaacaaggactcttttaagagcgatattcctatagagatcaccggtaacggaaccttccgttttacggagaagggttctaagctggagcgcttcaagagggaagcctttgggatcgggacagatacaaaggggctttccaaggaacgtttgaagctccgccagcagcagctggatgccagcgcagaggaggtttttgaatatctgaggaacggaactatgggtagtcccggtgtcggaaaaatgtttgacattgatgagaagtattcggacaaggatgccttaaagatcatgtcggtgcgttacagtgcgtacttaagccgttattcccagtatatgaaggtgacctttgcgacggaagtcagcagcaagagcattgctgagatcgaggagcgctccaatgaactgaccggcatcgatgtgagcaccaaatccatccgtgtctataagaaaagcgaggcaatgtctcatgtgatcggctacaccggcacgattaacacggaggagctggaggattacaacaaagggaaaaaggagagcgacaaagactattatgctatggacgatgctgtaggaaaatctggcatagaaaaggagttggaatcctatctgcacggcagcagtggaagccagactatgatcgtcaacaatataggaaagatcgtaaagacaaccaagacggagaaagccggaacaggaaataatgttgtcttatccatagacagtgatttgcaagaatatgcctataatctgctggagagaaggatcaccggtattgtgctctccaagcttactacgtccgattccaaaggggaccggagtgatatcaggatcccgatcaaggacgtatattattctctgatcggtaacagtatcgtggacatcacggatttaaacggtgaacatgccacttcctatgaaaagagtatgtacaaaaagatacagagactaaaaaaagacagtataaagaccattgagaataatctcacagacagcaaaaaagcatataaggatgagagtgaagaaaagcaaaattatgcaacttatgtatataagatgctttccaagaaaaaagttcttttgaccggctccattgacacgaaggacaaaacctacctgaaatggaaagatgaaaagattgggctgggagaatttttaagatatgccatcaacaaagaatggattgatatctctatgctggacatttcctccaagtatacagatacagataagatttttgaggcactggtatcttatataggagatcagcttgaaaaggacgatgaatttgatctgaccgtgtgtgagcaaaagattggtaccggtgagctcagtggaaaagatgtatgccttctgctctacgagcagggagggctgagcaagaaaaaagatgcatccacctaccagagtttaaaaaacggttcactggatgcgtactcttttatccgccaaaagctttctgcccgggagatcacaccggcgcagcttgggctggatccctgctctggttccatcgtgatcaccgaccctgacacgggaaaggtaaaggctatggtcagctatccgggatacgatagcaacaaactgtccaatggaatcgacagtgattactaccgacagctggcaaactccacagcaaccccgctgtacaatcaggtgctgaatcatagaacggcaccaggatccacgtttaagcctttatccgccatcacggcgctcaatgaaagtacgattacaacgggaagccagatccagtgtaccggtgtgtttgataagatcagccccgaagcacactgctggatttatcctaacggaaagcacggctacaataatgtagcgggagcattagaagtctcttgtaattgcttcttttatgaggtaggatatgatttaggaatgaccggcggatcttacagcagcaaaaagggtctggaggcgctgaaaaaatacgccacaaagatcggcctgaataaaaagtcaggtatcgagctcagtgaaatggctccgcatatttcggatgagacatccgtccgttctgcgatcggacagggaacaaacagttttacaccaagtcagatatccaattatgtgacaaccctttccaacaagggaacggtatatgatctgagcatcttagataaagtcacaacatccggaggaaaaacagtcaaaaaatatggggtgaagaaaaagagtaagctcaccttgaatgacgattcttactgggatgcagtatggtctggaatgcggcgggtcgtatccggaaagaagggtgctgtgaccagtatattcaaaggactgaatgtaaaagtggcagggaagactggaacggcccaggaagataagaagaggccgaaccatgcgttgtttatatcgtttggaccgtatgaagatcctgagatcacggtcactgctgtcatcccttatggatatacctcatccaatgcggctgctgcggcaaaggatgtctataagtattattttgcaaatgataaagagaaggcgaaattaaagaaggacaagaaggtaatttctgcggcaggttccgtatctgattaagagaggtgaaaatatatgaaagaaccagtattgttgaaaggaaacaattttggtttgacgattgtcctggatgacaagatagaatttgaagaactgctcacgatcatcgagcagaagtttgtggaagccgctaaatttttcaatacgaagacccaggttgtgctaaagatcgagggaagggttttaagcgtggaggaaaccgaacgggttctggaaaagataacacaaaacagctctctttccatcgcatatgtgatggaaggagaccaggttttggagaccaaatttaaaaaggtgatagaggagaggtccatcaggctgaaagagtcagagagtgaagcccgtttaaaaagcggcggagtgtccttcggacagttttaccaggggacattgaggtcaggacagagccttgaatctgatgccagtgtggtggtcataggggatgtgaacccgggcgccactgtaagggcaaaagggaatattgtggtacttgggtgtgtcaaaggctatgtatttgcaggggtgggcggaaatgaaaaagcgtttatcgccgcactggagatgaagcccatgcagatccggatcggaagccatattgcaagatcttctgatgaagaatcggcaaagaaaaaatggtttggaaaacgggcaaagcagggcgctgaagaggaagcaaagatcgcgtttgttgaagatgataatatttacatagaacctatatcaaaatcacttctgaatgaaattacagcttaaaacaatggaggaagaaaacaatgagtgaagtaatcgtaatcacatcaggaaaaggcggcgttggaaagacaaccacaacggcgaacgtaggaaccggactggccaaagaaggaaaaaaggtcgtactgatcgatacggacatcggacttaggaacctggatgtggtcatgggactggaaaacaggatcgtatataacctggtggatgtggtagagggaaactgcagaatcaaacaggctatgatcaaagataaaaagtatccggatctttatctgctgccttccgcacagacaagagataagtcttccgtgagtcctgagcagatgaagaaagttgtggatgagttgaaagaagagtttgactatattcttctggactgtccggcgggcatcgaacagggattccaaaacgccatcgcaggggctgaccgtgccctgatcgtcactacaccggaggtatctgcgatccgtgatgcagaccggatcatcgggcttttggaggcaaatgagatacataagatcgacctggtcatcaacaggatccgtatggatatggtaaaaagaggggatatgctttccaaggatgatgtgctggatatcctggctattgaactgatcggagttgtgccggatgatgagaacattgtcgtctccacaaaccagggagaacctatcgtgggcagtgacagtatagcaggaaaggcttatgcgaatatctgtaagagagttatgggacaagaagtaccgtttttggatttggataccaaatcattcttcgagaaacttgccggtatattcaaaaaatagggaaggggtagaagaatgggtttgtttgacagcttttttaaaaagaaaaattcggcggatgaagccaaagaccggttaaagctcctgcttgtttccgaccgctccaactgctctccggaaacgatggaactgatcaaaaatgatattatcaaggtgatttcaaaatatatggagatcgatgcccagggattggacatccagattacccagaatgacgaagaacacaccggaccggcattatttgccaatattccgatccgtgaaatgaaaaagaaaaaatagacatggagtgataaaatgcttagaaactaccgactgcaaaactacaatataaagctggttctcaatgtattggtgctggccacattaggaattatttttatccacagcgcaaatccgtcctttgttttgaagcagggactagggctggtggtctgtcttgcggtcatggcagtagtttctctcatcgattatcagacgtggcttagaagctccaatctgctgtatatcatcaatcttctgttgttgatcggcgtcaagctgtttggtaaagatgtcaacggcgcaaaacgatggttttcattaggtcccctcgggactctgcagccgtcagagatcagcaagattgtgatgatcattgtgatcgcagattttgtcatccgccacgaagatgatctgaacgagccgaaagtattaggaaagctggcgctcctttgtgcaccgccgctttacctgatcttaaaacagccgaacctgtccaccacactggatattgtgttcatcatacttgccattgtgtttgtgggaggactcagctctaagctgatcctaagggttttaatcatagggattcctctttttgcagtctttatatggtatgtccagacgcccgggcagattcttttagagccacatcaggtggccaggatcatgtcttttttaaacccagccgcctatgcggattccacggcccttcagaccgctaactctgtcatggccataggatctggtggattgttcggcaagggatttgggtccaatactatctccgatgtatcggccagtgatgtgaatctggtatcggagaggcagacagactttattttctctgttgtgggagaagaatttggatttgtgggatgccttgtggtcatcggactgctggtacttttggtagcccagtgtttgaatgtggccaggaaggcagataatgcgtcagccaagatggtggctgtcggggtgtctgcttatatgggatttcagtcatttatcaatatcggagttgccacgggtaccctgcccaacacaggacttccgctgccgtttatcagctatggtctgagttcgcttttgtcggcctccattgccatcggcctgctgctgaatatatatcttcaacgtaaaaagtattaggaggaaccgttatgaacgtaggattagttgcacatgatgcgaaaaaaatgttgatgcagaatctctgcattgcttatcaggatattttaagaaagcacacgctgtatgctacggcgactacaggaaaagtgattgaggaagtgacaaatttgagcatccataagtttcaggtgggacattttggcggcatgcatcagatcggtgcactgattcagaacaatgagattgacttgctgatctttttgcaggatccggacaataagcagaggactcagggattctatgatgtcttaaacctctgtgacaaacacaacattccgtgcgccactaacctgccgacggcggaagcgctgatcatggctttggaccggggagatctggactggagagaaatgtacaaataggctgtcatccgacagtctttcttttcatcccataggagatttctatagaatcccctatggaacaaaaacgctctgcaggatgcgcacaaatgcgtaaggaaactatttgactacgtcaaactgatatcaggaggacagaatgaaaaaacggatattatgcatatggatgacagccttccttgttctgatgacagggtgcagtgcgctcaatacggtgacacagctttctgtgacttatgaggaccatctgagcaggcaggatgatgaattaaggtcagagaccctgggcgataactggaagtccaagggagcttatgtgggtgtcgtgtccagggaagacgccgacgtacggcagtattccggagtcaaagaggctcttcttgtgaataatacgacaaatgaagtgataacagcacagaaagtctttgaacaggcttatccggccagtatcaccaagattatgacggctcttctcgtattggaaaactgtaatctggatgatgttgttaccatcgatcaggatattacatttgatgacccggcggcggtgagcatgcacctaaaaaagggtgataagattactgtggaggcacttttgaacggtctcattgtcatgtctgccaacgatacggccattgcgctgggaagaaaagtggccggcagcgataaaaagtttattgcgatgatgaacaaacgggcacaggaattaggagctaccaacacacattttgccaatcccaacggactgcatttaaagaaccattatacgactgcatacgatctgtacctgatcttccaggaattagtaaaacacaatgagtttctttctatcgcaggaaaggccagcagcaacattgaatataccaatcaaaagaacaaactccaggcatatgatatgtccaccaccaaccaatacctgctgggcaattacaatcttccccacaaggtgtttatgctgggaggaaagacaggtaccacaggggaagccggttcctgtctgatcattctgactaagaatgaggacggagacgagtttatctctgtgatattaaaggcatccagcaaacagactctttatcacacgatgacggaagtactggaaaaggaaaattaagaggatggaacgttacaacacttactcggcacatttgaagaagaggttcggcgagaaagtctacaagcttccggtgaaccttccggtaacctgtcccaaccgcatggagggcagaggctgcagcttctgcgccggtgtgggaacaggctttgaggccatgtccgaaaaagtgccggtgagggaccagcttgagaagacaaagcaaaagatcgggaagcggtatggggccaagaagttcttagcttactttcagaattataccaacacatttctgccactgaaagattttaaagcttacgtgctggaagctctggaggcagaggacatcataggggtctccgtttccaccaggccggactgcatccgggaggattacctgaactttctaaaagaggaagtacaagaccggggatttgcggtgaccatagagctgggactacagaccgtcaactaccatactctcaaagacatcaacagggggcataccctggcggagtatctgaacgcggtgttgctcacagcgccgttcggttttgagatctgtacacatgtcatcttaaatcttccgggagatacacttaaagatgcggtggagactgccagagtgatctcggctctgccggtggatgtgataaaagcacattctctgtatattccgaagaactctgtcatgtatgaagaatacggagagggtaagatatcattatgtaccaaggaggaatacatagaacggctgactgaatttgtggcaaatgtaagagaagatatggtcattgagcgtctgttcagcagggtccctgaggatgatgcagtattttcaaactggggagtgagctggtggaagctgaaagatcagtttgacgaagaaatggaacgaaaaggatatgtccaaggatgtaagtgtaattatttaaatggggcagctttaaggcgctggaggatttagatggctagaaaaaaatcaagatggaatatcgggaccattgtttttcttgtcctgctggtctatgttatcattaacgtactgatctttgtgggcaaagaaaaactgacggtttacaaagtgacagaagataagatttcaactacatattccctgaccggtatcgccataagaaatgaaaagctgctgcaagcggaagacgatggttatattacatattatacggaagaagggaaacgggttaaaaagtccggaactctgtatgtactggacaaaaacggcaaggtgcagaaggaatttgccaatcaggtggaagaaatgaagggaaagggtgatatccaggagaattccagggttaaaaaccggctttctgagtttaaatccatttacgaggacaaggattttgaggatgtctatgacctgaaatatgatttaaaaaatgcagttttgggcatcaatgaaaagtccttaaaaaaggtcttggagcaggtgaaggagcaggttggagacgcagctttttccacgaggaaaagcaccatcagcggcatcgcaagtttttattcagattcctttgatgataaaaaggcttctcagatcaaggcaagtgattttgaaagagaaaattatcgggtgacaaagctgaattccacagacaaagtgaaaaagggagataccgtatgccgggtgaccaccaatgaaaaatggactctggcggtgctgctggatgaagagcagtataaaagcctgaaaggcagaaagacggtgatggtcaggtttgccgatgaccagatgaaagcagcggcgggtgtaaagacggaaaagaaaaaggacggttattttgcatatctgtcactggaccagtatttgatccgttacatcggcgaacggtatgtggatattgatttgatcctggatacctatcagggcttaaagattccggattcggctattgtctcaaaacagttttatcaggttccggctaagtatatttcaaggggcaacaacaaagccagtgagggctttagtgtgcgtactacctccaaggacggtaatgtcaaggtagaacagaaggaatttactatttataagaagacgaagaattactgctatctagatccggaagaggtggaagagggcacaacatttgaagctatggatgccggagaccgatttaccgtgggggaaatgaagaatctcaaaggagtttactgtaccaatcagggttatgctgatttcaggccggtccaggtcattgtaaacaaagacggttattccatcgtaaagactgatacgctggaaggcatccgactttatgactttgttgttcttgacagtaaaacgatcaaagaaaaccagatgatatattaaagataggaagtgtttgttatgttaatcgaccagtataatgaagtaaaggaacgtgtgagagctgcctgtgagagggccgggcggaatccggaagacgtgacagtggtcgcagtcagcaagacaaaacctctctccatgatcgaggaacttaaggactgcggagttatggattttggggaaaataaggtccaggagatcacaaaaaaatatgaacagatcacgagtccagtccgttggcatatgatcggccattttcagacaaataaagtaaaatatatcgtggataaggtagcgctggttcattctgtggattctgtgaagctggccaggcagatcagcaaagaggctgtaaaacataaggtagaggtccctgttctgatccaggtcaaccttgcaaaggaagaatccaagtccggattttacgaggaagagctttatggggcgctggaagaaatttctagtctccccggcattcaggtggagggtctcatgcagatcgcaccattcgtggaaaatccccaagataaccgaatatatttcagacgcatgcggcaattatttgttgacatcaaagagaaaaactttgataatatagctatgaacatcctgtccatgggaatgacgaatgattatgaggtcgcggtggaggaaggctctaccatggtacgggtaggaacaggtatttttggggaaagagattacagcaaatagtggaggatagagagtatgggtgcagtggataagctgttgaattttatgaagcttacagaagatgaagaatatgatgagtacgatgaatatgaagaggaggaagaagaggatctggatacagagcgccgttcattcttccgcaaaaaagacacagtcaaagaggaatccaatgtgattgaaccgatcgcttacacaagcagagaaaacaaagaaccaaagccgagacgctttggaacggggaaagtggtatctatgaacggacacggagtagaagtttatgtgatcaaacctcaggattttgcagaggcccagacggcggcagaccttttaaaagaaggaaagaccgttgtcatcaacttagaaggcgtggagcttacggtagcccagagaagcattgattttgtgggcggagcgacttatgctattgacggatccttacaggctgtttcaaacaatatctttatcgcggcaccggacagtattgaagtcaacggggatttaagaagtgagatcatgaatgaaaacatcatctccccgcaattaaagtaagcgatggatgagcagctgtttaaaaaacgtttggaagaattagcgcagactgcatttatgaattcggtgtatacccatactccgtttctgtcagagagggaacagagcctctttcacgagatgagaaaggaactgtcctttgcagatgcctcactttatggcggccatgaagattatgaccgctgtattgttgtgttcggctcaaaggaaatgttcggatatgaaggtgagattccattggcctgtgccaaagtctcgcctctttttgaaaaatacgcagaacccctgtcacacagagattatctaggggcacttatgaacctgggaatcgagagaagccagatcggagacattttagtctcaggaaaagaggcgtacattttctgttttgaacatatggccgggtttctgtgccatgaacttacaaaggttaggaatactcaagtaaacactgccgttgtggattttaaagagatccattatcagcaggagtatattacaaaagatggctttgtgtcttcaccaaggctggatgcgcttgttgggctggcttacggcctgtccagaagcaaggctctttcattgtttcagagccagaaagtatttatccgggggaaattggagacaaggaacagttaccaggcaaaaccagaagacgttatatctgtccgtggatttggaaagttccggttttcggagcagggaagagagacgaaaaagggcaggtaccacgtgaagctgcaaatttataaataggaggagacagatgattacaccaatcgagttattagggaaggaactgaaaagaggatttggctataaggctattgaagtggatgagttcctggaggaagtggccagagattacgagaaggtctacaaggagaacaatgaattaaaagagagggtttccgctttgactgagaacctggatcactaccgggtgatcgaagaatccttgaaaaaggcactggtccttgcggaggaaacttccaaggaaaccatcgcaaacgcagacaaggcggcaaaatccatggaagaacaggcagagatggaggccagagagatcatagacaaggccaggagagaagctgaagattttgcacgacaggccagggaagccttcgataaagagaaccagcaaaagcaggaagagatcgatgctctggaaaaacagatcaataaattaaacggagattatgtgtcttacaagtccagaatgctgcagtttatcaacggccagctggattatcttaagaatccggtctatgaactggagatttccaaaaaatcagacaaggaagagacggaggcagcagtgacagaggagcctaaatatgatggagaagaatagtctggaagtcagggaacagggacaaaagatatatgacatttatttcagggattcctttgaggaccttatggaggcgatgtccggtctgggtctgtccggacggaaggtctgcatcgtgacagagagtcatgtggcgcctttatatttaaaagagatctatgatcttttaaatccggtgtgcgcaaaagtgaccaccttcagtttcagcgcgggggaggcccacaagcagttaaagaccatcgaacagttatatgagcagctgatccggaaccattttgaccgcaaggatctgatcgtagctcttggcggcggtgtcgttggagatatggccggttttgcggctgctacctacttaagggggatagattttatccagattcccacaaccctgctctcccaggtggacagcagcatcggcggcaagactggagtggattttatccagtacaaaaacatggttggggcatttcaccagcctaagctggtctacatcaacgtcaacacattaacgacactgctggaccgtgagtatgcgtccggcatggcggaagtcatcaagcacggactgatcaaagaccgggagtactatcactggatccgaaaccatcaatcagaaatactttcgaaagactctcagatcctggcggaaatgatcctgaaaagctgtgatatcaaacggcgggtagttgaggtggatccgaaagagcagggggaaagagcattattaaactttggccacacactgggccatgctgtggagacgctgatggatttttcactgctccacggagagtgcgtagccattgggtgccggctggcactgaagctttccgggaaacgaggtatgatctcagaggaagaggttaaagaggccaatgctctgtttgatgtttttcatctggaccagaggtttgaccggctgaccgcggagcagatcatagagacgacgaagtccgataagaaaatggcaggcggccatatccgttttattctattaaagaacattggggaagcctgtattgatctgacggtcagtgacgaagaaatgatggaagtgttagaggaagagttagaatgaaacatgtgagagtattcatttcaattgttctgcttctggccattgaccagatgaccaaagcggcagcggtagtgtgtctttcaggaaaggaagcgatcccggtccttaaagatatttttgaactgcaatatgtggagaaccgcggagcggcatttggaattctccaaaaccaacagtggctgttttttattatcactgtggcggcagtggttttgctgacagtcgtctataaaaagctgccggctgagaagaaataccgtccgctccgtctgtgttatatctttttatgcgcaggtgcggtgggaaatctcattgacagggtcgttagaggatttgtggtggatttcttttacttcaaattgattgatttccctgtatttaatgtggccgacatttatgtgaccgtgtctatggcagtactgttctttcttatcttggtgtactacaaggaagatgattttgcatttttagaaaaaaggaaacaaggctgatggaacaaaagagacagtttacagtttcaaatcaggagacgggaatcaggctggatgtctgtctggcaggaaggttcccggagtttaccagatcctatcttcagaaactatgcaaggattttgctgtatcagtggaaggtgctgttaaaaagagcaattataaggtcagggagggagaacaggtttctttggacataccagagccaacggaactttccatcaagccggaaaaaatggatttggatatcgtatatgaggaccaggatatcattcttattaataaaccaaaagatatggtagtccatccggcccctgggcattatgagggcaccctggtcaacggtctgatggagcattgcagagaggagctttccggaatcaatggagtattgaggcctggcatcgtgcacagaatcgataaggacactacagggatcctggtcatctgtaaaaatgacatggcccaccagtctctggcgaaacagctgaaagaccatacgatcacaaggcggtaccacgccattgtctatcacaatataaaagaagattcgggaacggtggatgctcccatcgcaagaagcaaaaaggaccggaagaagatggcagtcgaccgggaggcaggaaggcgagcggtcactcattaccgggtcttaaaacggctgaaagaaggctttacctatattgaatgcagcctggagacgggaaggacccatcagatccgggtgcatatggcatccgtcggccatccgcttttgggggatactgtctatgggccgaaaaagtccagatactcactggacggacagtgccttcacgctaaggtgctcgggtttatccatccgaggacagaggaatacatggagtttgaagtgccgctccccgcatattttgaggagcttttaaatcgtttaggttgaaagaaaggaagatcagcatggaaattggatttatcggatgcggaaacatggcaaaggccatgatttcaggaattcttgcaaaaggaacttttcagaaggacgagatcatcgcttccgggccgacaaaagagaaaatggacggggtttcccaggagtttggtataaagacaacgctttataatattgaggcagcaaaagattccaggatccttgtgttgtccgtgaaaccgcagatgtatgacaaggtcatcaaggagatccgcgatcatgtcagcaaagaccagcttgtggtcactattgcggcagggctttccatggagtcagtggagagaagctttggaaaagagacaaagatcatccgcaccatgccgaatacgcctgctctggtgggtgagggcatgacgggcatgtgtatgaatccttatgtaaaagaggaggaagcttgtgaggtcacaaagatctttgaaagctttggcagggtagagatcgtagatgagaagctgatcgacgcggttgtaggtgtcagcggcagttcaccagcttatgtctacatgttcatcgaggcattggcggatgcggcagtactgggaggaatcccaagggaaaaagcgtatacatttgcggcccaggcagtgctcggcagcgcaaagatggttcttgagacgaaggagcatccaggaaaattaaaagatgcggtgtgttctccggcgggaacaaccatcgaggctgtgagaattctggaagaaaaaggattaagaagcgcagtgatcgaagctgccaacgcagctgtggaagtcagcaaaaaaatgggatgagtctttacaatagaatttttgtatgatatactcatcaagttgaccggtactcagatttcggagctctccgaccaagtcttagtatctggcggctaatatatttcaaggaggaaacaaaatgatttcatcagaaaagaaaaaacagatcgttgcagatttcggaagggatgccaatgacactggttcaccggaagtacagatcgcgattcttactgcacggattgaagaacttcaggagcattttgacatgcacaagaaggatcatcattccagaagaggtcttttaaagatggtaggtaagagacgtaatcttttagcatacttaaaaaataaggatgttgcaagataccgtgcactgatcgagagactcggactgagaaaatagccgaattatggggacaggaattgaaattcctgtcttctttttttggtatagttatgatacaataaaaaagttgtaaaagacgtattccgagactactaaggagtctacagccagctgcacagagcacatccacttgtatgctgtggaccgcttagttgtttcggcgtcttttaaataagattttaaggagaaattaaacatggtaaaagaatttagtatggatcttgcaggacggaaattgaccgtagaggtaggccgcgtggcggctcaggcaaatggtgcggcatttatgcactatggagataccgtggtcctttccacagctacagcatccgacaaaccaagggacggaattgacttcttcccattgagcgtagagtacgaagagaaacagtacgctgtaggtaagatcccgggagggtttttaaagagagaggcaaggccttctgaaaacgcgatcctcacagaccgtgtgatcgaccgcccgatgcgtcccctgttcccgaaagattacagaaatgatgtcctgctggacaaccttgtgatgtctgtggatccggactgcagcccggaacttaccgcaatgcttggatctgccatcgcaacctgtatttctgacattccatttgacggaccgacggcgtccactatggtgggactgatcgacggcgagttcattatcaatccaaccgcggcacaaaaggaagagtctgagatggcactgaccgtagcctccacaagagacaaagtcatcatgatcgaagccggtgccaacgaagtaccggaggatgtgatgatccaggcaatcttcaaagcacatgaggtgaacaaggagatcatcgcttttatcgataccatcgtagcagagtgtggcaaagaaaagcatgaatacgagcatcatgaaatcgaccaggaaatgtacgatgacatggtttccttcatcacaccagaagctatggaagaagcagtctttaccgacgaaaagcaggtgagagaagaaaatatccgcgctattgaagaaaagctggctgagcgttatgctgataaggaagagtggctttcccaggtaggagaagcagtatatgctttccagaaaaagaccgtgagaaagatgatcttaaaggacaaaaaacgtccagacggaagagatatcacagagatccgccatcttgcagcagaggtggactgtcttcctagagttcacggttctgccttgttccagagaggtcagacacaggttatgacagtgacgacactgggctccctttcagaggctcagagactggacggtatggatcaggaagagaccagcaaacgttatatgcaccactataatttcccgtcttactcagtgggagagaccagaccgagcagaggccctggaagaagagagattggacacggagcgctggctgaacgtgctttgattcctgtccttcctacagaagacgagtttccatatgcaatccgtacagtatccgagatcatggagtccaatggatctacatcccagggaagtatctgtgcatcctctctgtccctgatggcggcaggtgttccggtcaaagcgccggtagcaggtatttctgtaggattagtcacaggagacagtgatgacgattatctgatcctcacagatatccagggactggaagatttcttcggagacatggactttaaagtggcaggaacagacaagggtatcacggccatccagatggatatcaaaatccacggactgacagaccagatcattcgtgaagccattgcgagaacaaaagaggcaagaacttatatccttcacgaagttatgaatccggttatcggaactgcaagagatcacgtaggcaagtatgcgcctaagatctcccagtacaccatcgaccctgagaagatttctgaagttatcggaaaacagggcaagactattaacgctatcattgatgagaccggcgttaagatcgatatcgatgaatccggaagagttgacatcttaagtgaagatcaggaaatgatcgataaagccatcggtatcatcaaatctatcgtagaaccgctgaacgtgggagatatctacgaaggtgaagttgtcaggatcatgcagttcggtgcctttgtacaggtttcaccaaataaggacggactgattcatatttccaaacttgccaaggaacgtgtggaaaaggtagaggatgtggttaacatcggagaccgtgttgctgtcaaggttctggaaatcgacaaaatgggaagaatcaacttaaaactggaagaaaaattatcatagggaagagtatgagacgaaaagcacaagtgtttggcatcctggcagtatttgccgctgtggtggcttttacaggatgtgcaaagaaaaagtcagatgatgtaaagcggatcgggattctgcagctggtagagcacgatgcgttgaatgatgccagaaaagggttcattgacggtctcaaagaagacggatacgtggacggcaaaaatatagagatccagtataaaaatgcccagaatgaccagtctaactgccagaccatcgcctcccagtttgttgggagccggtgtgatctggtgctggccatcgcaacaccggcagcgcaggccatggccacggagacaaaggatattccgatcctggctacggctgtgacggatcatcaggcctccaaactggtgaaggataacaagaagccggggacaaatgtgtccggcacttcagacatggctccggtgaaggaccagatcggattgatcaagaaattggtgcctaaggcagagaaagtggcgttcctctattgttctgcagaggccaattcggttttacaggtaaaacaggccaggacagccgcagaggcagcgggctttcagactatggatgctacggtgtcagaatccagcgagatccggcaggttgttgaatcattaaaaggcaaagcggatgttatctacgtcccgacggataatatcatatccgccagcatgaatacggtttctatggtcgccaatgaagataagatccctgtgatcgttggtgaagaagccctctgtacgggaggcgggcttgccacatacggtatcaattattaccggcttggcaagcagactgcaaagcaggcggaggagatactggaaggcaggaaagaggtctctgagatgccggtaggctatcagaaccaatatgatctgatcatcaacgaggaccaggtaaagaaacttggaatccagattcctaaagagttaaaagagaaagcaaagtttgtgaaaacacaaaataaaagcaaataaaaaagtgggcctgcccacttttttatttgcttttaagaagaaccgtatttcggaaagtgctttgcttgacattgggaatcggcagtgatataatttagcacataaaagcgctgaagtgccggcgtaaccataaggacggaggaaagagttatgagaatgaaaaaagtaatggcagtaggccttgcagccgtgatgagtgcagcagtactctctggatgcggaggaggagacaagaagggcagtgcagagaaagaacagaagaaagtcggagtcgtacagctgacagagcatgcggcgttagatgctgcatacaagggctttaaggaaggccttgaggaggcaggatacaaagacggggataagatcaagattgaatataaaaatgcccagaatgaacagtccaactgtcagaccatcgcgtcccagtttgtcagtgacaagtgtgatctggtgctggctatcgcaacaccggcagcgcaggctatggccaatgagacaaaggatattccgatcctggtaacggcggtgaccgatccagcggcatccaagcttgtaaagagcaacaaagagcctggaaataatgtttccggaacttctgacctgacacctgtgaaaaagcagatggagctgttaaaacagatgcttccgaagactaagaaggtggcgatgttatattgttcagcagaggctaactctaagattcagatcgctatggcaaagaaagaagcaaagaaattaggatttgagacagtggatgcgaccgtatctgaatccagtgagatccgtcaggtggtagaatccctcaaaggaaaagttgatgcgatctatgcaccgaccgacaatctgatcgcagccggaatgaataccgtttccatggtagcaaatgaagccaagatccctgttattgtaggggaagaaggcatgtgtaccggcggaggacttgctacatacggaatcaattactatgaactcggaaaacagacagcagcacaggcagtgaagattctggaaggcaaagcagagcctaagacgatgccaattgaatatcagacaaatgcggacctgatcatcaacaaagatactgtgaagaagctgggaattaaagttccgaaagatttagagaaaaaagccaagatggtgacaacgatcacggaaaagaaaaaataagtggaatgtgcaaagcaaaactgtcttctttcattcatttgaaagaggacagttttttgttccataggaaggttcactgaactttactggtgcaaagtcttaaatcgtggtataataaattctcgtggacagtaaagtaagaaaaggagaaaagaagaatggatttagcagttaacatgcaaagtgcgattgcccaggggacactttgggggatcatggcgcttggtgtctatattacattcaggatactggatattccggatttgtcttgtgagggtacctttgccctcggaggctgcatcagcgcagttatgatcgtaaaaggggtgaacccctttgtttcacttatcatcgcactggcagcaggtatggcggcaggggcagtcaccgggtttttacatacaaagttaaagattcccgcgatactggcaggtattttaacgatgatcgccctgtactcggtcaacatacggatcatggggcagccgaatacctccctgctgggagaggacacggcatttacccaggcgatcgacgcactgaagctggaccagacaatggcgactctgctcgtgggggctgtcatcagtatttttgtagtgttatgtatctactggttctgcggtaccgagatcggatgtgccctgagagcaacgggaaataacgaatacatggtacgggctttgggagccaataccaatacatccaaggtgatcggccttgtcatttccaacggaatgatctctgtatctggtgcactggtgggacaaagccagggatacggcgacatcaagatgggaaccggagcgattgtcatcggtctggcatccatcgtcataggggaagtgatcttcggcaagcgttttaatttcatgtatattttagcctccgttgtattcggatctatcatttaccgtatgattatttcgcttgtactttatatgggcctgagcacggacgatatgaagctgtttacggcattagtcgtagcactggctctgggaatccctgcgatcaaggcaaggtattcccaaaaaagaattcctggaaaaggagggaataccacatgctaaacatcatcgatgtgcataagacatttaatagagggacagtcaatgagaagaaggctctggatgggatcaatcttcatctgaatccgggagattttgtcactgtgatcggaggcaacggggctggaaagtcaacaatgctgaatatgatcgccggtgtgtatcccattgaccagggaacgatccttttggacggcaaggatatctccgatctgccggaacacaaacgggcttatatgctggggcgcgtgttccaggatcctatgatgggaaccgcagccggtatggagattcaggaaaatatggctatggcccaccgccggggaaaaaacaggagcctgcgctggggtattacgaaaagtgaaaagaagctgtataaagaaaagttagcaatgctggacttaggactggaggaccgtctcacatctaaagtcggccttctgtcagggggacagcggcaggccctgacactgctcatggcaacactgaacaagccgagccttttgcttttagacgagcacacggcggccctggatccgaagactgcaaaaaaggtgcttgaacttacggaaaagatcatcgcaagagattctctgacagccatgatggtaacccacaacatgaaagatgccatccgtatcggaaatcggctgatcatgatgaacagcggaaggatcatctacgatgtctccggggaagaaaagaagaatctgaaggttccggatctgctgcagaagtttgaggaaaccagcggggaagactttgcaaatgacagaatgttgttatcataggaggaatacaggaatatgagcgattataaaattgagacaaaatgcatccagtccggatgggagccaaaaaaaggggagccgagagttgtaccggtttatcagagcaccacatttaagtatgatacaagcgaccagatggggcgtctttttgacttagaagatgcagggtatttttatacaagacttcagaatccgaccaacgacgcagtggcggccaaaatctgcgacctggaaggaggagtggcggcgatgcttacttcatccggtcaggcagctaacttctatgccatcatgaacattgcggaggcaggagaccatattatctgtacaacagctctctatgggggaacttttaatctgtttgcgcatacactgagaaaaatgggtgtggaagcgacatttgtggatccagaggtcagcgaagaagtattaaatgcagccttcagagaaaatacaaaagcagtgttcggagaaacgatttctaatccttcactggtagtcttggattttgaaaagttttcaaaagcggcccatgcacacggagtgccgctgattgtggacaatacgtttgcgacaccgattaactgccgcccgtttgaatggggggtagacattgtgacacattccacaacgaagtatatggacgggcatgcagtatgcgtaggcggagccatcgttgacagcggaaattttgactgggatgcccataaagataagttttcatgcttgacccagccggacgaaacctatcacggtgttgtctacacagaacgattcggaaaaggggcttacattacaaaagccactgtacagctgatgcgtgatctgggatcaattcagtcaccccagaacgcattttacttaaatattggcctggagacattacatctcagagtagcaaggcattgtgaaaatgccaaagctgtggcttcatggctcagggacaatgacaaggttgcctgggtacactgcccaatgctggaaggggaccagtattatgagagagctcaaaaatacatgccgaacggcgcatgtggtgttcttacctttgggctgaagggcggccgtgaggcttctatcaagatgatggacagcttaaagctgatcgccattgtaacacatgtggcggattccagaagctgtgttcttcatccggcaagccatacccaccgtcagatgaacgaccaggaattactggaagccggagtgcagccggatctgatccgtttcagcgtgggaattgaaaacgctgaggatatcattgcagaccttgaccaggcactgcagcagattggataaagataaataacatgacatgttccatatgattttcgttcagctcttagaatgtctcactccaatcatgtagaacatgggcgtaatgtctgctaaattagcatggctaaacagaagctgccatcttacgatagtttttcttcgatgtcgggtggatgagctttgcacaacaagatacagataatgtccgggactttagggagagagttccgggcatttttttcgccagatacaatcctaaggttgcccacaaagccccttgttatcatgctaactttgctcatgaagcttttaaatgcaagaaaggagacaaagtgactgagtagtgattgacttttcatatccagtctgatcagattttacattctttttatgtctatatgtaggaattgcataaaatctattgaccctcacgttacgtgatagaatatgatgaatttatcaagaaaaggaggtagtaatcaatgaaaacagtaaaggaagtgtcccagcttactgggatcagtgtgcgcacgcttcgctattatgatgagatcgggctgttaaaacctactaagaccagcatggcaggttaccggctttatgacgataaagcactggaaacgctacagcagattctttttttcagagaatttgatatgcctctgaaagagataaaagctttgatgcagaatcctgatcttgataagaagcaattgctgaacgaccaaaaaaagatcttgatcttaaaaaaagaaagattcgagcggatcatcgcaagcattgatgaaattctgaaaggagaaaacaagatggactttgaagttttcagtaaaaaagagattgaagagatgtacagctcaatgatagacaatatgtccgacgaacaaaaagatatttttatcaaacagtatggaagtatgggaaaattcgaggagcattttatggaaagtgcgtccagtgaacaggcgcagagaaattatgcaaaggtcgttgaatggtatggagacaaagaaagcgccctggaagcatccatgaatccggacaattctaagatcatacaggcatactccaaccggtatgacgctgttattaaaaaattggcggcaaaagtcggcattgatgtgaactcatttgaggtaaagcagatcgtgggtgaactggattttgtatcaaagcagctttaccaaatgaaagacatgtccgcatttatgctggagatggcagaaaaatatcaagaagatgtagagatgcagaaacggctgaatgagatttatggacagggaacaacagtgtttatcggacaggcgctggaagcgttttatcaacactaaattctttggatagagaatgagattttggtaatatatattatcagaagcttaaatctatagggggtccatttatggaaacaaaattaaagaatatgagaaagtccgaaatactgcagttgaaagacgaagtacagtaccagaacggacaggtagtcagtaaaaccctggcacaaaaccactccataagtctgacgttgtttgcttttgaaaagggagaagagatcagtacgcacgaatctggcggggatgcgctggtgacagttttggaaggcacaggaagatttacggtcgctggagaggaatatgttttaaagcagggagaaagcattgtcatgccggcaggtattcctcacgcagtttttggacaggaacggtttaagatgtttttaactgttgtattttagaagacggttcgaaaagattccgcggaaagcaaacgtttgcgcgggatctttttgcgggcttcactccatctaaaggtattaattaccatgagtttaaaacgtatgttctggtataatatctatgaggtgaggtagaatgaaaatggtagaaatattttggtatgaggaagaaaaacgtctgcaaatctgtgacaaaggcggacagagcagggagtttgatgtattagaaatgctattcttatcacaggacagctgcagggaccatacgggaaaagaatgggagtacatagaatataaagtgcggatacagtgcagaatggatgataattttagaacatgcagaatacggcattatccgcagaagatgaagtggtttattttagaacgatttgaaaaatatttatagcaaggaaagaagtatgtacgatagaagcagaaatgaaaacccaggacactagatgtgccctggattcaattttattctgagatatttaaaccggcaagcctggctaattcaaggatagaactttttgatatcttttttcctttgtactctacaagatcctccatttgaccagtaaaaatgtctgctgggttgtattttttcatgatgatcgtatcctcatccacgaaaatctccaggggatccctgtcgtttacatccagattacgccttaattcgatcggtaacgttatacgtcccagttcgtcaagctttcttacaattcctgtacttctcatgatttttcccttctgtctatgtatttatttataactccaccaacatgataacacagttatgcagagatttatggtggtagattatggaatatataggtgaatcctgtttccttatttatgcatatgtgatataaagggattgggatatatttacattgtaagccgatataaatgagatactaataatgtaattacccaggcaaccggaagggcgtttcatccgtttctagatttgtagaaaagggtgataaaatggttacatatagtgagttatttaactttgtaattatactttgtgctgttattgctttaataataacacacaaaaaatagacgccctgtcttttgatgtgaccccaataagttagactttatagcgaaatagtattttactgcttcgctatttctagtttgcgcgccatgggcgcgctctaacgggtgcaagtcccgaacatgcccaggtagtgggaaatgtatagccgaacggcaagggtgtccatcgtgaggtgaaatctgaaggaagccgaaggcaaatctctggtccgacggacagaaatcgcatataaggctaggtttcgagagatgagttggctagaagcaacaaagtctattaactaccacatttgtagaaacagagtaaatgcggcggacatatggagagaaagagcgtgcaccttaagcgtggaggtctcacagcggtttcattagcggagtaacaacgaactgtgagaagtcagccgagcccatagtagtggagaagtttctgtaatggaaatggagtgaaggggggaactatcaatcagttttagtagagtctcgattgcagaaaagacaacatctgccgtaaccaatcgggttaaggatggtcaattcaagcgagacagaaaggaacgaacgcgtggatacaagtagtctaatggagcagatattaaataaggataatcttaatacggcatatctgcaagtcgtgcggaataaaggtgccgagggtgtgaacggaatgatgtacacagaactcaaagaatatcttgaaaagaacggcgaaatcatctaggagcagttgaggtctagaaaatacacccccaaaccattacggagagtggagataccaaagccagacggaggtgtcagaaacctaggagtgccaacagtaacagatcgatttgtacaacaagccattgcacaaatattaaccccaatctatgaggaacagttccatgaacacagttatggatttagaccgaacagatgtgcacagcaagccatcattacagcacttgatatgatgatggaaaggattggatagttgacatggatttggagaagttctttgacacagtaaaccatgataagttaatgacgctcatcggcagaacgattaaggatggagatgtaatctcaatcattcggaagtttctggtaagtggaattatggtagacgatgaatacaaggaatcagtgataggaacaccgcaagggggggatctatcgccacttctagcaaacatcatgctgaatggactcgatgaggaaatggaagaacgagggctcaactttgtcagatacgcagatgactgtatcataatggttcagagtgaaatgtctgcgaggcgtgtaatgaggaatcttccaaagtttattgaagagaaactagggctcaaagtaaatatgacaaagagcaaagtagatagaccaggaggtcttaaatatcttggattcggcttctactatgacagcagagcacatcagtttaaggcaaaaccgcatgcaaaatcagtagtgaagttcaaagtaagaatgaaacaactaacttgtggaagttggggagtaagtaacggttataaagtacagaaactcaatgaactcgttagagggtggataaactattttaa

SEQ ID NO: 13 - DNA, 104927 bp, Anaerostipes rhamnosivorans
aggtagatagggcagaggtggaagtgcggcaacgtatggagctgactgttactaatcggtcgaggctttaaccaaagaaggtaaggaagatgtttgatgaaaggttctgtatgtagttttgaaggtatattttgtatctcaacataaaaaatgaaacataagaaataaaaactgtattggttcttacttcttagtttttgttttttgtaaagatttggcccggtggctcagccggttagagcgccgccctgtcacggcggaggtcgtgggttcgattcccatccgggtcgcttttccttattattaaggatttatatataaatttgggatcatagctcagctgggagagcatctgccttacaagcagagggtcataggttcgagccctattggtcccattttttatcagccgttgtggctcaattggcagagcagctgatttgtaatcagcaggttaccggttcaagtccggtcaacggctctcatagaagcatataaaatgcatttttatgtttgagttttatgctgaaatggtataatatatgagtatggtgggattcccgagtggccaaagggggcagactgtaaatctgttggcaacgccttcgaaggttcgaatccttctcccaccattttagcgcggggtggagcagtctggtagctcgtcgggctcataacccgaaggtcgttggttcaaatccggcccccgcaacttccagttgcatttaagtgtgcacatattaaaataaataaggctggtcatttatggtcagaattatttatttttaatgttttataggcagaaatgccttgaacagagaatttctttattctaagtacacggactgattaagttaatacacctgcccagatagctcagtcggtagagcagaggactgaaaatcctcgtgtcgctggttcgattccggctctgggcatcttaaagttctgatatgatcaggacttttttttgttccataggaaagttctctctatggaacaaaaaagccctccgggcatgatgcacacaaatgcgtgaggaaaaaggtcttggaatctcctctgtgtctatgatagaataggataaaatgaggctaaataaaacatatgaattatcctatttatgataaattaaaacaactgaataaggaagacgtttatccatttcatatgccaggacataaaaggcagaagcaatctattatggaaggcgatgccgtctttgcgctggatactacagaaatcactggttttgatgacctgcatcatccggaaggcatgattaaagaatcaatggagtatgtccgacatatatatggaagtaaggaaagttatttcctgatcaacagcagcactgcggggattttgtcggctgtaactgcggcttgcagatacggggacaagattctaatcagcaggaattgccataagtctgtatatcatgcgatatccctgctgggccttcgtcctgtctacttatatccagacattaaacaggatatttgcactggtattacatcatatcaggttagggagattctcaaccgggaaaatgggatcaaagctgcggtaattgtatctcccacttatgaagggatcgtttcagatattagagggattgccaaagtgctccatgaacgtaacgttccgctgattgtagatgaggcccacggggcccatttcatattccacagtagatttccggaaagcgcggtttcacagggggcggatgcagtaatccagagcctgcacaagactttgccttctttgacacagaccggccttttacacatttgcggcagccgcataagaaaaagagaaatagaacaggctttaactacattccagagcagcagtccatcctatattttaatggcatcgattgattactgcgtcaggaaatgtgctggcagcccccagctttttgaggattatatacagaatttgaaagagattcggacaaggctggaccaaatgaggcatctcaagctattgaaaacagatgatcctggaaaactggtgatccagaccggaaatacagatttgaccggaaaaaagttgtttgatattttaaggatgcagtataaaatggagttggagatgtccgagatcccgtacgcaattgcaatgaccagcatatgtgactcaagggaggcattggaccggctgtgcagtgcactgatagaaatagacggcagcttgaaggatactgaagaaaatcatgaaacttttaatataataaatgagttggttttgactccttatgaggcaaaaatcagggatagaaaacggatacgcttagagcaggcagccggagagatcagtgcggaatatgtatttttgtatcctccgggtattcctgtgatcgtaccgggagagaggatttcaggagacgccataaagaaaatactgaagtaccgggaacaaaaaatgaatctgatcggcctcgatgaggagcatatttatacagtggatgaaagggtttgacatgggaatatttataacaatggaaggaccggacggtgccgggaagtctacacagattgatttactaagaggctacttattggagagagggtatgatataatagtatgcagggaaccaggcggtacagttatcagcgaagcgatccgggaagtcattcttaataaggattacaaaaacatggggcatatgacggagcttcttttatatgcggcggccagggcccagttggtggaagaagtgatacagcctgctctggaggagggaaaagtggtcatctgtgaccggtttattgagtcctcggcagtatatcagggaatcgcaagagggatgggaattgatctggtatatgagatcaaccagtttgcagtgggcagcaccatgcccgatatcactattcttttggatattgatgctgagactggcatcggaagaaagaaaaagcaggcagaactggaccggatggaatcagagaagctggaattccataagaaggttgtagagggttaccggcttttggccgagagagataagaatagaatggttaagattgacggaaggaattccatagaggagattcaccgtcagataaagggagcagttaataataccttattaagggatggaagaggatgcgatgaagagttttgataacgtggttgggcataagaagattattcaacattttgaagaggctgttcagaccgggcagatttcacatgcatatctgttgaatggtgaagacggttcaggaaagatgactttggcgaaggcctttgccaaaacgttactgtgtgaatcccatgacggctgtggtgagtgcacggcctgccgccaggtggatacagggaatcacccggacctgatttacattacacatgaaaagtatgagatccgcgtggatgagatccgaaagggaattaatgagacgatcggcattaaaccgtacagcagtgactataagatctatgttgtggatgatgcggaccgtatgaatgttggagcccagaatgctctgctaaaaacgttggaggaaccgccggagtatgcagtgatcctgcttttgacaaacaacaaggaccgccttttggagacgattctgtcacggtgtgtatgcatgtcactgggaacggttcctgaggatcagatccgtgagtatttgcaaaagaatacagatgcagatgaggacatggttgatttcgcagtgtcgttttcattggggaatttggggaaagctatccatgtagccacaacaaaagagtttcacgatatgctcaatgaggcactggggatgcttggttatatccatcatgttgagcttcatgagatgatttcttatctgaagacattgactaaatacaaagaacagatttatgattttcttgacattatgacagactggtacagggatatgctgattctgaaaactacagggtctgtcaatcacctgatttttaaggacaagtaccgccagctgaaggaacaggagatttatattacatttgaaggcctgacccatatcatggatgagatacaaaaggccagagtacgcctgaacgcgaacgtgaattttgaagtgaccatggagatgttgcttcttacgatgaaggagaatggaaaagtatggtagaagtagttggggtgcgtttccggactgccgggaaagtatatttttttgacccaaagaaattcgatataaaacagggtgaccatgttattgtggagactgcccgcggtgtggaatacggcagggttgtcattgcaagaaagaaggtagaaaaggattctatctccgacgaattaaagccagtgctgagaattgccacaaaggaagatagggaagctgcccttgagaatatgaaaaaggaaaaagaagcgttttcaatctgtacccagaagatccgtgaacataaacttgagatgaaactggtagctacagagtatacgtttgataacaataaggtgttgttttattttacggcagatggaagagttgactttagggaattggtaaaagaccttgcatctatctttagaacaaggattgagcttcgccagattggtgtgagagatgaagccaagatgctgggagggatcggaatctgcggtagagcactgtgttgcagttcttatctgtcagagtttattccggtttctattaagatggctaaagaacagagcctatctctgaatccaacaaagatttcaggggtctgcgggcgtctgatgtgctgtctgaaaaacgagcaggagacttacgaatatttgaacaaaaagcttccgaacatcggggatgtggtgaaaactgcggacggccgtaccggtgaagtacagagagtcaatatcttaaggcagaacgtgaagctgatcgtagtagatgacaatggggataaagagatcgttgagtataagctggatgacctgaactatcacccaaaaggcggaagaaaaagacggggaaagggcaatcagaagaattatgaaaattgagcttcaagatggggaacgtctggacgatctgggcatcaagggttatcagatcattcaaaaaagagatggattctgttttggaatggacgcggttcttttgtcctcctttgtcaaagtaaaaaggggagggaaggtactggatctgggtactggaaccggtattcttcctattcttctggaggctaagacaccgggcagacatttcacagggctggagatccagagtgagatggccaggatggcagagagaagtgctgcagcaaacggcctggaagaaaagattgagatcgtagaaggcgacattaccaaggcttctacgattttttcacatgacagttttgatgtggtcacatccaatccgccttacatggttgacgatcatggactcaagaatcctaatggggcaaaagccatagccagacacgagatcctgtgcaagtttgaggatgtgtcaaaggctgccagggtccttttaaagcacagcggaagtttgtttttagttcaccggagctaccggctggcagagatacttcactgcctgagagaagacggcttggaaccaaagaggatccgttttgtctatccctatagggataaggagtctaatatttttcttctggaggcagtgaaaggcggaagatccagaatgaaggtggaaccgcctttgatcatctatgaaaaacagggccagtatacaaaagaaatttacgagatctatggatggaagccaggggaggtttaaatggcaggaacattatatctatgtgcgacaccgatcggtaacctggaagatataacattccgggtattggaaactttaaaaaacgcagacctgattgccgcagaagataccagacacagtatcaagcttttgaatcattttgagattaagactaaaatgaccagctatcacgaatataaccgggtggagaaggcacgttaccttgtgaaacttttaagtgagggaaaagacatcgcgttgatcacggatgcagggactccggggatttctgatccgggggaggaattggtgaagcagtgtcatgaaaatgggattccagtgacagcccttcccggggcatgcgctctgatcaatgccctgatcatttcaggacagcctaccagacggttttgctttgaggcattcctgcctgcagataaaaaggaacgggctatggttttaagccagctgaaggatgaaacaagaaccataatcctgtatgaggctccccaccgtatgatgaaaactctggaggagctgtatgacgcattgggcaacagaaagatgacagtctgtcgggaactgacaaagaagcatgagacagcgtttgtttcaaatatagaagaagtgattgcgtattatagtgagcatccggtaaagggagaatgtgttctggtgatccaggggaggacctttcaggagattgtgaaagaaagtcaggaacagtatcaggaattggacttgatggaacacatggaaacctatatgaaaagaggctacacgcagaaagaggctatgaagctggtagccaaggaccggggagttggaaagagggacgtgtaccaagaattgctgaaatataaagagcagtaatttaaaaagagacatatgaacgttcatatgtctcctaaatatcatctttcattttattctgcaacatttaaaccagcaagcttggctaattcaatgatagaactttttgaaacttttttgcctttgtactcaacgagatcatccatttcgccagtaaagatgtccgctggattgtactttttcaatatgatggtatcttcgtcaacgaagatctcaaggggatccctctcattcacatccagattacgtcttaactcaattggtaaagtaatacgtcctagctcatcaagctttcttacaatacctgtactcttcatattcgcttccctccttgcaaattagtaaactactatacctaacaatatcatacctcagaaagcttgtcaaatccgggctttgaagcatattaccttaacacagggaataggataaagtatgaaagaaaaaggagttttcctttgatcaattatatatggagtgtcttaattttagcaggtatcttaataggaagtattaacggcaatctgaatgcagtttcagacacgattctggattcctccaaggaggctgtacaactctgtattcttatgttcggtgttgtaggggtatggtccggcattatgaatgttgcggtttctctcgggctggtgaaaaagcttgagaggctgatcgcgccgtttttaaggctgctgtttccgagattaagggataaggaagcgaaagaatacatcagcacgaatatcgtggccaatcttctgggactgggctgggcagccacgccttcaggaatcaaagcgatgaaggctctggatagaatcaaccctcataagggaactgcaaccagagaaatgtgcatgtttttaattttgaatatctcctccctgcagctgatccctgtcaacatcattgtattccgaagtcagtacggcagcgtaaatccaactgcgattgttgcccccgctataatcgcgaccttctgttcaaccattgtgggaatcttttttgcaaagatcatggagaaatttcaaaaaagcacttgatttatagcgtcaatttgtatatgatgagaatagggtaaagggagtaaccaaataaataggcaaagctgccgaaaggcagtgacgcaaagctataggggctatattgtatagggagtacagtcgtgccagccagctgcctcataaattattatttatgtgtagattgagaatccataggattttcggtcttttttatttcatataattaatgggggtataaaaatgaataaaaaagtaaggaaaggtcttgcgatccttgcaacatttgtgctgactgtatcttttattgcaggaaacggcgcttttagcagtgtatatgcacaggagacaggaacagcgagtacagcagatcaaaacacttctacatctgaagcttcttctgcgacagaagaagtatctacaacagccacggagtctgccacaacagcagagccaaaggccaatacagagagcactgccaaatccaccacggagcagagcactgcatctgtaacagcagttcagaaaaaaacagccgcaaagtctgtaaaaaaggcttcagagcctgcagtgacaaacggcgattttaccaaatatttaactaaatttgcatttaccgaccatgaaggaaaagagttttcgcagtcacatcctgtcacaaaggacagcaatgtgatcatcaggtatgagtttaagatccccaatgatataacaatccagggaggatccacttttatcctgaagatgccaaacgtttttcaccttgatggtttaggcggcgttgcgcagaagctgaataaacagcaggcgggtaatgtagaagacgttcccaactggaaagtcaaccgtgactctactatcatggtcacattcccaaagacattgacagagtctaatattgaaggattcatggagattaactgcagcgttgatgcagataaattaaaagacgagaccattatttttgatctgggacagcttgagggatacggagaagaatttgagactgactataaaccggaagtaacgaagaaaagcccggaagtggcaaagtcaggctccttaaacagagaggaccagactgtcacatggacaatcacggcaaaaccggatgcatccgataagaacctggagggctacacacttaccgacgtattttataaaaatgcccagacaggaaccgcaaagtatcagtcctatgtaaaaggttccatgaagcttgacggagtccaggcagcagatcctgaggtctcagacaatggatggaagtatacatttggaaaggtcagtgacggaaagcacactcttacctataagacaaaattaacagatgagtttttcgacattcattataatagcggcggcgctgctgatttatccggaggtgttgctaacactgttaccataaaaacgaaggatggaaaaggtgaggcttcagccaatgcttctgtgaaggctgtaagatatgcgttctggaaaaataaaagtgcatccaacaatgtaggatatgatgaaacagaaaagaaaccctatcttggatttcaattaaaaggcaattatgatgcagcgggcaagaagctccctgtaactcttacagataagcttccggaaggaacagtcctaatggaaaaggatggagagctcatcgtgcagtatggcaaagacacagcattgaagcttaccaaagcatctggccagacacttgaggtgaatgaatatacttataatgaatcaacaagagaatttaagatagctctggatcccgatgccagcggcaaagatgtctttgttaactacaagatctggctgtctacagagacggcagtcaaagccggaaagattagaaatacggcaacgatgacggttggtgatcatgtgagtatttctgattgggaagattctaactggggagtcggctatcaggaaggcaaactcggacttaaaaaatctggtgcctttgccagagtggataatgataataccatcaaatggacggttaccattaatgaaaatcctacaaagacggtaaatacagatatcaaatttaaagatgtcctgccggaaagcctggaatatgtagacggctcttttaatgcaaattataaaggcaaaaatgataaaaacgtccaggtaaatggaaacgaattaaactatacgatcaaagaccttggaaaaaacaaatgcaccatcacgtatactacaaagatcaaaggcggtgcactccagtttactcagaaagcagacggaagctcaccttcaatctcttttaagaatcatgtgtatcttgagtgggatggaaacaaacaggatattataggaactggaacagtcaacatccagacatttgtaacaaaaaaaggaagctataacagcagtaaggatcagtttgactggaccatttggctcagatcaaaaggtctttatatccataacatgacggtcacagaaaaacttcctgaaggccacaagctggtggaaggaagcctcaagtacggaagtacagttcttgggacagagaaaagcacgggacagccgtactatgaagtgagcggaaacaatctcatcattcattttccagaattgatgctgcctacggaccagaatgatctgacactgagcacggagacggatgagacaaaagaagagacaaaaccggaatctgtaaaggcggtaaatgaagtcagcgtatccgcagatgagtttaaatcagaattaacagcaaaagcagaagtaaatgtaagttatactccgaatgtagaaaagacaacatcatataaaaaaggaaactttgtagagtggacggtcaatatcaacaaaaataatgcggtcctgacaaaacagaaagcggagttgacagacacactccagccggggttggtctacagagaaggatctgtaaaactctatgatgtgacagatggaaataaaaaagtcgccgatgtagctgaagattatgatgaaacatcaggaaagattgtgtttacacttccggaaggcgtcgatctggcccatcaatataagatggttttcatcacagatgtgacaacagctacaaagaatgtaaagaatacagtcacatttgatgccagtgccaaagagacaaaagctaccagcggcagtgtgccattgatcttacagggcatgaacagcgggctcacaggagacaatatccgtttcatcctcaataaaacggattctgaaaatcaggctcctttggaagaggttgaattccagctttacgatcataacagagataaagtgggaactcctctgaccacagacgcaaagggcaggattgcctttgatgcaggactgaaatatggaaacacctattatctgaaagaaacaaaagcgttagacggttatgttctggaccaaaaagaatatgagctgaccatcggagaaaaagactcaggtcaggtccttgtgcagtttgacggcaaggattacaagtttactacagatgaaaacggaacattaaattttgattttacagtaaccaacgatgcaaaaagaggctctgtactgcttaagaaggttagcagtgagaatgcttccgagtcactggaaggggcggagttcagcatttacaaggaaaacggtgaactggtagcacaaggactcaggactgatgcccagggaatgatccagtttgattatttaaggttcggcagttattattttcaggagacaaaagcaccggaaggatataacctggacgcagacacaaaatatacttttgagatcaatgaccaggccgtggagactccggtgactgttgaggctgagaatctcccgacaaaggttgctgtgctcaaattagatgcacagacaaagaaggctctctcaggagcaaagcttcagatcatcaaggttcaggaagatggatcagagcagaccgttgaagaatggacttccacagaagaggctcatcaggttacagggaaactaatccctggggaaacgtattttctgcgggaaacagaggctccatttggatatgagcttgccgaggatgtagagtttacagtcgaagccggaggagagctccaacagatcgagatgtacgacgaaccgtcaccggaagatccatactatggagacaacgaggaagagacatcatcaactgagacaacgacaaccacaacaacttatgaagaaccagaagattcctattacaaggaagagaataagacctctaagacttccagtgaatcagtgaccactgtaacagagtctgaggtttccagaactggagacagaagttatacagctttattcattttagctgcggcaggcgcggcaggtgcggtatggatccttgtaaggagaagacgcagataataaaacttaacaggaaaagggatacttactgaggcggacagtttcataagtatgagttatttaccactatttccgtcgcgcttttgaaatgcgctcctccaatagtggtaaataactatcgtaggtggcgccttttgtcttgcaacagccatctccagcagacattacgtccattttcaccagttcggaggccttgcattcgaagggacgttagtttttcttcttgaagtaaagactcgtaggcggtgcgcattgcgcagtgaggctgtctgagcgtcagcgagttccgaacgggccgccggagaggctttgctgaaagttagaaaatcttacgtccctgagacagcaagccggagaactggtgaaaatgcatccctttttgttccataagatagttccgcaggcgtgatgcacatatatgcgtaaggaaattacttgacttattttggtaaacataatatgcttaaagtagcaagtaaataggcaaacctgctgaaaagcagtgacgcaaagctaaagggccttggcggtaaagccgtggcagccagctgcctcataaatgattatttatgtgtagattgaaaatccattgggttttcagtcttttttgttaatcatgagaaatgggggatctattatgtttaagaagagaaaagtaagaagaaaagcggcactgatctttgtggcagtgttcacggttgcggcaatcctgggaagcaatcacctgaaggggttgtcagcgcaggaagaagagatggctcagaacacaggaaccacggaacagatgacaacagagggtacagagtcaacaacgcaggtcaccgaagcagagaaaaccacaacggcggccacagaaaagacgacagaagttcaggccacaacacaggctgacacaaaagtccaaaaggcggcaacagcttcaactgcagagacgaagaaaaggactgctgttaacaagagtaaagcttccaaaagcgctgttataataaacggagattttacaaagttccttacaaaatttgagtttaaggaccagaaaacaggagagtcattttctgacactcatccagtgacaaaggacagcagcgttctgatccgctatgagtttaagattccgaacaatgtaaatattgagggaggctctacatataagctgaagcttccgagtgtttttcatttagaaaaccttaccggtacggcgagaaagctcaatgagagccagcaggcagcggtagatgaggtcccgaactggaccattcacagtgacaatacgattacggtagcatttccgaagacgctgacagaatccaacgtggaaggatatatacagatccagtgcagtgtggatgcggaaaaactggttgaccaagtgatcatctttgacctgggacagctggaaggctatgggaaagaatataagaccgatgtggaaccagaggtaacaaagaaaagccctaaggtgaaaaagtcaggaaccctgaaccgggatgaccagaccatcacctggagtgttacggtgactccggacgcaggtgataaaaatctgaagggatacaagcttaccgatacatttaagaatccagaagagcaggaatttgtcagcggctccatgacgctggatgggactccggctgcagatcccacactgacggaaaaggggtgggaatatacatttggagatgtttcagatggggatcatatagtcacatataaaacaaagatcccggacaagtatttcgaggacatgaaatacaatcaaaatggatctgcccaaatcaataataatataacgaatactgttaaaatagaaacagcggaccagaaaggcgaagcaagttccacagcttctgtccgtgcgacacagtatcagtttattaagacaaaagatgagaatggtgcaaggggatatgatgaggcaacggacagaacctggcttgggtataagctgtcagcgatatatgataatggaggaaggattgtagaaccggtgttgatctccgatcagcttccttccggcacttacttgaatgaagaacagaatacgctgagagttaactacggggataaggatattatcctcaaaaaggtctctggctccgagcctggaatcaaccagtatacttacgatgagaagacaaacatcctgaaaataaagctggatcctaaacagacttccgccaatgtttattataagatctggttggatacagagggaaaccatggagaactttcttctaatcccaagaataacgcagtcataacaatcggtaacaatattgagttgactgagtgggaagatggatttggctggactcccggatatgaaacgaaaaaaatagatctgaacaagtctggcagtctggtaaataaggatggaaagcaatttatcgactggaaagtaacgattaacaagaacccttcgaaaaatgtgacagggaatgtcgactttacagatactctcggagacggcttggaatatgtcagcggcagctttaaagccagctatggcggtaaggattacactgaccctgtagtccagggcaacatcattaaatatacgattaagaatctgggtaaaaatgtgtgtaccatcacataccgcacaaaaattaccagcgatcttgatctgaaacagattggggacagcactactcataccgggacaaagtttagtaaccaggtcaagcttttctgggaggataaggacaaagagacttccgggcagggtgcagtgaccattaaaacagaccttaaaaaaagcggtgcttataatgccaaagaagacagatatgactggacggtcacagcaaattcctacggtctggcatttcaaaactttgtaatgacagataagcttccggaacatcatactctcgtagatggaagccttaagtttggaaatactgtgctcacgaaggatccaaacgcaacggcgccatactatgaggagaacaatggaacgattgtgatccattttccgggagatcagatttttacatctgcctctaagatcacactgagcacaacgactgaccagccgaaagaaaagacagtcacagccgtgaatacggtcagtgcggcagcggatgagatcagcggtgaattgactgcgaaaagtaccgtaaccgtaacatttactccgagtgtggaaaaaactacatcctacaaaaaaggaaactatgtagagtggactgttgatatcaacaagaatcacaaagtgcttacaaagcagaaagctaagcttacagacaatcttcccgcaggacttacatatagaatgggttccgtaagtttggtagataaaagcaataaggatacagtgatttcaggcgttgaggcagagtatgacgccattgacggtaagatcgtatttaccctgccggatggtttgagcctcgatcactattatcaaatgaagtttatcacagatgttaccacagccaccggggagatcaaaaatacgatcactctggatgccagcgcagaagaggtttcttccacaacggaagagatcccgcttattctggaaggagccagcagtggcttaaccggtgacaatatccgcgtcatcgttcagaaaaacgaggccggcactacgtatcctctcgaaaatgtagtatttcagttgtatgattccaataacaacaaagtgggtgatgaaaagcgcacagacgaaactggaagaattgcgtttgatgcaggcttaaagtatgaaaatacttattatttaagagaagtccagactttagacggatacgaactcccggcgaaggattttaagttagagattggacagaaagtgacagggcagagcaaagttgccattatatttgacggaactacatacagctttgaaccagacagcactgggaccttaaacattaagctggggattgataatatggctaagaggggttctgtggaacttctgaaagtaaactctgaggatgccgcggaagtgctgaaggatgcggaattcagtctgcataagaaagatggcacgctgattgctgagaatctgaaaacagatgaccagggtaaaattaaatatgattatttaaaattcggagattattatttcatggagacgaaagctccagagggattcaaattggacagcggtaaaaagtatgcgtttaccatcaacgatgaagccataagtacaccgatcgttataacagcagagaacgaagctaagtatggctctgtggagcttaagaagcttgacagcgaagatgagacaaagactttggcaggagcggaattcagcctatacaccaaggatggagtcctgttggaggagggccttaaaactgatgagaatggtacacttaagcgtggacatctgagattcggagattactattttcaggagacgaaggcaccggaagggtatcacctgaatggagatacaaagtatgagttcaccatcaacgatgagtctgtggaaactccggcaggggtttctgtggtgaatgttccgacgaaggttaccatctccaaacaagatagtgaaacaaaggaacctttggcggatgccaggctccagatccttaaagttgaagccaatggcgcagaaaccctggttgagcagtggacctctgacggtacagaccatgtgatcactgcaaagctggccgtcggacaggaatatattctgcgggagattgaagctccgtttggctatgagaaagctgctgacatcaggttcacagtcagtgaagatgaggaaatccagaatattaccatgctggatgtggcatctgatgacgatgaatacagaggcagtacaacagaatcttccaccacatacacagagacaacatcctctgaggatgaagaggattcttattacagagacggaggatccaagacctccagcaaagtaattgaaaatgaaaccacggccacggaggtgaccagtactggagataattccaagacggcactgcttgcagccattgcggcagcaggaatcggaatcatcttgtttgtagtacgaagaaggaagtataaaaaataacagaagtatatgcagagaagcaggctgatgaacgcctgcttcttttttaggtatatgggacaagggtttgtggatatattatagtatgaagaaataaggcgggacgtgaatgtgattgtatcgctatccggcattatcatccccttgattttgtttgttattattttatatggactgatatcaaaaaaggaaatgtaccagccgtttctggaaggggttcaggatggatttaaggtggttctggaaatcgcgccgacacttattgcgctttttctggcagtccaaatcttcaggacctcaggagcattggatctgctggtgtctgcattaactccggtgggaaaactcttgaggataccaaaggacgtgctcccggtaatcttcgcaaagctgttttcatcctcagcggccacgggattccttctggatatctttaagaattttggtcctgactcaactcagggggtgctgtcatccattattttaagctccacagagacatgtttttatacaatgtctatctacttctcagcaatacatataaagaagacgagatatacgcttaccggagctctgctggcaaccttcgcgggagttatggcaagtgtgatcctgacggggatgcagtaaaaaggaagctggaacatttttgttccagcttcctttttaattgttctttgtttcatagtaattccggaaatactccatgatccggatcaacagccgttcgtcatcgtcattcagacgggaaagtacgtcttccagcatatcccggtgaaacttacggtggtgcgcataggcctcttttcccttgtcagacaaggaaatatatacgatcctccggtcctgttccccgcgtttccggatcacatagccttttttcaaaaggctgttgatggcaatggtcagggtaccaaccgtgatgttcagagcttttgcaatggaagacatgttcttcggactgccggttccaatggcatcgataatatgcagttctttgttggaaatgtctttgaactcttctgtaatgacagccttttcctcctgataggatatctcatggaaaaggctgaccacgatgtcgttcagctgctctttcgtcacggtaagtattcacctcacttttattttacatggttgtgtgcttcgctgatcacttttgccagtgcttcttttgcctctgtaggaagagcgttgtacccgccgtcttccgtatccttctcgaagatgaagttcagacgctctgtcattcttgctttcagggtgttcacgtaagtctcatcatcaaagtcaggaatataaccctcaacatcgatggtctccatattactgaaaggtccccatggtttgaactgggcattgccctcaacaacctgttccagaacagataatgtgacgctcggcgtgatatctttgcccataaaatcaccggtatttagaatataacattctacatggcggtcttttacaagggaacggaacttcttatagtcatccaccagcggataagtacggaatgggtttgcgtatggttccaccaccagacggttcggatccactccaggggccaggcgctcagcgttagtacgttttgtggcgagagtggcacccataacggcggccagatgagatccattgaccttgatgatcggcgggatagtcggatccttcatgatccagaaaataccgttgaccggagattcaatcttatccacacggttggcagaccagagtttggacttgatggcacggccgtttccgttccggatatcctcagttacaaggacgatattgcctttgtcatctctggtagcagaacagttctgtgctgtcaggagatatttattgtcctcgcatccggttggatagtcagcggtcttgtcaaagtaggtaggctccatggcgatggtagagccggtctctgtattaataataaatgcatcgtcatgcagaacggtaatatcatatttattattgtggaccgcatgagttaatgttgattttcctgacccggataatccaaagaaggaagccacatagctgtggttcgggcttaggcggtattctttctgtcctccgtggcaggaagcgtatccatttctgttagcgatggcccatgcaatggtaagggttccttttttatgttccccaaaatagcgcattccaagcagcgccgcacagttggtctgtgtattgaaataagtaagtccgagcggatgttccggatggctccactgcggatctgagaaaatgtaaatatcagattcactgccgatcggacgggactttttatacatcttgttgtattcgtcagactcatactggaagttgagcatccaggagtagagaatattttcttcgccttcagggatcaacagatgcgcttttaccataaattcagggtcaagaccgatgtaaacctctgcgtgatacatggtctttttgcgtgtatcgtaaattgcatccatgactttcagatccaggtcgttggtatccacattgggacttccggcaatccttcgggctgccgcgcagcgtccggtgacagaaccgtcattaaacagcaggaccttagaatcctttttcaggccaaactcttctcctctgtaaaccggcatgtcagtgacaatggtacctggagaatttttcgcaagctcataggcctgcttcaggtttacgacctcaataacattgttgccgtaaaatgcggcctcgatgatggaacgggtttttgagaatcccggttttccttttccaatttcgtcatgggtgtaacgtgcttttgttgacataatctttcctcctaaacttatgtgttttgcaggtacaaagatcgtacccggatttacaggttctcgtcgatgcgttgtttgagtatacgaaagctgttaggtccggcatctaatatgattttatgaaaaactttttcatcataagcatttccagatttctgtttatagtaattttttaactccatgaactccaaatagccgatatagtagcataaatagttggctgggttctgaatgacatagcggtagagagctttcatgccagaagtactgatggtgccgtactgctgcatatatttgacagcctgatcaacgctccatccttcgtagttgacacccagatccactctggcgctcaatgccatattatatagataattgtccggcaggagcttttttaaaggctcaagctcagacttcatatcaagatagctgtaggaatccatctccacataggttgcccatccttcgctgtagccagggtaatccaggatatagcggattggatgttccttcttgctgtggaaataggtcgtctggtacaaatgtcccggatagccctcatgggccagtgtcgggtacagggattcctgcccggtctgtgctttgttaatgtagatgacatttttcttatagtcatcgatggcaggtatcatgtaaaaggccggactggaggtctcctccagggaagaatggacatacttgatttcacagtccacatccgcggcagcaggatactttttcttgatcttttcttttaactgcgtcaggatcttttctggtttcttactggaatatttattcaggtccagatctaagaacgcgtgatagatggaagggtcctctttaatgatctctgtcatctccgtctgaagatataagagatggtcttccgtagctttgatcatctgtggcaccgttttgtctgaaccagtcttgtaggacgcaagagcagaataatatgccttcccattcttgaagtgggcatatccctttttgttcttaccgtttcctttcagattctttaggtcactgtacagattctcgtaggctgggattactttttctaagatcagccggcggttttctttccggtaatttctcttttggtttgtgctgagacctgggacagaatcgatgttggtgttaaaaacctcgatcatgtagttgtggtccgtagcccgtgtaaaatcgttgatttgttctaagacggcatctacatccgtatctgacatgaaatatccccgtttgacctgttccttttcgtagcggatcaccgtatcgaagtaggagctgactttggggagcagagagagataggtttctacatcctccttgtttcttaaaggaaactcgcaaagggtcaccggaagctgtgcctgggaaccaagagtggggcctaggactgtctgcagatagggataaggggcgagtttttgctgccgcttaaagtaatccatcagatagtcataagactgtttctggcttttggatagcttcttgtagttaaatcccttgagcttttgtatctccttcttacagttggcttcggcctggtcaagatccttaaggtctatgttgcccagattggcctttttggccttgatgccgtagcgctctggatgtgcaagggtataatgcagattgaccgtgttggaattgacgtcttccttgaaaagctggttcaaataggagtcaaacttctgccggtccgatgctttgtctttggtggattctgattcttctgctgtggaggtgctgccgggatctgatcctttggaacagccggtaaatgccaccatgacagccatggtaaatgcaagaaacttacgatatgtatatttatgcataagaatcctttctgaatagaatctcttagatactattatactattttttgaaggaaaaaaatagactatctttgcaagatgtactataataaaacacagtataatgcgaaattggaggagaaacatgagcaaggaaccatattatataacaactgcgattacttatacatctggcaagcctcacatcgggaatacttatgagatcatcttggcagatagtattgccagatataaaagaatggaaggtcatgacgtattttttcagaccggtaccgatgagcatggacagaaggtggaattaaaagcagccgagcagggtgtgacaccgaaagagtttgtggatgacgtggcaggagagatcaaacggatctgggatttgatgaatacttcttatgataagtttatccgtacaacagatgcagaccatgaagcccaggtacagaagatttttaaaaagctgtatgagcagggtgatatttataaggatcactatgagggactttactgtaccccgtgtgagtcatttttcacagaaagccagctcgtggacggcaaatgtcctgactgcggacgggaagtccagccggccaaggaagaggcgtatttcttaaaactcagcaaatatgcggacaggctcattgagcacatcaatacccatccggaatttattcagccggagtccagaaaaaatgagatgatgaacaacttcctgctcccgggacttcaggacttgtgtgtgtccaggacctcctttaagtggggaatcccggtagattttgatgaggggcatgtggtctatgtatggctagacgcactgaccaactacatcactggtatcggatatgactgtgacggaaacagcacagaacagttcaacaagttctggccggcggacctgcatctgatcggaaaagacatcatccgtttccatacaatctactggccgatcatcctgatggcacttgaccttccgcttccaaagcaggtatttggacatccgtggctgttacagggtgacggtaagatgagcaagtcaaaaggaaatgttctgtacgcagatgatctggctgatatgttcagcgtggatgcggtgcgctattttgtcctccatgaaatgccgtttgaacatgacggtgtgatctcatgggagctgatggttgagcgtatgaactctgatcttgctaacaccttaggcaatcttgtgaaccgcaccatttccatgtccaacaaatactttgatggagtcgtggaagataagggtgttgtggatgagtttgacgaccagctgaaagctgtggtaaccggtgccagagataaggtccagaaaaagatggacgtgctcaaggtggcagatgccatgacagagatctttaatgtattcaagcgctgcaacaagtatattgatgaaaccatgccgtgggtgctggcaaaggatgaagaaaagaaagaccgtctcgcaacggtattatataatttggtggaaggtattttaaccggggcagcattgctggagccatatatgccagagactgcaggaaagatcttaaaacagctgaatgcggaacctagaagctttgaggatctgaccacatttggccattataagagcggtacgaaagtgacagaaaagcctgagatcctttttgcgcggcttgatgaagaagaggtgctcaaacaggcggaagagctgatgaacaagcaggcacaggcggcagcaggtcctgtgatcgatattgagccaaaagaagaaatcacctttgacgagttcggaaagatgcagttccaggtaggtgagatcattgcctgcgaggaagtcaaaaagtccaagaagctgctctgctcccaggtgcgcgtgggaagtgaagtgaagcagatcgtttctggtatcaaggcctattataagccggaagagatggtcggcaaaaaagtcatggtcttagtaaacttaaagcctgctaagcttgcaggtgttttatctgagggaatgcttttgtgtgctgagaatgaaaagggagaactggccctggtagtgccggaaaaagacatgccagcaggggcagagatctgctagaaatattgataaaagaaaagaaccttgtgcagactatgggcagggttctttttcaataagatgttgataatttacaaatattgttatattatttagagagagcagctgttaaagggtggatggccttcattctacataggatggaggtggtggctatgaaacattttgactttaaagatttaatgtcttttggaatgtttcttctggcattgctgacattcatatatatgatatgtcattaatttagaaaagcgaaaaaccacccttattacctggtcgttataaggtggtttttcatgtacttttataatggccatcccagattgggacagctgctctttactgtatatttactatatcacagacaatcatctttttcaacgtgagaaggaaaaaataggttatgatagttgagattacagaagaactggaaagcgggcttacagaagctgaacggcaggtgatagagtatatcaatcaacatgaagatcagtttttaaagctgacgatcactgaactcgccgaaaagagtttcacctcccctccgactgtctcaagggatgtgaggaagtgtgggtataacggtctctcggagctgcgctataaactttctgcaaagatagaagatatggtggagggagagattgtcaatgagatttttcagaagtctgtcacggagtgcatgaaaaccattgagatactgaaagcggagacgattctcaaggtggtgcgttttattaagactgcccgaaagatttatatcattgctagaggttctaccgcatggattgccaaagatgtggaactgcagcttcagctgcttgggtataatgcctatatgctgtcagattcagaggttatgaaaaagtcggataagctcttcaggcagggagacctgatcattattttttctataaagaacagtacgccggagctgctgttgactgcccaaaatgcgaagaaggtaggtgcaaatgtggtgacctgctgctgtctgccaaagacagatttagaagattattcagacttgtctgtcctgggatataaccagagaaacaaaaccatcgaggactttgatatcgtatccaggcttccattgcagatcattgcaagaacgctgattgattatttgaatctttgaggatggactaaaattactgttgacaataattactaaaaagggtattataaaagcagtaagaaaatagaagtatgtccactgtgacagagaaacccccggagaccattactctccgggggttttttattaactgtcttttcttctatgatccagccatttatggatgtagtaatttactatagttgacatgactgacataagaaaacgaagtatgtattccactgtgtcacctcctttcagctggaaagaatcgacagcaatttcattatataattaatcttttgttttgtatatataaactgtaaaaaaagtaaataaatagtaataatgcaagagcgtgaaaagggagatactgggttttcacgctctctttttgtgtaaacacagtcatttctccggtatttcaactgatatacatcgacagcgtcatccttaacaagaaaacattttcagcgctgccctgctatgatggatttataaaagaaaaggaggaatggcaatggttggaattttgattgcaacccatggaggattcgcggaaggactgttaaatgcggtggaactgatcgctggagaacaaaaccaggtgaagaccatcggactgtatcatggtgacggaatagatgagcttgaacaaaaaatcaggacggcagtaaaagagctggacgatggtgacggagtactgggatttgtggatatcttaggtggtagtccatccaatatggtgatgaaatgtatggcggacacaaagaattttaaagcaatcgcaggcgtcagcatgggaatggtggtacaggctgtgatgatgagagatcaatgcggcttagatgagctggctgacctatgcgaggaagcaggaaaccagcctgtagtgctgctgcataagcagtatgaagagatgcttgaagatacagagatggatgagatctaggagggaaaaagatgcagggaatagttttgacaaggattgatgacagactgattcatggacaggtgatgacttcatggctcaactttacaagtgccaacaagatcatggtcattgatgaccagtcagcggctgatccatttatgaaaactgttttaaaaaatgcggttccgggaaatgtggggcttggtgtgtttacagcccaaaaagctgccgcaaggttgaagaagggcttcaaacctgaggataaggtcattatcttagtaaaatatccgaggaccatattaagccttatggagcagggaatcgcttttgaccatttgaatatcggcggtatgggagcaggcaagggaagagaaaaattttataaaaacatatccgcttccgaagaagaaaaagatatcctaaaaaaaatcatagacagcggctgccagacagaaatccagatcatagcggaagatgcaaaagtagatgtggcaaaattactatgacatgttccacatgatttccgttcaggtaggcggtgcctttttggtaataaatttttcatatccaacaaataaactggcgttattcaatgaaggttattcagcaaaatagagacagtgataaataacttctatatattttagaaaagaaaggtggatttattatgagtatttcagttgttcaggcaattctcattggaattgtatattatctgggaatcaacggaaccccttggcttacccttctgggaagtacgatcattcagaagcctctggtttccggtgtcctggtaggttttatccttggtgatccagtccagggagctatcatcggtgcggcgatacagcttccattcatcgcttatatctcagctgggggagcgccgcctacagatccagggcttgcaggcactatgggaactgcattagctatggcagccggcgttaaacctacagcggccattgctctggcagttccgattgggcttttgggaaccatcatctgggtggttcatatgacggtggatgtattttttgtacatatgattgataaggcagcagaagagggcaatatgaaaaaggccaaattccttcatattgtaccgccgcagatctttgcctttgtgatcggatgtattccggtagccctgggctgttactttggatccgacgtggtgacaaacattataaatgcactgagcggaaggcctctccaggcactggaggttatcggcggactgctgccggccattggtattgccatgaacttgagagctatcagtaagccggggattctcctgtggtatgtgcttggcttcatcattgcggtttacttgaatctggatactatgccgatcgcgatcattgcaggtatcgtagcttatatctacactggtgtggtagcactcgcagaggagaaacagactgccatagcagttggagcagccggttttgatgacgattttgacgatgactttgaatagaggaggaaacttaaatggcagaggataagaaaattcacttaagtaaaaaagatgtgctgaaagcattttggaaatggacatttttttcacattcaaattataactatgaacgtctgcaggccagtggtgttctccagtctatgtcccatcttccggaaaaattatatccgggaaaccaggaggagcaacaaaaatttatggagcgccacatggcattttataatacagagccccattttggagggatcatcaacggtatggtcgtggcaatggaagaagagcgggccaacggcgccgatattacagacgatgccatcaacagtgtaaaaacaggtctcatggggcctatggcaggcataggggatactctgtggcagggaactcttcagcccattcttctggcagtgggtatcagcattgccacagggggaaatgtaatgggagcaggggcgtttgcagctttaatggcaggtatcatgctgccgattgcttactttatgtacatgagaggctataagacagggaagagtggagttgaggcgattcttggcggaggtaaaatgaaacagctgatctcagccgcatccattatgggcgctaccgtgcttggatccctgacagcgaactacgtgtcggcagagtctcatatgaagatcaaggtaggggccaccaagctggctctccaggcggatgttctggataaactgctgaagggtatgatcccactgggaatcacgctgtttaccttatatttattaaagaataaaaagatgaaatccacttatgtcatgctgattctggttattatcggcgcagtcttcggattgacaggaattttaggataggacaggaggagctattttgaacggcaaaatgaaaacagcagtgtttacagatattaaacaagttgaaattaaggaatgtgaaaagccatctccatcaggaaataaagttctgatcaaggtagatgccgcggccatctgtacttgggagcagagggtttacacaggggtgaataaagtagtatttccttttatcggaggacatgagatcgcaggccatatcgaagcgatgggagatgaagtgaatcaggatgagtggagtgtcggtgatcaggtcgtggtaggagtgacacttccgtgcagaaactgttattattgcaaaactggaaatgagcagagctgtgagcattttgaccacagcgctcatctgccggggcttccttacagaggtatgggaggattcagtgagtatcttctggtctccccagactgtatgttcaagtacagcaatgcagcaccggaggaagcgtgcatcatagaaccggtatcctgtgtggtacacagtgtagagacagcccgggtcagccttggggatacagtgctggtcattggctgcggcatcatgggactgctgcatacggccatttgtacaaaaaggggagccaaggttattgtatctgatgtaaatgaagaaaggcttgagatggccaagacacttggggctaaggccgtcataaatccggcggcggaagacttgaaacagaaagtagaggagcttacaggggggatcaaggctcaggtggtctttgacacgacacccataccgtcagtggtagaggatacatttcagtgtgtcagcaatgcgggaaagattgtcctttacagttccatacatccggcagagccggttctgtttgatcctaactgggttcacggaaagtctgttcagatcatgggaacggctaattccaatgatagagactttatgagagcggcccagatggtatccgggggagtgatcgacttaaaaccttttatcagcggagtgtatccggcagaaaatataaaagatgcattggaatcagcgataaaaggggataaattccgcaatattatcacattctaattacatacggtaacacctgattgtttttctccacagaaaaacagatgttaaaaggagacagcgattgccctcgctgtctcctgaatttttatataaaaaatgaaaggaaaatgttttagtactgatactaatcgttatccggcataccataacggtttgtgccctgcaccccttgtttaacaaagagaataataaaataaattacaacgatcagggccagaattccgaatacaatggttgcaagcccaaatccgccggaggcagcttccgcactcatcagcaaggatgcggttgtcaaggttaagctgaccataagtaaaatgatcggtatatatgcaagcaaaaccaaccaacctgaatggtctacgtcatgcagacggcgtacattcaatgacagtccggggataaaagtgatcagtgaccacagcgagttaacagcgtttgtatctaacatccttgcaagaaaaccaacaacgattgatacaataaactgtcccaggattgcccaccagaaattagaacgggatgtccttcctttaaaatcgaaatagcgtttccaatacgctttataagcgtttatcatagttaaatcctcctctttttcttttgtgtaataaatgatgaaattttcctttcctgaaatattatagagataaaccttattaatttcaagttctattgggaccggcggtattccagagggcttacaccataataacttttaaacttcttagaaaagtttccgctgtaccggtagcctgttctttttgcaatctcactgacagaaagatctgtggcagagagaaggccggccgccattgccattctcaggctgctggtatattccccgatggtcatatgataatgcttcgcaaaaccagccttcagcttttgctggtttagaaacaccttcttgctcaattcttcaatggtaggaggatgaactgcctgctccgtcaaaatatcgtgggccttctgaatggccaagatatctgaggccgtaagcctgaagctgcgtttttttccaatttgtatcaacccaaaatcaagctggtgctgaaacatattatctttaggttttttgacttcctctgtcagaagtgcgatacattccaggatcttgctctccaaaaaaagaggagacagacggccggagacagacaggctgttaagctggtggataacggaaatgacagtatggggcagatagcggtaagtatgattttgtttaaagtcactcagggaaagggaatcagggaaaggcacggaaacaatctcgtccaaaaaggctttgtggacggttatctctgtcccgtgaaaatgctgtcccttgtgccaggcctgttttcctttcagatttttttctgccacaaaaaaagaagaaggagtaaaggatgatacttgctgatttttcagctgaaactttgtacttcccttatatacggtgccaaacctcaaaagagattccggattgtcaaactgaatctgaaaatccttaggtatcgtataatctgcgattccaagctcataataaccaggacgggaataaaataaaaaatacccgttttccggtgctgatacgttttgatataaagtacagtgtccatgggaggacggctgaaatgaaagctggttcagcacttcctcccggaaagctttactggaggttatggtcatttcatagattcctttccgagttattttattgggtgtcagatttattcaaatggatgaataaaataaaaatcaattgaaaagcgagtacgggttaggtacaatacgttgcgaggtcgttaggtaggactaaccaaagatagtatacaggaagaaagggtaaaagtacaatgagaacgcaaaaatcaaggttaattacagtcattttagttatggcagccctggcagcattgctggcgggatgctcaggtgaaaaagatcagacagataaaaaagaggaatcaaaaaccatcactgtgacagatgccaaaggaaaggttgaaatacctgcagatccaaagagaatcgttgatatcagcggaaacagtgatatactctcaattctcggttattctgtagtcggaaccgccaactcagatgcgtatgactatacaaagttcccatcctatttagaaaagaagctttccggtgctgagatcctgggctacagtatgcaggacaaaatggacgttgagaagattcttgctttaaagcctgacctgattattatttcctcagttcaggaaaaaatgtatcagcagctttccaaagcggctcctacagttatgctgaagctggctcagacagactggaaagaagatgtgctcaaggtagccgatatcatgcagaaaaaagagaaagccgaagcatggcttgcagactataagaaaaaagcccgggaaaagggacaagaaatcaaaaaatcctacggaaagaataaaagctacctttccatccttgccagtggaggccaaatctttgtgtatgacaaggccgggatcggaagtatcttatatgaagatatgggattaaaaagaccgaagggactgccggagcagaaggatatcagtcttccggtagtatcctatgaagggctggcgtccattgaggcagattatattcttgccataggaaccaaagatgatatggccgcgttaaagaaaaactctgtgtggaaagaacttcctgccgtgaagaagggacatgtggcagagcttcccgcaagcccttactttaaccagggatacagttccattgggcgtctctcatttttggatgaagtgaacggtttaatggagaagatgaatgagtaaaagggtttctgtgtttaccgcagtttccgttatccttttgataactgtagtgctgctggctgtttcctttggagcagagaggctgccgtttgaaacggtggcctcggcgctctttaaaggtggggattcactggatataaaattgatcagggaagtcaggctgcctagggccatcgccgctgtattgacaggagggatgcttgccagtgcgggcgctgtgatgcagggagtgaccaggaatcctctggccgagccgtccatcatgggaatgacgcagggggcgtccctggctgtggcagctgcaagtgtaataccggcagtatccggtctttttggtttgacagcatcggcccttattggtgcttttctcggcgggattcttgtgcttggattttgcctgcgaacgacaaatttaagtgtctcaaggcttctgctggcggggacagccctgggaactttttttctatcgttatcctccctgattgggattctgggaaatcgttcacaggagcttgcgttttgggtagcgggaggatttaagtccatcacatggggtcatgtgtggcttttactatttgcaggagggatttctttgattctgtttttctttctggcaggcagcattaacatcctgagccttggagatgaggcggccacaggactgggtgtccgtcctgaaaggatcaggctttggtcgattcttctgctgattccggtttgtgccgtctgtgtggccagcgcaggaaatattgcctttgttggattggtcattccccacatgataagaaagatattcgacaatgactacagaagaatgataccgttgtctttcttaggcggaagtgtgctgatggtatgggcggacctggccgcgcgtctggcaaaccagccatatgagactccggtagggctgtttacctctatattaggtgtgccagtatttctgtggctgattagaaaggagcaaagcagatgaaaaaaaggcagcgtacagcagtggccctggtggtgttcttgtttctggccgtgtttgtgggagacttaatgtatggaagctactccatgacggcaaaagatgttgtaatgacgcttttcggcaaaggggacggcatgcagaatatcgctgtacttgatctgcggctcccaagagcagtgacagcggttctaaccggagctgcattatctgtctcaggctgtattttgcagagtgtcaccaaaaatgatcttgcagagcccgggatcatcggtatcaatgcaggcgcggcacttgcggttgtgcttttgatttctgtacagagcaccagctattatacggcactgggctttggcactgttctgctcatgcccgtagcagcagcggctggtgcttttataagctttctgtgtatttatcttctggccagggataatgggagtgtgaggcctgtaaaaatgatcttggcaggtattggtgtcaacacagggatcaatgccctgatcactctttatcagctgaacatgtcaaaaggagactataatcaggctctggcatggattggtggcagcctgtggggcagcagctggatgtatgttgccatgactgcgcccattattattgtgctgatcctcattgtcttttacaaaaacagaacgctggatgtgatggatctgggtgatgagctggctatgggattaggggttcaagtggagagagaaagaaagattttccttgttctcgcagtctgtctggctgcctgtgccacttctgtggccgggaatattgcatttgccggactgatcggaccgcatttagcaaaacgtctcgtggggcctgtgcacaaaagacagattcctgcggcagcatgtttaagcagtattttagttttgggagcggatacacttgcgaggaatctgttttcaccgctggaaataccagcgggtatcatgatctccctgatcggagtgccatattttgtttatctcctgatgaaagaaaggtaagggtgtaaaatggaacaacaaaagattcaagtgagggatatcactgtcgcctatgagcagaccatcgtcataccaaagctgaatctgaatatccctggtgggaagatcaccatcgtagtcggcggcaatggatgcggaaagtctacactgatcaaatctgtggccgggatactgaagcccaaaaagggcgagatctttatcaatggtacagagatcaaaaaacaggctcccagggagaccgctaaacagatggcagttctgccccaaagcccgcaggtaccggagggacttttagtaaaggaactggtggcatacgggcggtttccttaccagaaacctgtaggcggactgacagaacatgaccatcaggtgatccgatgggcgatggaggcaacaggcatcctatcgctgaaagaccgaagggcagattctctttcaggcggacagaggcagagggcctggattgccatggcgctcgcgcagcagacgggaattcttgtactggatgagccaaccacttatctggatatgtctcaccagctggaaatactctctctattaaaagaattaaaccaaaagaaccaaacaaccattgtcatggtgatccatgaaatcaatcatgcatccaggtttgcagatcatatcattggaatgaaggaggggcagatggtgtttgagggaacacctgcggatgtgataacagaacagaatttaaagacactttatggtatacgggctaagcttacactcagtgaggacggcacatatccggtttgcacggagtatgagctggaatgagcatacgggggaataaagcaaattttgttatcatagcggcggggcagatgatctctctgttcggcagtgccatccagcggttttgtatgtctctctatgtactggagctaaccgggagtccaggtatctttgcaacgatcctttcaatttctatgcttccatatgttcttctcgcgccggtagctggaaatatcacagattccttcagcaaaaagaagatcatggtctgtacagacatcttcagcggcattgttataagctgttatgcagtttttttattttctggacatgaccggccagctgtcatagctgtcacgatgatccttttgtcatctgcgagtactgtgtattcaccggcggtgacagcctccatccctctgtctgtttcagcaaaacagctttaccgggccaacggcattgtacagcagatcggatccgctgccaattttgcaggacccgtcattgcggggatgctgtatggttttctggggattcgttggatcgtcgttttaaatgcaatcagcttctttgcctcagcattgatggaaggatttctgcatctgccggaaaaaaagagcggttccaaaaacaagatctcttttttgaacagtgtgaacgaaatgtatcaagggtttttgtacttaaaaaaatgtcaaacgatcgtattaaggattattttctcatacggtctgtccaacctgttcattgttccggttttctccgtagcagcaccgcattttgtaaaaaatgtgctgggtctttcttcagaagtctatggatctgtggaggggatcacagtgcttgggatgatcacggggggagtactgatcggtgtgtttcccaagagtttttccatggctgtgatccacagagtgctttacctgatgccggtttcctttctttttatgtgtctgactggatttgtgtcccaaagcccgctgatgaatctatgtgcttttggggcaggaggctttgctgtcatgctttctcttgggctgtccaatgtgatttcattgacttacatgcaacaggcagtccccggatctatgatcggaaagaccagtgcgttttccacggcagcagcgacagccacgatacctcccggacagtttttgttcggacagattctagaagcaggtatttcggttcccgtgttgtttctttttgtatcagcggcaagccttgggactgcatgttttgtaaaacaggcaataaaaaagaattaagaaattttaaaaaagttcttgcattttgtatttagttttgctatactatcacttgtctgaaagatgcgggtgtagttcaatggtagaactccagccttccaagctgatcacgtgggttcgattcccatcacccgcttataagaattattgaagaactgtctgtttttacaggcagttttttttgttccatagggagttgaagcggatttgtcccctttgttcttccataggaaagttctgcgaacctccctatggaataaaacctgctaacaaaagtcaaggacttttcagcagattattaaattatttcatccgtctattttttgcatgctaaaaaggctggcattgtgctccagcctgcacaaactcatgttttcgcaatctattgataaacagcagttactcttgcataataaatccgcagaaatttattcaagccagcaatttttgcatgtttcttacttttaccttcgctttccttttttaagatatagttgtatacagcatcatcttttggagcaggatggctcttaagaactctcatcacctcatatcccacctttctgagtgttgaagaacctcgtttcgttatcttgcgttttgaaccgataaactgccctgattcatatgctggtgggtcaattcctgcccatgctatgagtgcctttgcgctgtgtagtcttctcacatccccaatctctgcaatcagcttaaccgcaaggacttcgccaactccgcccatttccctgaccgcctcatattcaggcagggacttcacaagttcttgcattcgtgttaaaatcagagacagagaactatccacagttctcaatactgatacagcttcctgtactaacattttggtggatggggtactggaagatagtgtgggaataccacttgaagctaattcatagactgcctcagccttggatctgcttcggtggtatttcttttcttttgcccaaacaagatactccttagcaaatgtttcaagactcatggatgtgatgaaatcaaagtgccaaaatttctccacaaagtcgctaagcttgtccctgccatttgcttcattccaactgttaaacatcttcttaatacccggcatcacataatccaggatatgcgtcaactcctgcaaagctttcacatgaagctccatatagtaccggtatctgcgtcccagaagtttaagctccgcataggtttcttcatcaccttcatacttttgcagcttgaaccatttctcaattccgtaattcgcaatcattattgaatcaagtttgtcggtctttgctcctcggatgctgttatccttcgcatacttcttcattgcaaacggattaatgacagatatgaaatactctttttcgtgaaggaacgttaatacaggcaaatgataaatgcccgtagcttccatcacaatacgtatctccccatctaatttttgaagcagattgtgaaagccttccaaatcctcttgcacatgctgcatttcaaaagggctgcacactatttctccgcatggcttaagtacgcagacggtgcttttccctttcgatacatcaattcctacgcttatcatctcgaacctcctataactgttattcgtcattgttccagccgcacttattaccatccagtttagttggttacacgggagcgaatccctacctgcttaatcgaatgcttataacaaggggttggttaacggttttattcacggatgcaaagatccaaaaaagcccacgtaagaccaatgactccccttattataaataaaataagtgcaggtgtcagagttaattactctctaacaactacacttttatggtactaaaagccctgcgggcattatgcacacaaatgcgtgaggtaactatttgactgcgtcaaatcgcatttggcgcgcaaagttgccaagcccctcaaagagtgaggggttggggtgttgaagtgggcttgcccactttgttcgttatagagagttcttatataaattgctctgtgtttatggtatacttaaatcgtaagtagtaagtaataagtatccggggaaggggatgtagcttatgaaagagtatagactgtcacaacagactgccatcgtaggatttgacactttggaatccaaccatctgacacaggccaaaagcgccgtgatcagggggattgctgccgcgacggctttggaaccattgattccggtgatagagaagggagagtctgctgtctttaaagatcatctggcgaaactgatacaaaatgtaaagggactggggaaaaaagaggcaaaagcaatagagaaagagacagccgcgtctttaaaaggagatggggtcctagaggaagttcctgcgttgattgcctgtgatatgaactatgaaacagcaggtgtaaagatcatggagtaccggagcgatgagacagaatacagaagagttgtagaaagcatccgtgccgagatcttggaggacgggaagccttctgcggagagcctttgtctgctttggctgttccgtgaaacctttttgatctctgaattgttttcctctaccgaacaggttgcggtgaaacagcggatcggtgaagcatcaacagaaaatgaatgctacaggatgttgtttgaagcagaatttcacagtgtatttaacagttttagttccagttttttaaaaacaaagaaaaatctattccaaaatccctatcttgaaggcgtgaacctcttgtttccttttttagaacgcagaagtgctatttttattgatctggtggttttaggttcaacggtcaaaagccggagggaggcagtgctctgctatctggctgaaagagggcactatgcacaagaggtcaaaaacggacctgagacgttgctgctcatagacaacagctattaccgtatatttcccatgacaaaagcttattataaaataccggtgcagggcgttaatttagttccggcatatgtgtaggtgcagttatgtcaaggcagagaaccatggaaaagatcctttcttccgagtatgtgaccatcggagaattagcccgtatcactggctgccgctacagcacgttaaagtattatacggaagaaaaaatccttccgtttgaacaggaagaagagaatctaacccgcagatataagagagaagaaagtgtcgcaaggattgggaaaatacaggagcttaaaagacagggaagaaccatcgctgacatgaaagacatattgatataagaaaaagcgaaggcctgaaatgcacctaattatgaaggtgtatttcaggcttttaaagagtcaggggctggggagatgaagtaggcctgacaacgttgttttagattgatcatcattttaactattggttaaattctcctgaggaaaaataaaaaaggattcaattgtaggagtttcattgggctgatacaatgaaaagagaaaaggagatgggcttatgaagatcaatgaaatgattcgggaactgcggataaaaaaaggtttaacccaggaacagatggcttctctgctgggggtttccgcccctgcggtcaacaaatgggaaaaagcagtgtcctatccagatatcacactgcttcctgcattggcacggttactggagacagacctgaatacccttctgtcctttaaagaagaaccaaccaaagaggaaatcacagattttctcaatgaactggcagcggatgtttccagtaacggagcgggacatgcatttcatatgggaatggaaaaagtacgggagtatccatcctgtgatccgttgattttgaatgttgcggtcacactggaaggaattttaggtatttactacaaggaggactgtactgatttaaagaatgatattgaaaaactgtatgaacgggcagtccagagcactgatacagaggtcagggaccgggcgcgttctctgctgatctttaagtatatagaccgggaggaatatgacagagcagaaatattccttaaggagctgccggaggagtccatgatggataagaaccagattcggacaaggttgtatatgaaacagaaacagtgggaggatgcgggccgtgtcctggaaagcagacttttgaagaaattaaatgatatccaagctgcgctgatggatttgatgaccatagcctttgaagagaacaggcccaaagacgcagatgagatcgctgatatatcaaggcaggtggtgcgtttgtttgggttgtgggattatgggtcttactcagcacagtttcagcttgcattcgcaaggaaagataccggtcagtgtatcaccatactgaaagatatgtttccggcaattcttaaaaaatgggagccgggccaatcgccgctgtacagatacacaggcagtaagtccagcacggaccattttggaaagtcgatacttccaaagatcttaagcgaatttgaagaccctgaaaatgaggagtttcattttctacaggatgagccagaattcaggcagcttatcagcgcatggaaagaaaaaatatgacagaatctaaaaacaatcaaactgctgaaggaggtttcgcagtttgattgttttttcgtttaacacctgatattaactgtaaagcccaaaactcaacagataggctacaagtacagccgcaggtcctgtgacaagtcttgtaaagagcatggcgggtacgccggcgctcacggtatcgtcctcagcttccgccagggtcagcgctacaggtacaaaatcacatcctacctgagagttgatggcaaacagtgcaggaagagaataagcgatgggaatggttcctttcccgatctctacaccgaggagtacacctaccacctgtgcgatcaccgcaccgggtccaaggaccggggacaggaacggaatggcacagaaaacggacagccccagaaggcctggaagacttccggccaatggtttgatggcatttgccaggagatcgccgatgccggtatagttgatgataccaaccatgatgctgacgaagatcatgaacggcaaaatgtttttcaggacaatatccagagtgtcccggccggcctgataaaatacattcacaatacttccaatgccgcggcccatgctggtaataaagttaaaaaattgatttcctccagaggcgggggaggattcttttatctcagccggttctgggacagcctgcccggatacttcaggttcagatggaacagcctcaccgctttgggtaatacagtccagtgtagtgccggagacaaaattatcttctttgatatatttgctgagcggcccggacggggagatggggtggatatcgatggtctttactcccattttcggataaacaccgcaccggagcgtcccgccgcagtctaccactgcgatgatgatggtgtcgggttccactttgttgttaaaggcatccactaccgggacaccaagcagcgacgcaattttttcagccagaggatgaatggagcctccggtgacagaagcgacgactttcctggtttccgtttcatagacagtcaatggcccgccccatccgctggagccttttgtgatcgttacagatggtttcattttgctgcacctcctttattttttgccatgatctttttcgtgaggaattcagtggcatttccacgaataaagataacgatgacgccggccagcaggtaacgtacggccaaaggcatagtggagtagccgagctttgtaatgccggctgcgataccggtccaaacaaacagttctccggcatttccgtgtggaaacaggccggtgatagggtgcgcaaaggagaaacaggcatcgataaaggcaggtttctggtcttcctccacgaaccgtcccatagtatagcacatgggattggtcaaaaagaaaagggagattacaggcagcagggtgtaacggagcaggcggaaccgggtcagttttttagagaaattcatgaccctgtcctctcctaccagagtgatgatggcattgatacaggtgagcaggatcagaagattgggaagaattccggtgatcaggcccatcaggttttctcctcctgcggatacgatcccggtaaatccttcggctagttttacaaatacattcataaatatatcctccttaacatggacagacagcagttttccgtttaccggaaatttgttctaaggctgaggcaaaagcggccttatcatttttccgtttcatcagggcagtgacagagcaggcaggacatccgatatagtcatttttttgattgaatctggaaaatacagtccgtcctttcatttcatagtaatctacaatctcatctgattcattgaccacgaccagcacgataacgcccgggcggaaggtcaggccggatttggcagttccgatggccagaagattcggtgtatggcggtaggccttcttcaggtcttcaatggactggtacattcgtttgatctgaaaccagccgaaggcggcctgagctaccattgtgaccatcaagatcccaagaacataagtaaacataaagtggttagcacctccttgatatgaatagattgacaagaagtttcacgtgaactcttaacatgtgttgatactatcctgccctcaaagtgaagtcaattcatctgattgttttggaacatattttacgattgcacaaaaataaatacaaaaaaccagagtgttccataacatttgttccatgtcttcacttttggttgacgaaggtgaaggaaggtaattatgatggggttgaatttcaatacaaacctgaattataagaaagaggtgctaactatgcaaacacgagcgatcagactttatggaaaagaggacttgaggctggatacatttgaactgccgcctataaaggaagatgagattttggtaaaggtcatttctgacagcgtctgtatgtccacttataagctgtctaagcagggggcagcccacaagagagccaggccggatcttaaagagaggccttcggtcatcgggcatgagatgtcaggagttatcatagaaacaggcgcgaaatggaaagatctataccaggagggccagaagtttacggtgttgcccacggtcactgaaaacggccggatgaaaacagcgggttactactacgagacttatgggggagactgcacctactgtattcttccccgggaagttatggagcacggctgtctgattccatttaatggagactccttttttgaagcttccttatcagagcccacggcctgtatcattgccgggtatcggagaatgtaccacacatcggaggaagaccatgaacaccgtatgggagtgaaaccccagggaagtcttgtgatctttggagcgtgcggacccatggggctagagtgtattgactatgccctacagctggaaaacgggccttctaagattgtcgccgttgatatgtccaaagaccggcttaacagagcagaaaaaatgctggttcctgacccggaaagcggaaaagagctgtattttgtgaatgcaaatgaatgccgggatacggcagaggaactgaaagatctgaacggtggcagaggatatgatgatgtgtttgtctatgctccggtggaaactttgatcgagcaggcggaccgggtgctgggaaaagacgggtgcatgaatttctttgctggccctgtggatcaatcgctttcagccaggatcaatatgtacaatgtgcattattcatacacccatctggtgggatttaccggaagcaccaatgaggatctccatgacgccctgaagctgatggaacaaaaaagaatccgccctacggtgatggtaacacatatcggaggattaagcagtgccattgagactactctgcatgttccggagatcccgggcgggaaaaaaatgatctatacacagatcgatctgccgctgacagctattgaagattttgcggagcttggcagggagaatccactgtttgaaaagctggcagtatcatgtgaggcccacaacggatgctggaatgcggaggctgaaaagattttgctggatgaatataatgtagatctgacacgatagggaggaagggaatgttagttactttaaagggattattagaagatgctaagaacaaaaaacaggcggttggggcattcaacggaaccacattggaaggaattcgtgccataatcggtgcagctgaggagtttcagaggccggtgatcctccagcatgcccagagtcatgatacgatcatagatttaaatgagattgccccgctgatgctgcactatgcaaggagtgcctctgtgccggtggcagtgcatctggaccacggaagcaccttcaaacggtgcatggaggcaatacgggcagggtttacttctgttatgtatgatgcgtctgccaagccgtttgagcagaatctcatggagacggcagagattgttaaagctgcccacagtgtgggagtatctgtggaagcagaacttgggcatgtggcaaatatcaatgaggatcccggggaggacaacatttatacggatcctgctctggctgaggagtttgtgaagcgtactggagtggactgcctggccgttgcctttggcacagtgcatggtctttatgtaaagcagccaaggctggatctttccattgtaactcagatcagtgaaaaaaccggcattcccctggtcatgcacgggggctctggggtatccggagacaattaccgcagagccataaaagagggaatctgtaagattaactattatacatatatgaatacagcgggagggaacgcggctagaagctttgtaaaacagtccggagaacatctggcctatgactgtcttacactggcggccacggaagctatgaagcaggatgtgatggctgccatgagaatatttggaatggatgagtgacctgcagatctgctataatcgtgtcagcagagggaatacagtcagtgtgggagggagaatgatggcagatgcagaggaagtcaggatgcttgctgagatcaccaggctttattatgaggaggaatggacacagcagaggatcgctaaaaagtttaatatgagccggtccctggtttcgaagctgctttctaaagcgagaaagatcgggattgtagagatcattatccatgacgaggagtttcacccgtacaggaagctggaggaggaacttaagaaacggtttcagatcagagaggtagtgtgcgtcagtgtggaaaacagtgaaaatccggtaaaaacagtgggtgcggcagcagcaaaatatgtggcgagaaagctgtctactgtgaagtatgtggcaatgacggcgggaactaccacccgccagatcgctgagagcttttcatcgggagtgccctttgaccatgtgacatttgtacctatgtcgggaggattgggggaagaacggtgggagatccaggccaatgtggtgtgtgagcggatggcaaagaacagcggggggaacagccttcagctgcatgcccccattgttttagattcctatgaggcaaaggaaatgcttttaaagcagcactttattaaaagtgttatggaaaaagccagaaatgcggaactggctgtggtgggacttggcagctcacctcagtattttgagctgaccgaatcttatctgcacgggatcaaccgggagaaggatgacatcagcagacgcctggtcggtgacatttcttataattattttgacaaagagggagaactgatagactgtaaatggaacaggcagctcatctctttaaatattgaagagatcaaacggattccggaagtgattgctgtgacagaggggacagagaaagcggcaagtctgtatgcggctctcaaacataagatcgtggacgggctggtgaccgatgttcattccgccagagagctgatcgagatggatcggagaaggcttatgggaaaggaaaattaattttaaaatagactgtttggaaaatcgaaaatgattttccaaacagtctattttacatttaaattccattacagataggtttgcataagatttagaattattttaattataaagtataaaatagcaatgtatgatatgaatttgccggtcttagctccaagatcaccgggatatctcatagctaaaagaagtcccagaaagcttaatatcaaatagagaaataaactataatgtagtccgtccagagaaatgattccattttgattgcctgaccagatcggaattccaaatcgcgcaagaatcatatctccataacaggtcataggtggaaaagtaaaaccaaaaaacagagtaatgacactgaggacaatggaataagttccaaggccagattttctgccactattatatcggttgaccagacaagctgaaaccttaaaaaaagtataacccaaaagtcctccaagggtatttgcaatcagatcatcaatgtctgccagccttcccacgaagaaaaactgaatgcattcgatgaaaagggacaaaagcaatataattagcactgtttttttcagacttcgtttttcagtctgctgcattaaggggacaaatactcccatgggcaggaacaacaagatatttaatatgatgtaagaaaggtcttcaccgataaaaggaatcagattatagttatgggctccattgagactccaggcatcaaaagcaaacatgcccgtgacaataccaataaaaataagatatacagtaaagaggtactgcaaaaaccaatcgccgtttttaaaagtttttgtcttacccattacttttaatacgattgcaattaatgcataaataatcaatccagcgatcagagcctgggcaagcagtatagcgcctttagaaaaattttctttcatgattaatcctctttcttccatcggagcacagacaataatgtcaggtaacagccaaccgccaggaaaaacagcaccgtagtgagccttgtacgaataaatatattctggtgcttcttgtatagtgctaaaagaatcccctgactgatgacaaaagctgaaaacagccaaccgagataaactgtaagattcttaaatgtgacgaaaaacagccccttttctgttttaatgatataatctcggtataatttcctaataaccaacagaaaagctaaagcagatgaaagaaaaatcagaaaagtttgcccaatggaaaggttatatagattatgtttttcttcgggcggtatgatatattcatagccggtttctttcacaattctttttacttgctggacaacctgatgatattcatttttattatcataatgtagatacccttcacacttgtcagataaaagaatctgtttaaaatccagagtatcctgaggagatagcttaatgctaggcatgattaaataattgtctaaattgataatttcttcatcaaccttgacatttgtttttttgtctagaaaacctattattttacagcggatatttttagttgctagatacgagttttcaacaatagaatttagcttaaaaatatgtttataatttgcacccgccacaacaggaacgatctgattagaagtttttttatatgcagattgattaaaaaattctccagtttgtatgctttgatcgagattttgtctttttgcatagagttctgaaacctgcatagatttcaagggtgtgatcagcacatcatctattttttggtttcctttcctgttaatgaaacttttgctgccttgaaatttttttgtataaataaaatcttggtttgatatttcataataatcaatattttttatattcataagatgttgatatacctgttttaaaatatttaaagaatctttttttcttagaaagttttcataacggtaaccttttctgtcgtaattgtcagttagcagccaatctccttggctgctattttgagaaattgaggaattatttctttcgacaattaaggcataagaatagacagatgatccaaagacaaatatgattataatggtcacgaaaaccagataatgtttcagtctgttattaaaatccataatacacacttgaagaatacaaatcaatcagacagcaattttttgtggcccatccggtactattctccactttgccttttccccatattctttttgaagttttccaacatcctgttgaatagtctgcccacaatttaactgtaacataatgcttctggtttgccgttacataccccttgccgtttcctttaagataaccttttttccagttcttgtttgcttttgcttctttagccgtgatttccttagtcgaaacccaatgttttgatgccttgactcttttatccatggcgaaggcagaagtagatgaggaaaatatagttgttgtgattaataaaccaattaaaagtcttttcatgtcaatacctttttttctttaaatatcaatagtttccattatatgcatataatctttgtacactataccatcgatggagcttttagtcaagactagaaaaggcgttaagtcgtttccgttttatgaatactattaatgctattaaaagataggagaatcaatcttttgattatagacttataagaaacgtattcaacatctcatcacaaacattaagtacttcttttatctggttgttttcaagacgatcataatggatcccacattggatacagacaggttcgtgcaggttttcccagagggcattggcccagcgtgtactcacatatccgtctttatgtcccggaaactgtagagtttgaatatttccattataccccataaaactcaccgcgccaatatgagtgcggcttccgcctgcgataagaacttggataccctcatcgagatgggtcacatgggcacagatctcatacccgaacaattctgtcttcagcaaagtctgctttatcatttcattttccttcccatcgctgaaatccttcaaattctactccgaactgatctaaaatcttgccggccacgtgccttgtcatatccgccacagactgaggatgattgtaataactcagcacagggggcaggatgacggcgccagcctgggaaacttcatacatatttctcaggtggatgttgctaagaggacactccctggccacaagcacaagtttccggcgttccttcaaggtcacatcggcggcccggagaagcaggctgtcactgtacccgcagtgaatccccgctaaggttttcatactgcatggaacaacgatcataccgtccatgggacaactgccgctggccggagcggcaccgatattgcggttatcatagactgtatgggaaaggccctggagatcctctaaggttaaattggtttccagtgagagggttcttgcagcactgtctgtgcagattaaatgagtttctattctggaagcttttaatgcccgcagtacttccacggccaacggcatgccggatgccccgcttatgcccaccaataatcgtttttttctcatattctacacctcatgttccttctgtccagacatccacgggctgggatcaacgtctaaaaactgtgctctttggaaccgcttttttaatgaaaagggaacagtacagtcaaaaatggtcttgcaggcgatcccatgatcccggatactcggtgaaaagtcaggatcattggatggatccagcggatgacagcggacaccggggatggtgatgatatccgcatcaccctggaacctggtgttcatagcccataacacatcattcatatcaaaacagtccacatcttcatcaacgaggaatatgtgcttcagttcgctgaaggcagaaaatgccagaagagcagcctgtctctggcgtccctcatcgctggctgtttttttgcagaattgcaggactgccatatatttgcctcccccggcagaacagcagtatacattctgaagacgtccgggcatggccttttcgatcattccgataatgctggcttctgtggggattcctgccatggatacatgttcttcgctgggaccgatgcatgtttgtaaaataggatctttccggtgtgtcacagccgtcaccttgatcatccagcattgactgctggcaggacccgtatatcccgggaattccggcatggcgtaacctgtatggctgttctggtcctcctgcacacgcactccgggaatcacttctccttcaataacatactctgcattggcaatggcatgttccttgacagtgagacagcggcataactttacaggttccccacgaagggcaccggcgatggacagctcatcgaatcccagcggtgtggtgggcggttcaaaacaggagccaacctcgatggcaggatccacaccgatactgacagagatcggcagccgctggttaagctcctctgcccgctctgccatggcgccgatatgccgcgcaccgggagtaaaaaagatggagagttcatcttttccctgaatacagagccggtggatggtcacatcactgagacctgtgtctggatgggaggcatagcacatgccaagggtaatataaggtccagcatccactggtgtgttggtcggggccgggaccagctttctcaagtcaaaatccggggaatccgcccggtggaccacctcctggcactgtgcttttccatggatcaccactggctctatgggatgtccggcacattcaaacagcttccagccaagcttctcagggggacaatccagaagggaagccactcgtttgcggcttgccagaagaccgatggcggctttagccccaggatgtccttttactctgtggaacagcatagccggcccttcctttgtagggcgcttgacagtccctcctgctcccacatggcggtagataccggaaagctctgccataggttccacaggaacatgggtttccaaaagctgtccgggcatttcttttaatcgttcaatagcacttcgaagatcagtaactttatcagacataaatcttattcctttcttgtatttcatgaattttatgtgaaacaggggccttttgtaaccatattagcaaggggcaggtagtgaatcaattcgatttgtagtataattgattccataatggaatgaataggaggcagccatgacctttgaacaattaagtgatatgatcgccgtagtggaaaatgacacgtttctggaagcagcagaaaccttgaatatatctcaatcaactctgtcaaaaaaaatcattaagctggaaagagagttgaatgtaaaattatttgatcggagtaaaagaaaagcctcgctgactgaggccggaaggatattctatgaggaagcctgccgtctgaaccaggactattttgagatgctcacaagactgaagccctatcaggggaaccggaggcagagactctgtatcggtacactgccgattttgacccaatataatctgacggcccgtttaaaattgttcacggagcaaaatacatggattgatttttcttttgaagagacagaagaggcgcagcttttggtagggcttcgccagaaaaagtatgattatattattgccagggagaatctattctcaaagcttggatgtgtctctgttccgctggcagaggatgaactgatggccgttctccctgaaaaccacagattatgcagctgttcatctgtaaagctgacggatctgtacgatgaaaagttcatattaatgaatgcgtacacatccatacaccagctttgcatccagattctgaaagacgcaggcattactcctgagattgttcggaccggaagggtagaatccattatcagcggcgttgcagtgggcgaaggtatcagcctgctggcaaaaagcaacttccggatctttcaggccggccaggtaaaagttgtaccgctggatccgcctacgaaattatctgttgtccttgcaaagcttgcgggaacagcgcagacagatgccatgaggatctttgcagactacatgtgcaacgggtgtgaggtataatactatcatcacaccatccgctgcctttattcttttacagttttctgatctgtagtgccatttccataatacaatcttttgtctgctggcaaaatcccaagcggtcataaaaaccgtgatccataccctggtaacggatcacctcacacggtatcccagaatcccacaatctttcagcaaataaatcattggataagcggaaatagtcaaattcggcttcgatgatcaccgctttttttagtttggacaaatcatttgcataaagcggagaaatcgaaggatccttcacatcttctccgttggctgcgtacaaatcatgaatggtattgtttaaaatccgaaagcggttgagtcttgtgattgcatgattgtagtgttcagggatgacttcatatttatgatagtcccagtagtccgtatcttcggcatatgataaatccagtgcaccgtacaccggcatggtcagcgcaactttttttcctgtttcagaaagggagcatgaaactgccagattgccgccggcactttcgccggcagcagtgattttgtttctgtccaaattccattcttccgcatggtcccagatccaagagataacctctttgcagtcattgagagccgcggggaacggattttcaggaatcaatcggtagtccacggaaatgacagtagctttggactgttctgccagaaacttgcattgattctcaagaaccttagtacttcccccgaggaagcctccgccgtggaagaaaatcacaggtttctgcatttgcccatttggtaaacgaaaaaaagttacagggataaagcggtcagaaagtctgatcaaaaagggcatttcttctaccaactcttgtgtgatgtccaaattctcagatcccatttcaagcctcagggaagagagatccataaaaggtgtgaagggggcgttctcatagcctgtcagaaaaactccggacttttccaccttcccgatcacagaaggatcgagaaggtggtccctgttacagcagggaatttgtttcagtctgcagcaatcgttactttcagcataaagagggatcgttttttctttaaacatacagatctccttataatgattctatgagcagcagatcttcctgggaagagacggatccctcccggagtaaggtcatttttctctcagagccgccggatgtatcaacaatgatgaccgtagggtcaaaccctgcttttttaatctcatctatttcagctgcagcaattaaatctccaggcatgacaatatcaccagtctttacatgagacgtaaagtatttaccatctaattttaccgtgtcaattccgatatgtattaaaaattcttcctggttttcacttacaatgccataggcatgcaaggttggataaacggcggccacagttccagcaacaggtgcggtgatttgtccatttttgggaattactgcaataccttttccaagggcctcagaggaaaatgcaggatcctttactttgttcaaagggagaaccgttccgtcagcaggcgcatgtactttgattgccacagccttgcatgtggatgtaccgagctctgtatgatctgccgtgatatttgcatcagcccgttctgattccggtatcatagaatcattaaaaccgaaaagataagtaagaacagcggaaatcaggaaagcaccaaaataggcaattataaacccggtaaatccggcaccgaagtaagcagggaaggttggaatggcagcgacggctacagccatagccctggcaccgcaggctcctgcaacggcaccaccgatacctcctccaatgatagcagccgcaaatgctctgcgatattttagtgtaattccataaattgcgggttcagaaatcccgaagaatcccatgagagccgcaggggccgcaatctgtttcagccgttgatcttttgttttcagccatacaccgaaagcggcgcctgactgggcgataatgctgggaccaaatacagccaggatagtatcaaaaccaaacttttcaatgttggagaaaatgatcgggaataatccccaatgaattccgaaaataacaagcacctgagcaatggcgccgatgaaacctcccgcaatcatagggttaaatccatacagattcatgtaaaagcctgctatcgtattactgagcatagagccaagaggtccaaagacggtaatcgtcacaggaactacaattaggagagagaaaaacggagcaatccggcttctgatcttctcaggaagcagttttgcgaggcctttttctacataggagagcagtaagattgcaaatataatcgggaatacgctgctcttaaatgtagtaagctgtacaggaatacctaaaaagctgatagcctttccggcatcataaagagccgtcagattcggatataataatgctccggcaattgttacggacacaaacatatttgtcttaaagcgtttggcacaagtgatcgccagcaccactggaagaaaataatatagactgtccgcagctgcatttaaaatctgataggttccgctggcgtctgtcaaaagaccggatgcagtgaggatgctcaaaagtccctttaaaataccagcgccgatcagtacgtcaatgaggggagtaaacagactggagatgatctccagagctgatcctaaaaaccctttctttttctgactgccggcatccgaagaagcagaagaactctgcggaaagatcccctggagttcttcataaatgtactggacctggggaccgagtacaatctgggtctgccctgctacatccatcacagatagaataccatccagcttatcaagactttcccggtcgattttgctggaatctttcaggtcaaggcgaagccttgtggagcagtgggaataagaaatcacatttcgcttcccgcctactttctgcagaatttcttctgccatttgtttgtttgtcatgttgtttcctccttaagattgaaataatttatcttaagtcttgcctgcccgaagcagtcacaatcttagcaaccgatgatttacagctttctgctctctgacagcagccgttcaatatgaatggtcagatagacctgttcactttttgtaatagtatagtcataacttttatgtatgtaagaagcaatcttccgggaacattgaaatgcttccggcatgttttcctgaacctgagggtataaaaaagatgcttcttctgccggaggctcattcatcataagccgctgggaaaagaattttaaatgcagtatgaaccttgtatagttcaatgaactttcatcaaaatcaattttaaactcatattgtacaatgctgcagattcctttgatcagccttgtcatgtcgataacagactggatctcttgtccgttaagttctgcattaataatatgcaaggcaacaaaactggcttcatcttcggggagctccaccttgagagtggaattcatcagtttgattgcttccaacgcaatctgatattcctggggatagaaacgtttgatttcccacatcaactgattttggaacaaaagtccttgtttaaaacgttctaccgcataatacatgtggtcacagagagtcacatagatattctgatttaattccttagaaagcttttgttctgcatgctgcttaatctgatccgccagataaaagtaatcaataggaatctgttttaacagctccgaaagtctgtttcctgtagcttcttcttccagtaagaaaattcgttcaattttttctgtctccaccggatccccttttttcttctgaaaacccagtccaaggccggtgagaataatgtcctgtccctcttggttttttgaaaatatgacattattgtttaagacctttttaacatgaaagcactcctgctccattattttccctccctcaaatataaaaagagacctaaattataataagacataattcatgccttattataattcaggtctcgcctattctatgatagtcacgatccctatcgaattgttgatacaaatttatcacagctgccgtaaactgtcaactggatgttgagaatttgtataaatgtgataaaaacaaactttggtcagatattacaacatgataaccgtaacacccatatctccctcgccgaattctccgtcttggtatccagagatccgtttttgttttttcagagtctttaagtagttatggataccttttctcagggctcctgttccctttccgtgaatgacggtaatctgtccaaggtttgccagacaggcgtcatcaataaacttatccagctgggaaatagcctcatctacagtcatgcccagtacattgatctccgggcggatgctggaggacttgttgatggcagtccgcccgctgtttctggcttcgtttcttgcattttcccgcttcacctgttttacgctcttcgtgatctccagatcctttacattgattttagagcgcatcatgcccatctgtacatataaatcccctttggaattgggcagtgtctggacagtaccgttcagagacaggctggtcacatagacctcatccccaatctggaaatcgcctggctcatgctttttagaagcccgttttttggagcggtaggccatatctttttccaggccggacatcttgccacgcaggtcacttcgcatatgctccatttttctgtttgcatctttcccagactgtttctttaacttgttatactctttaatagtctcatcggcagtatccttagcctcagaaatgatgcggtaggcctcttcccttgcctctctgagcagcttctctcgtttttccttgatgttttcctgccgctctttcaggctttgcctgagagattcaatctcttttctgtattcaaaaatctcttcctgttcctgctcaatcgtctgtttgctcttttccaagtcagccaggatggtctcaaagtctttgaccgactggtcaatctggccggaagcatggtcaatgatgtgattatccagcccaagcttctgggaaatagcaaatgcattactcttgccgggaatcccgatcatcagcctgtaagttggagacagtgtctccacgtcaaactcacaggaagcgttttccacaccctcagtggaaagtgcaaacatcttaagttcactgtagtgagtcgtcgccatggtttttacgccccggtcatgcagatccgttaagatagaaatagccagtgcggcgccttccaccgggtcggttcccccgcaaagctcatccagcaacacaagagaattcttgtgggctttttggatgatggagacaatgttggtcatgtgagaggagaaggtacttaaattctgctcaatgctctgctcgtctccgatgtccgcaaatacttcctcatagattcccaggctggatccctggaatgcaggaatatgaagacccgcctgtcccatgagcgtaaacagcccaacggttttcagagaaacggtcttacctccggtattgggaccggtaatgaccagcatggagaaggcgtcgccgagagttacgttaataggcaccaccttcttagaatccagcaaaggatggcgcccctgtttgatattaatgacaccgtcttccctaaagatcggtttgctgccgttataatctttggcatacttggctttcgcgaagataaaatccagctgaatcaaaagcttttggttctgggccagtccgtccagatcgtaggaagcctgttcactcagcagggataaaatacgttcgatctcagtctgttcctgtccctccagttctttcagctggttgttcagtgtgaccacggccatcggctcgataaataaagtagaaccgctggaggactggtcatggatcattcctttaaactgtccccggtactcttgtttgaccggaatacagtatcggccgtttctcatggtgacaatggcatcctgcagcatgtctttgttggcagaagaactgaccatcgttgtcagctggctgtggatcttctggttggtcagcttcatgctccttcgaatatcttttaaggccgaagaagcatcatcactgatctcctcaggggaaatgatacagtgtctgatatccttcaaaagaccgtccataggcacaagagactcaaacacagaatccagagaatcggcatctgccatatcatccttctgcgccccgtaggacagagcgtttttcaccgcctccaaaagacctgcgatctctaacagttccccggcacttaatgtccccttcattttcaggcgcttcagagaagcacccagatcctggacgccgaaaaaagaaatgctcccctgcttatatagcctggtcagagcatcctgggtctgttcctgggccagagagatctctggttcctgtgtcatcggctggagagtttcgcaggcttctctcccaagctcggtagtcgcataggcagcaagccgttcgatgactttgtcatattctaatgtatttaaaactttttgattcataattattccctcagattcattgaaaaccattattaaagaaggttttccttttttgattcagaaaaagtgtagcataaaatatggggcatgtaaacgaggcagacggcaattttacagtggattttcaggggagtttatgtaataatagggaaagtaaaagaggtgcgggctctaaggcggccctagaaaggttaaattatgagatatataagtgagctgcatgaaggagatatggtttcagaggtatttttgtgcaagacaaagacatcgggcacatcaaagtttggaaagacctattattctctttcgctccaggataaaaccggaatgatcgacggaaaagtatgggaactgaacaatgccatcggccatttcgaggctatggattatattatggtgaaagggaaggttacaaacttccaggggaataaccagttaaatattgagatgatccggaaagcagacgaaggagaataccaaatctccgattacatgccgtctacaaaaaaagatattgatgaaatgtttgacgagcttttagggatgatcgaaaaggtgcagaatcccttcctgaaaaagcttgccctgagggtcttcgtagaagacaaagaatttgccaagaaattcaagatacattctgcggccaaaagcgtacatcacggatacatcggagggctcttagagcactccttaagtgttgcaaagctgtgtgaacagtatgcagtcctgtacccgcagttaaacagagacctgcttgtcaccacagccttgtttcacgacatcggaaaggcagaggaactgtccgcatttccggaaaatgactatacagacgaaggccagctagtgggacatattgtcatggggaccatcaagctttccaagctgatggatgagatcccgggattccccgcaaagcttgccaacgaggttaagcactgcattctgtcccatcacggagagctggagtttggttccccgaaaaaacctgcattggcagaggcgattgcactgagccaggcagataattttgacgctaagatggagacattttcagagattatcgagaaaaaacaggaaggccaggagtggtccggtttccagcgtttatttgatacaaagatcagagagacatccatttagtcagactggatggttatatataagaggtgcctatgaaatttaaaaagaatcaattagtggaagtagaaattgatgatatgggcaatgaaggagagggcatcggccatgcagacggctatgccctctttttaaaagatgccgttgtgggggacaaggtcctggcccgcatcatcaaaacaaagaagaattatggatttgccagagtagaaaaacttttggagccctcccctgaccgggtagagccaagatgtccgtccgctcgtccgtgcggtggatgtactctccagcatctgtcctatgaaaagcagctggagtataagtttaacaaggtgaagaattgtctggagcggatcggcgggattgaaaatgccgcttctttaatggagccgatctacggaatggacgagccttattattaccgcaacaaggcccaattcccagtgggacgcaacaaggacggaaagttaatcaccggattttatgctggaagaacccactccatcattgactgtatccactgctcgatccagcatccagtaaatgaggaaatactcactaaggttctggaatatatggagaagcatcacgtggaaccttatgatgaagagcggcataaagggctggtgcgccatattatgacccgagttgggtttgtgacaggagaaattatggtctgtcttgtggtaaatggaagcaaaaaggacctgtcgcacctttcggaacttgtggattctttaaaagagattgacgggatgacaagcatctgcgtcaacagcaaccgggagaagacgaaccgaatcctggggaacaaagtagaagaagtctatgggccggcttatatctatgattatattggaaatgtgaaatatcagattgggccgctgtcttttttccaggtgaatccgagacagacgaaagtgctgtatgagaaggcactagaatatgccggactctgcggggatgagactgtgtgggatctttactgcggtatcggtacgatttctctgtttttggcacagaaagcaaaacaggtttacggagttgagatcgtaaaagaagcgattgaggatgcaagattgaatgctgatatgaaccatatggaaaatgttcagttctttgtggggaaagcggaagaagttctgccccgggagtatgaaaagaacggggtttatgcagatgtaatcgttgtggatcctcccaggaaagggtgtgataagacacttttggatactatggcggcgatggggccgaaaagaattgtttatgtcagctgcgatccggggaccttggctcgggatttgaagatgctgggggagaaacagtatgaagtaaggaaagtggcggttgtggatcagtttgggtgcacatctcatgttgaaaccgccgtgttgctggtgcgaaaaccttgattctacgggcgtttgtgggattgtttggagaaaatggagttgtgttttccgagaggtaagatggataagctcccgcagatagggggacggggtaatgccatgtgagtatgagaaatgagttttgttttgtggaaagataccacgaggcaaaacccatactttgtggcgatattaaaggttgcagttaaatattgttgtaatatttttccggtatgtattttattacattggggaaaatggagaaatataaatgaagatatggattgaaatgagccgggatatagaacatggtggtaatgaatggggatttacagaatgtatatgggcaccgacgtataagaagggcaaagccggaaataagtcgtggctattttgggagaatgtaaatagggtgaaatctggtgactttattattcatcttagaggtaaagggaaagaggcagaaattgttgggtgttctattgccaaaacagatggttataggactgaagaacgcccacctatcgctggcggatgggactattgtaatagtttttatagagcaacattaactgatttttttagatttaaaaattctattaatctttatcagttgttttttgacaaagaaatagatttaaaaaactactatgagaaaaaaagtaagcctaagaacttattttttacaatacaatctggtagactgcaatgcttaaatggcggatatctttcagaggttgatgaagctcttttggaaataatattagatggtgtacaaaagtttactgatgagtctgtttttattggtgtatcagtatcgacatctacgatcttaaaacaaattaaagcgcgagttgggcatgatcgctttgcaacaaatgtaaaaaataattataataatcggtgctgttttccgggatgtaagattgcagacaaagaatttttggttgcttctcacattgcaagatgggcggataacactaataagcgaggagatacttcaaatggactatgcctatgccctattcatgataaagcttttgaaataggatatttttcattggatgataatcttagagtatgtgtagaaaagagaattgatcatagtcaaatatttaaggaatacatttccaagtttgtaggcatgccaatatctaaaggtcatattgagccagatcgcgaagccctaagagagcatagaaaaagatgtaatatctcggaatagaattgataattattatatacataatcaaataaattggaaagagtattgtggaacagcagggtggttatgaagaagcagaatatggaagcagattaatagcggaattatacaaaacagatgacgatagattttggcaaaggtttcacgccgactaatcttaaatatatgatatagttttatctgacctttccaaatagccacgcactgcgtggcgaattgagttggacacattaccgcctgctcttgcgcgtggaaaatgaaaaagcccgtgagttctatacagaagaggccataaaatcgaattggagtacacggcagttggaaagacaaattaattctttcttttatgaaaggttgttgtccagccaaaataaagaaaaagtttcagaggaaatacagaaattggagcccacaaaagtgccagagaatgttatccgcgatccatatgtattagagtttctgggattaagcccgaatgatgatttttatgagagtgatcttgaagaagtattgaattagggagataacccaccgataggaattgttctttgtgcggataaaagtgaatctgtggtaaagtatacattgccagaaaatgaaacacagatttttacgtcaaagtataagctatatcttccaagcgaagaagaactgtcacaggaattgcaaagagagtaccgggcattggaaaatgataaagaaaaatcaaaataaccttacttgaataaaatttaatttttgtgggagggataaatttattcataaaggagtaatttttattaaaatggggtaagaggggttaaattaacgaagtaatttaccccaccagtatgttatgaaaaaaggatggggaaagaatagacattgaaatgaccgtagatagggaagatgtgtcggagaaagtagaagcgataaaggatgcgtttaagcattttgaagtcatctaaaaatatgagtgtatcattagaaatagtggtacgctttcttttttatgaatttgtttttcgctgaccaatctttatattaaactaccttataaatagaattagaagtgtcactttactattattgactcaaacaaaagaatcaaatataatatagtaaagtgcctaattgttaatttaataaagggcaattcaatagaggtgaagatatgcttcagaataaagatattgaaactttgagagtgttgtttagcagtcataattatgttatgactactgcggaacttacagcctcaaagttatactatgcagatataaaacgacttttagacgaaggattgattgaaagagtcaggcgaggttactatcactgggctcaggattgcggagaaagtgaagttgtcattatcaatcgattgtttcccgatgcagtgctttgtatggagaccgccctattctattatagatacagtgacagaaatcctgctgaatggagctttgcaatagataaaaatgtttctaagcgtcgaacaagaatcgattatccgtttataaaggcatatcgtgtagaggcagggttggttacgctaggcgaaatcgagggtgaaattgattttcacaaagtccacatttatgaccgtgaccgtactatttgcgatgtgctacgaaatatgaaaaagatggatatggagatttttaataaagcggtgcagggctatgtaaaagacccgaaaaagaatataccgaatcttatggaatatgcgaaagttctgcgtgtacaaaagcgtgtaaaagaattgattggagtgtggctgtgatggcagatattgcagcattagtacttggtaagctagaaataaggctaagacttgtggtatcagttaacagcagtgcctgtagctttttatacaggaggaattttcgagaaaaccctcgaagtcagaatatgaggactatctggtgctaaaaggcgggttattcatctatactattacgaactttgaaagccgagctactattgatgttgatttcctactctgtggatattcaaattcaatagatagtgttaaaaatatgatctgtaaaatcatttacacaccgacaggcaatgattatattaagatgactgcaaaagttttgaggagatttctccacagagaaagtatcacggtatcagtacacaaattagaggacagataaaaaatgtgcgagtaccttttaatgtagatataggtgtgggagatgttatcgtaccaaaagcagaacagcgtaaaattaatacgcagcttccagactttgaagcacctgtgataaaaacttattctattgaaagtaccatagcggaaaagtttgacgcaattttgtaacgcttcgaactgacaggcagaatgaaagatttttacgatatttattaactttcaagtacattcgattttgatggggcaaaattgcaagctgcgatctttgagaccttacagcggcgtggtacatcatacgatagagatagctttaaacggattgttgcacttgccgatgataaggatatgcagaagcggttgaaatattttttgaaaaccaagaaagagagatattatggagataagattcctaaatcaatcagatgccccagaatccgtcagctacatttacgaaaccagctggaaatacgcatacaaagatatcattccccaaagctatcttgacaaccttgaaaagggaaaatggtgcgaggccattaaaaatcctgatttgtgttcgttgattttgctggatgatgaaaaaatgattggaacggcctcttactgtccatcaagatttataagcatgagcggattcggtgaaattgtctctctctatttgttaccggaatattgtggtcaaggatatggaaaattccttctgcgcgctgccattgatggactggccaaaatgggatataaaaatgtctttttgtgggttttggaagaaaacaggagtgcgagatctttctacgagaagtttggcttttacaacagcggtgattgtctgaaggataacataggtggaaaagaattattggaattacgatatatttatacgtaattgaatggatttctgatctaatgactgatgctcatgttttaattgatacctatgcagcccaagtttatggaaattatgaatgaagcagattgaaaaaggactccggaagtgaatccagacatgaaaaagtgtacatagaatcagaaatgaggtaagtagatgcaaaggattattgcagcggccataatcaaacatgataaggttttaattgcagaacgtaattatggttcattaaaagaatattgggaatttccgggtgggaaggttgaaggcgatgaaactgatgaagagtgcatctgtagggaaataaaagaggaatttggagtagacattcaggtatcttcatatcttgggcaagcaaaatttcaaatagaagaaaataattatgaaatcattttatatgaggcaaagctgttgagcgatcatcttagattgacggtacacagtaaaatcaaatgggtatcaagaaatcaattatttaaaaataaattggcgccggtggatattaccttggcgacacaatgctttgggggtgtttaaatgaattatttttttgtgtttcagaatgaaacctacaaatgggaacacagagggggttatttatgggcaccacagtacggaaggataggacaacgagtatctcattatgaaactatgaaatctgtcaagcaaggggatataattatccatagcttgaaaaagaagattgtagccataagcagagcaaaaaaagatgtgtatgctgcgaagaaacctgtagaaataaaaaatccatggcaggatcaaggatggcgagtggatgtggattatataacctttgcgaagacgattgaaacctcagattacaaggatgaacttttaagactacgacctaagacgaatgctcctttcaatagaaaaggtcatggtaatccaggttatctttttctggcaaataaagaaatgtacgattttttgttacataagatattaggagttcagacagacgatagtgaaaaacagaaaattattaatctgttaaatttatgcaatgatctagggcaagaacaaatagacctgcaaattcagatggattttgaagaagtgaaagcaacacaattgacacaacaacagttggcccggcacgcaaagcattcaagacctccaaaaactcagaaaacagagtcaactgtatattatcgcagtccgtacattagagagctggtaaaaacttttgcagaaggtaaatgccaattgtgtaaattaaatgctccattttatgacaaggaccataaaccatatttggaagaacatcacatcaaatacttgtcggatggaggaagtgatactatggataatgttgtagctatttgtcctaattgtcatcgaaagattcatatattggaagatgaagaagatagaatgatactattccaaaaggcagaagagaatcaaaaacgctatgaaagactgctaagatatgcagagggtattgaagagtcatcttgcggagcaatgaccgaaaggatataatcatcctatagtaatgtttctgcaggcaggccgaaaggagagccagatgaccggctgtgtaaaacgaacaaatcaattaaagatcttacgctgcaaggtgatcagcatgatcgtatgtctggtacttctagcggcagcggtccgtcctgtaagcgcggcgcagacagaaattgtccgcgtcggtttttttgctttagatggatatcatatgcaggatcagtatggggaccgcagtggatatggctatgaatatcttcagtatatgggaaagtactctaattttgtatatgaatataagggctatgataaaagctgggaggaaatgcaggatatgcttgaaagagggcagattgatatgcttacctcagcccagaaaacaaaagaacggatgaagaattttgacttctccgacagaccgatcggaacaagtaaaacccttcttaccgtaaaagcaggaaatacaaaatatatgaatggtgatctccgtaaattaaacggaatgcgggtaggaatgttgaaaaaaaacagcaagaacgatagtttccgaacgtatgccaaagagcagggaatttcatatagaacagtgattttcaatagcagtaaagaaatgctgaaggcgctgcagagcggtaaagatattgacgcagtcgtaaccagcagcctaagaaaaataaaaaatgaatgggttgtggcatcttttgacccgtcaccgtactatgtaatggtaaagaaggggaaccacaagcttttgaaccaggtcaacgatgccatcagtcaaatcgagctatataagcctaatttacagacagaactatataaccgttattattctgcggaaaacggcgatgatgtatcctatacggctgaggagagaagctacatcaatcaatttgtcaggaagaaaaaaactttgaaaatattgctgaacacagacagaaaaccattttcttattatgaagatggaaagataaagggggttttgacagagattctggctgaaatcatggagcgcactggcataccatatgagattattccaactaagaccagggcggagtatgaaaggaagctgcttcagggtggtactcaggtttgttttgataaccgatatgatttgaataaagccgaacgggaaggttatgagttgacagagccgtatctggaatctacgatttcccgcattacaaataaaaagtttacaggcacacctaaaaccatagcaacggtaaaggaatcagatattgcagagggttatatattcaaataccacaagacgaataaagttctttattttaaaacactggacgattgcgtcgatgccgtgttatccggcaaggcggatgccgcttatctctacacatacacagcccagcaatatatttatgaggatgaccggaaccagcttcaggaaacactaattcccaatgacacggttaagtttgcgatggcggttgagcagaaggaagatcctgttctattttcgatcttaaataaagcagtactcagcatcagtgatgaagacattgaccatattgtgcaggagaagatttcttatccggtgaaagaattttcggtaaggggatatttctacagcaatccatgggcctggggtgtggcaggacttgcggtggtactgctgatctcaggaactgtattttgggtgtataggcgaaagaaccgaagactggaacaagaaaagagcagggaattcgaacgttttattacgtatgtgtgtagggcaaatgatgccgtcatggaatacattttagaagacaataaaatcttttcttaccagatgaacgaaggtcatattctcaaacaggaggagatgcttctgttgggcagtcagctgcatcataatattcatccggaagactgggagaatgtgagggataaatgtgatttaattagaatccgaaagcttgccgaatccggaggggagatttattttgagtgcaggagccgaaggaaatccagccagtatatgtggttttcttatacattgcaaggaattccgggggacggcactgaatcggacaaggttatggtatttctgaaaaatatccatcaggcgaaaaagcaagaggcagagaaacgccaggcgctggaggacgctctgttatcggcgcagcaggcgggcaaggctaaaggagagtttatgtccaaaatgtctcatgagatcaggacgcctctgaatgccatcattggttatctacagatcgccaaaggagccgtagaagaacgagagaagataaaagattgtctgcagaaacaggagtacgctgcccagcatcttttagatattatcaatgatgtattggatattgcgtcaattgaaagtggtaagataaaattggaaaacgcggtttttaatatacaggaactgctgacagagacggctgcgatttttgaaagtcaggcaaggcaaaaggagcttgagtttggaatgaaggtggaggggatcaccaatagtttactggtcggcgaccggctcagggttaatcagatattaatgaatctgttgtccaatgcagtgaaatttacatctgccggaggaaaggtagaattggaggtttctcagaaggcagtgatcgaaggccgggcgcaccttcagttccgaattcaagatactggaattggaatgacaaaagaatataagcaacggatcttcacgccgtttgaacaacaggatgccggcaccgcaaagctttatggaggaaccgggctcggtctttccatcacaaataacctggtcaatatgatgaacggaaccatccatgtgcagagtgaggaagggaaaggcagtatttttaccgtaggactgtcatttcaaattgcagacacagagacgtctgttgaaaatacaggtgcagatcagaccagaaagataaaaaattctggtgaggatatattttcaggcatgagtatgattctggcggaagacaatgagatgaatcgggaaatcgtaaaagaaatccttaaggataccggcttgaatatcacatgtgctgaaaccggccgggaggcgctggagattttcgagaactccacggatggaacataccagatgatcttgatggatatccagatgcctgtgatggacggctatgaggcagcacgccggatcagggcatgcggtcattcccaagccaggaagattcctatcattgcctgttcggcggatgcgtttacggaagatgtaaataaggcattggcggcaggcatgaacgatcatatttcaaaacctattgattatgaaaagctgtgccatatattaaatcaatactgtacggaggcagaactatgaaagactttaacagagaaaacctgatgttttccctctgtggtttaaactgcgggttatgctccatgaagatagacgggtactgtcctggctgcggaggaggagctggaaaccagtcctgcaaaatcgcgaaatgcagtatagagcgggggaagatagaatactgcttccagtgcgggagctatccctgtgaaaaatatgaaggcattgatgagtatgattcatttatcacacaccagaaacggcagattgactttaaaagggccagggaaaaagggatggatatttataatgaggaacaaaagaagaaggcagagatcttacatgagcttttagacaattataatgacgggcgcaggaaaagtttttattgtacggcggtgaatatgctggaactggaagaggttgaggcagtgatggaggagcttcatcgtgacataaagccgggagaagaaaacctgaaagaaagagcggccacagcggtaaagttatttcaggataaggcagcacaaaggcagatcgtactgaaactgaagaaaaagccacggaaaaagaaatagaaattacataagacagagagaagaaccaaacgcttctctctgcctttttctgctttttctgattccataggaaagttctgcgaacctccctgtggaataagcaagccctgcgggcattatgcacacaaatgcgtgaggaaactatttgactacgtcaaatcgcatttggcgctcaaagttgccaagcccctcaaagaatgagaggtttgggtgttgaagtggacttacccactttgttctcttatcttttagggacgcccgcaaagcctccgttgtgggttaccttagcttcatagagagcctcatctgctgccttggcaaggttcacataggtgtctccgtgttttgccacaacagctccggcggacatagtgatggaaggcatatttctccgggccgcctctttcgccagtgacacattgatatcatccatgatcttttttgctacggaatagtcctctgtcctggatacaaagatcgcaaattcatccccgtgcagacgtgatgccaaatctatggttcggatacgtccaatgatcatctgggcggacagtttaatgacttcgtcaccgacagaatggccgtaattgtcgttgactgatttgaagcggtcaccgtcgatcataataaggattccgcgctcatccgggtccatttcctctatcagatctgtgacgccttttcggaatgacttaaaattcatcattccggtgagatcatcgatggcagccgctttctgggcagcggataaagcaatctccagtcgtttctgggtctggcccagatccacataggctgcgtgcagctcccggtttttctggcctttactgatgcgtcccagaatataaataagcaaaagctccagtgcaagaagaggaagcagccatatttgaacggtacttttcagcatagaagaaaccgggacaagaatcataaagttataatcctttcccttcagcagataaccataataacttttgttcttgattttcaaagtatggactttggaggtctggcctttcagcttcgagaattccttatcaaagtctttctgaaaggtataaaatgcagatgcagagtccagctggtctttcagttttgagcgctcttcctctttcatatccccggcatctttaaaggccttcaaagccttttgatagacagccttggtctcatctaaatcggcataaagatctccgcccaagtagtcggcattgctgcttccaatcacagttcctttgttgtcaaatatcatcagctgttcgctgtcatattcttttagagaggagacaagatcctggatatcccccattttaatatcataagcgaatacggttttctggtctggctgaagctgtgagatggtggagaggatatagtgattggcatagctcatatacggaggagtaaagacaacctttcctttgccggatactgcatctttataccatggacgttcggtggccttgtatccagtgctttcatattctgaataaggtgtatcccagctgtagaggtagcgccccttataatacatataaagaccgtcaaaggtatcaccttcaatgtccttcatcttagagtcaatacctttcagataattccaaatatcattgggattcgggttattttggatctcccttgacagcagctgtgaaaataattgaaaggagtggctgtaattttccatgacctcttctgcctgtgcctgggaatgattcgcgtgctcagacaaactttttgctacatactgagattcccttttacatataacagtcacagccaatatattgacgatcaaaaaaataacaacaccccaccgccgctttttacaccactcaacagtattcattacaatatcccccctggatgaatgaaatcatttactaaatttttaatatttatctaatattttaacatataatcacgactgggtctaacatagaaatggattcgataggaagaacataaaagaagtcatatggacagctgcattgacaaagagaccgttggttgataatatccatggaatgatggatttggtgtacgaaaaatgtgaataaagggaacgaagggaggccatatgattcagaaaaaagagattgacagaggaactggttttgattgggggcgtacatccggggactatgccagatacagggatatttatccgcaggagttttatcagagactgctggaccgggggatctgcactgccggacaggatgtccttgacataggcacaggtactggggttatcccgaggaatttatattctcatggagcaaactttacagggattgatatctctgaacagcagattgaccatgccagagagcttgcggcagaaaaagatatggatattaggtttttgtgtactcctgcggaggatgtgccgtttcaggccggctcatttgacgcggtgacggcatgccagtgttttacctattttgaccatgaagttctggctcctaagattagtgaactgttaaagaaaaatggaagttttgcggtgctgtatatggcctggctgccgaaagaggatgagattgccggaaaaagtgaggaactggttttgaaatatcatcccttatggaccggatgcaacgaaaccaggcataacattcagataccgaaggtatacctggattattttgagctggagtcagaagaagtgtttgacttggaagtgccttttacgagagagggctggaacgggcggatgaaagcctgcagagggatcggtgcatcccttcctgaacaggaagtggcggcgtttgaaaaagagcatatgaggcttcttgaacagacggcacccccgcagtttcatgtgcttcattatgcagcggtgacgattctccggaaaagaacggatgtatagaactcttggtttctaggttgtaaagtatacgttgagccttcatattgacaaaccctgatgttcctgataaaatcactaaaaaaataacagcttatatcctttccaccgggtaaggatgttctaaggcatgaaaaacagtcgcaggtctgacgcagcactgcaacagaagactgttttgagtgcctttttattttagcaagctgggaacacagtatcagggaggtttgtatggaaataacttttgtaaagaaaagagaattatttgacgacgcagaagatatcagggaagaagtgtttgtaagggaacagggatttataaatgagattgatgagacagacaaaaaggcagtacatgtcgtgtgctacgaccagggttatccgatcgctgtgggacgctactttcagggagaagaagagggagtgtaccacataggccgggttgccatacgaaaggaatacagaggcaggaatattggaagatttatcatgaaagctatggaggacagcatccgtcaggaaaaggggaaagtcattcatctgtctgcccaggccagagtgcaggagttttatgaaaaatcaggatatacagtgagaggcgaatcttatatggaggaacactgtctgcatattcctatgaaaaaagaacttggaggagaagagtaacatggggattcatttttacctgccgctggggctggtcatcatatcaaatctgatctatcacaacgcagcaaagagtactcctgccaatgcaaatacttttttatgtttaacagtgacatacttaatcgctgcagcaatctgtggagttgtttattttacaggaaaaggatctttggcaaaggacattcatatgattaactggagcagttggatattgggcatatccattgtggggattgagcttggttatctcctcatgtaccgttgcggctgggagatcagcaggggaagcctggctgccaatgtctgcgccacgataatgctgctggtgatcggtatcctgttttacaaggaaattctgtcgcctgctaagttcgctggaattgcttgttgtattatcggacttatgctgataaattataagtagaagataaaaaaggagaaacagtcatgatgaaatcagatgacagatttaagaggatctataaacagggaaagatgacggtgacagagatatgggtggaccgggtaactggtgtgaattatctgtaccacgtagatggctattcaggcggattgacaccgcttttggacagggatgggaagccggtagtctcaccggttataaacagataacagacagatgaaggggaagatatgccggtaaaattaaaggactgtaaaagagcagagacgctgtttggagattggccggaggggatactaaagtcgtgcctccaggggattatggggtgtgtttatgcagattatgcacaacagcctgagtcagctatggccatgctgggagacttttgttttctggcggggaggccggatgaagagcttgtacggtttaaacccgatgagtgcagcggagattttatgatcatggtgcctcagtccaaagggtgggcggcgataatcacagaagtttacaaagataaagctaagcctgtggccaggtatgcgtttagaaaagaaccgggagtgtttgacaggcagaagctccgtactgcggtggattccttaagtagtgagtatacggtcaggatgatggatgaagagtgcttcgatgaatgccggaggcattattggagcagggacctggtatcccaattcccggattatgaaatgtaccagaggcttggtctggggaccgtggtgctgagacaaaaagagattgttgcaggggcatcctcctatgcatctttccaaggcgggattgagatcgagattgatacgaaggaggagtaccggagacaagggcttgcatacgcctgcggggcagcattgctgctggagtgtatggacagaggaatctatcccagctgggatgcacagaatttatggtctgtggcactggctgaaaaacttggatatcattttgaccatgaatacactgtctatgagatctggggttatggagatatatagtcaatggagaaaaggtatccgatgtgcaactttaaaaagctgtagcaatcacataaaagacagagtatcaggagtaagagtacaatgagtttttcggaaaaagtgaaaatagaagcaaagaaaaaagcaggttttagatgtgtaatctgccaggagccatttgtggaagtgcatcatattattcctcagaaagaagggggagaagatacaataaataatgcagcgccgctttgttccagatgccatgacctttatggagataatccttctaaaagaaaacaaatccgtcaaatgagagatcattggtatgaggtaatggaaaaaagaaacacgggcaagcttagcgacctaaatccaattcgtccggaccatgagagaatcaatgcattgagagataaaagtattgctatccagcatacagtatttgcagaagaaaattttcagacagcagcgaggatgttatataaactgatctataccgctcaacagaagttccccaatcaaaaacgtatattatacctggatattgaagggcatagaaataatgcgggcggctacgacagagatatgctagaattacagaaagagttcatgcttgattttctattgccatatctttcggttgcacatctgcctttatgcagtgttgaaaacacaaaattgcaagagaatgaattgtttgaagatctggctatttttgcagaagatgaataaagttgaatggtataaatgtcgaagctttatttaaacagttacgaaaggggaagaagtttgacaaaagagaaattagcgttagagatcatccagaggctgaaagaggaatacccggatgtaggatgtaccttagactatgatcaggcatggaaactgctggtgagtgtacgtctggcggcacaatgcacagatgccagggtaaatgtggtagtacaggacctgtatgagaaatatcccgatgtgaatgcactggcggaagccgatgtaaaggatattgaggaaattgtaaggccctgtgggcttgggcggagcaaggcaagggatatcagtgcgtgtatgaagattcttagagatgaatatgacggaaagatcccggataacttcaaggatttgttgaagctgccaggtgttggacggaaaagtgccaatctggtaatgggggatgttttcggtgagccggccattgtcacggacactcactgtatccgcctggtaaatcgcatgggcctggtggaccagatcaaggatcccaaaaaggtagaaatggccctctgggagatcattccgcctgaggagggcagcgatttctgccacaggctggtattccttggaagggatgtctgtacggccaggactgcaccccactgtgaaatatgctgcctgcgggatatctgtgcaaaagcaggggtttagcacaacaataaaatgacggggagaaaggaggaagcctgcatgaagaatactaagctgctgaagaccaatgccgcggtcagtattattttgatcatcggctttctgcttacttctatattcagctataaggccaattataaggcatctctggacaatattgaacaggtatcggctcttacgtcagagggtatttattatcagatgagagctctctttgcaaaaccggtggatgtctcattgactatggcacacgacagcttattgacagaacatctgtcagaagaggcctccaggacaggtagcagctatgaaaaaaggacaagagagtatctgcgggcttatcaggagaagtatcactatgactctgtttttttagtctctgcagcgtcaaggcactattataattttaacgggcttgatcggacgctttataagagtgatccggaagaccaatggtattatgatgtgctggaaagtaaacgtgaatataccttaaaggttgataatgaccaggtcaaaggtgcggataataagatcactgtttttatcaactgtaaaataaaagacataagcggaaacgtcattggcgtagttggtgtgggaatgagggtggattctctcaaaaagattcttcagaagtatgaaaaagagtccgacatggaagcttatttcattgacgatgaagggatgattcagatctcaactgcatacacaggctatgaaaaaaaggattggtttaaagagtgcggagatgaagtaaacagaaaagagattctcagctggaaaaaagagaattcggatctgaacatctggactggacagtctacggacggcagtggaaaaagctttatttccacccggtatataccggaactgtcctggcatctgatcatagaacagaagacaggcaggctgatcgatgacatgaagcaggagatttatcgatctgtgcttatgatcgtgcttatcattctagccgttttatttatcattacatcggtgattaagaactttaataaacagttgacccatttgatgaacgaaaaacagacactgtttaaaaatgtgacggaacagctttatgaaaatatctatgagctgaatatctcaaagaactgcccggcaggaaaaagtaccgagcggtattttgagagcctgggagcaggagacataccctatgaccaggggcttagagtgatcgccgaaaaacagatcaaagaggaatttagggaaggttatgtcaataccttcaccccggaaaatgttctgagagagtatggaaaaggaaattatcatcttcagtatgattttatgatatcggaggacggatctcagtactattggatgaggatcgatgcctatacatttttatcttcagaagaccggtgtatccatatgttcacttaccgaaagaacatagatgaggataagcgcagggctctgcagatgacaaagatggcggagaccgacgagatgacgggttttcatacaagaaaggccaccgagcggtgcatagaaaagcttcttacgcaaaataaagatgcaaagtattcattcttcatttttgatattgataattttaagcaggcaaatgaccagtatgggcatgtttttggcgatatggccattaaagaatttaccacagtcatacgcagacatttccgtgagaatgatattctgggccggattggcggcgatgaatttgcggcttttatcccggtggaggacatgggatctgtggaggctaaggcagaaaacatagccgctgacctggacagaaccttcacagatggagtgtccagctggaagatgtcagtgagcatcggtatctccattgcgcctagggacggtatggactttgtgtcactatacaaaaatgcggatgcggctctctacgagacaaaacagagagggaaaaacggatacacaatttacagagaataaacaacaatataaaagggagtaaatcgtattttgatttactcccttttgtaaacagatcattctaagagttacgctttaacagggataaagggaaacgttttctggaggtgcttactgtattggaccctgtagtttcaggcttccatctggcatagagggtgtggtgttctgtgcttccgtgagggatgatctcgatctgttcaccgttgaatggatcatcataccatccaagaaaggaagtgcctggaagatttccgggaggattcaaaaccaggtcaggagaatcggctgtatatgatactggattggggttgcctgcgcccatcaggttttcataacggattttataatgcgcgggtgccagaagaatcagtgtgcggtcggagttcagactgaattcccagccatggaatccatgggaaggcatacgaaatttttcgacgtccgagggttgcagtccaaaatatccagagacagaggcaccgatggtgaccggggctttttgtttgtcaggggcaatatacccagaggcctccaggtggatgcaggcgttggggtgaagggcggtctgcagatagagcagtgaagatttatcttggaggaagatgctgtcataaaggttctgtcctccatcaaggaccagagaactgccatttcctagataaacaccagtaccttctttcatggcaaggttctgggaaatcacggtagtacctctcaagcttacaatattgtcagggccctttgacaagataccgccgccattttcagagagggcagtattctcctccacaatacagtcgaatagatttgtatccaaagatcctttctccgaatgcaggaacaatcccccgcctgattctgcctggttatgctgaaagatggtggaggacagcgagaggctgttggtcttgtcttcagcctctgaatggaaggacagtccgccgccgtattttccagaggtattctgggagaggtcagtctgggacacattcatagaaccggtgccgtatgatctcaggaaaatacctgctccgtcagaagccgaactgtttccggagatcctgctgtctgtgacatggaagaaaaattcactccttccggtaaggaaagcaatgcctcctccgcaggaagatgcctggttacttgttattacggcgttcatcagtgccagacggatgggtgcgtccacggaggtatttctgaaaaatagtccgccgccttttcggccggagttgtttttacatacagaacttgttgacagtgtgacggaggcgcctgtgtcggatactagacagaggccgcctccgttttcctgtgcactattctcatgaaatatggcaccgtctaaaatatccagctggtcctcatcgttggaggcatgaaagaagataccgcctccgtaagaagcagaattctttgaaatgcggaccttccctgaaacagtgagggcagaggcagagccctgatcttcccggaatcccgagaaattaatgcctccgccgaaaccgagggccgtgttgttctctatggaggctgagccagaaatggtcaaagtactgccgatttgttttttgtaggaacgcagataaatccccgcaccgtgtgccgccgtgttgtgagcgatcaatgaactgccttggatggagaaataatctttgggatgtccggcggcggccatgacagctccgccgcagatcctggaagaacagccgcagatctgcgcattgtctgtcatgagaaattcatttgcatgggagctgttccaggagaaacagactccgccgccctctgtataggaaacattgtcttgaagaaccgcaccggatttcaggcgcagtgtgcccccggagactaaaattaagggtctgttcgctggatctttacaagaatgaagctttttttggccgtccagtgtgatgtcttgaagggtgagactgcctccttcggccacatgaaacatagaggaagggaaggaagcgtctttataaagagagaggggcttatcaccggacaaaccgctaagcgtcatggaatggtgaatcatgatctgggtggaaacagtgaaagccgagacagcctggacctggggttcttcggaggccacagcgtcaagcagctcagactggttggagacgggtctcaaaattatcacctgctttttcttattaatgttatattcagtatatgcagagataggccgaatggggacagagcctggaatgttatctaaagaaaaaaaagatgtccaaaaatttatttcttggacacctctttttttgatcaattaattaaaacattttatcctgagggaacagggatttcacgtgttcaacttcttcctttgtagcaggtgctgctggaacataatagtgatggtcccttgcgatttgataaagatcttcctgggacatctcacactgatttctcatctgttttaatgtctgttttaattctgggttttctgactgtgcgatcatttctccgtagcgtgttaattcgccgtttacgcttgcgagggtatccgctaccattgttttttcatctaacattttgtctcctccttactttaagaactgcattaatttttgtttgctgtccagtgctgactgagcggaatccttaaaatatttttttacggaaggatccgttgctgcttcggcataagcctgcattttgcaatgtgtagtatcaaagccgccgattaagtgcctgagattttgtaaatctaacatagataaatttgccattgtaatgcctcctttaatatttgttacttctttagtatcccaaacaatgatgatcatattctaattacaaacagctgtataaatttgattgattttgtaataaaataaaagtaaacaggtaggtatattttttgattttaaagaacttgtcgggggacaatatgtcgcgtttttgcgggaatggggatttgtatgaataaaagaataatgcagggattgacctgggtactgttgtcagcagcgctgttggtttcaccacttttttcaaaacaggtgctgggttctgaaaatagggatttagaggtatgtccggcatcagacacagaccgagaccgaggaaagatttatgttgacggggttcaaggaaatgatgataatgacggagaggctgagacaagtgcctgccgtacaatggagagggcattggatagggcagagacaatcccgaaggacagtgtcgatatcctagtaaaaggtacagtctctgtgccgggagacttaacaattggttcaaaaaggatttatataaagggaaatggaaacggcgggctggcgttttcaaaatcattaattcttacatctcatacggtgtttcaggatatctgcctggactttgaagaaagtgtttcgctagaacctataaagatcaaagatacatatgccgcatttttaaataacgttaaaataaaaggaaaaccagacattctctatgagggcgctgatattcttcagattgcagacggctcctttggaagtgtaaaagactccggacagaaagggaagctggagttaaacggtggcacgatcggtacggctgacggatgggatttgtgctcagtttcatctgatgccggccatacagtaaccgtgggtcagggaatctggaatatccagacgctaaatctcatatccatatgccgggattttgtggtcaatgggaatatccaggcagggaagataacaaggaccggtacggacgtgtcattgagccttttaagcggaaaaaagatcatggcggacagctttgatccagggatactgcttgagatccggcaggataaaggaaaaaccaagaccggggagtatctggtatgtaaaagaattgattccattcatgcgaaaacggaaaaaggatattattttatcatacaggataatgggagctgtttttccgccgtgctgcgggcaggactggattcactaaaagtaaatcccgcctctgtttcattatatccgggggaaaagacttctctaaaggcagtatttatgccggtggctgcacaggatatttatgctgtggactggacatcgtccaatgcagaggttgcaagtgtggacgcatatgggaatgtcactgcccgaaagccagggcaggctgatctgacagtcaaagctttgagtgacgggtcaaaacaagcttcctgccgaatcaccgttcttcagagacactatcaaatattctatgtcctaaacggaggaacgaacagcaaaaataatcccgcttcgtttacaaaggctgggttttctcttaaaaaaccttatagaaggggatatgaatttaggggctggtatgcagacaagaggtttaggattcctctgcgttccatagagatgaagaagaattatactgcttacgcaaagtggagcaaaataaaagtttcaaggcctgccattacttccttaagaaatccggtttcagggaagttaacagtgaattactcaaggcttagccatatttcaggatatgagattgtctgctccagagggcgtgacttttcatccaaagacaaaacagtgaggaccaaagccgctgccaagacattgacaggacttcagtctaacaaaggctattatgtaaaagtcaggggttacagatatgactccatgggaagcagggtctatgggtcatacagccctgcacggatagggaattccattcattatcatttaaaaaggggcaaaaactcagccggtaacttgatccgttactttaaaacgaaagtgacactcaaaaatccggtaagaaaaggatacaggttcaaaggctggttcacaaataaaaaatgtaccaggcggatccgcgttattccaaagaataggcagaagaactatcatctctacgcaaagtggagaaaaagacattaagatcaggttgaaacaggaggtttaaaattggaacatcaatataagtgggaaagaacgggcagcagagatttttctaaagtctataggttaatgacggaggcatttcctccaagcgagataagaaatgagacaggccagagaagtctgctgggacatccaggatatcagctttacactgcaaaaaaggaagaggaggtgcacggtcttttggctgtgtgggtatttgagacctttgattttatcgaacattttgcggtggactcttctttgaggggaaacggcctgggaggcagactgttgaaagattatttacagtctgtggggaaaacggtatttcttgaagtagaagcgccggtaacagagcttgcaaagcggaggatcggattttatgaaaggtccgggttctatctcaacgattttgattatatacagccggatctgcagaagggccacgagcctctgctgctgaagaatatgacatatccctccaagtcttctccggaagattttgagtatatgaaacagcatatttttgatacggtatacaagtcatatctcaacacttgattttatcataactcataaaatcaagccttccgtgtgatactttataggagtggatttataatcttagaaatcacaggagggaatgaaactatggaaccaagaaaacagcgtatttttggctatgtcagggtgtctgccagagaccagaatattgatcggcagatggtcgtcatggaaaagctgaagatacccaaaaacaatctgttcattgataagctttctggcaaagactttaaccggcctaattacaagcggatggttaaaaggatgagagccggtgatgttctgtatatcaaatccattgaccgtctgggcagggattacacagagatcattgaacagtggaggattataactaaaaagaaaaaagcagatattgttgttgtggattttccgttactggacactagaaaaaaggataaagacctgaccggaacgtttatcgcggatctggtcctgcagattctttcttatgtggcccagacagaacgggaaaacatcaaacaaaggcaaagagaaggcattacggcggcaaaagcaaagggtgtgcgctttggacgtcctgccaaagatgtgccagaagatttcttagaaatttacgaaaaatggaaaaagaaaaaaatcagtcttcgagaggcggcaagaaggcttgaggtagatcataatacctttaaaaaatgggcatcccagattacggtctgacacctgtactagtatctgtgcctggtgaaaaacgtagacttttttccacggcgaataaattacataacaatctataaaaaagcccagaattccgaggaattccgcttttgcaacaaattatagcatatgtttggaaaaaagtctgctttaatcaccaggcgtactttttgtacaataatatatgtgagcagaggatgggaggatataaagtatggcagaacagcaactgttagattttttagcagaaaaaagtggatgtgcatatctttcggaactccgggatgggacaaaaaacagagagatcagccggattctggacaaagtagacgcagataagttcagtatgaaggactggaaggatgccatagagtattttacagatgcaaaattaaacatacaggatcaaaaaagtgcaaaagtatttctgaagaagcacttctcaggaaaatacagtaaataatttcacaattttatatttttgcataatataaaagaaaaaggaatcgtattagcatgagcttttgtgaaaatatatgggatcctgatcaggaagaaagcataaagatccagggcggcacgatagaacatatcatgcgggccgggactgtggattatgtgaaaacagtgtgctttcttccacaaagtaagaagaaacagtccgttgtcatattgatcgcagatgaccatacattaattcaatgcaatgacgggaaaagaatcacttccagggatctgagggaaggtatgagaattgacgcatggatctctgtgtcgatgacaagaagtatcccgcctcagaccagagcctataggattattgtaaagagcagcccctgtggaatagcggtcactgacggaagagtggctgcggttgatctacacaataattttctatatacaggagtaccaggaaagcctgagagtcagatccgttttgtggtcacagaagacactgcgctcctagaccgccggggcagcaggatccggctgcgggacttaaggcagggcgaccgggtgcgcgtagagcatgctgattttatgactgccagtatccctcctcagacaaacgcatttatgatccagagatattaaaaacttaccaaacagacagcagaccgctgtctgtttcctctttttctgggcaaaaaccagagatcagtgttataataaaaagactacggaaaggagaccggggtatgcggacaagaaaagaagtgattgaattttgcaagtccctgaagcaggtttacgaggactatccgtttcatgacagcaactggacgctgatgcggcatgaggcaaataaaaagacatttgcttttatctttgaacgggaagggcatatttgggtcaatataaagtgtgatccggagtggatcttggtatggagagagacttacgattctattgtgccggcctatcatatgaataaaaagtattggaattccatcatccttgacggttccgtaccggacgaagatataaaacggatgattggggagagctatgatttgatcagagcgaacataaggaggcagaaatgaatacaagagaagcgataaaccagagatgttctagaagaacctatcttccggaatacctaagggaaaaagacgccaagcccttgtttcagatgattcgggagatcaacacggaacagggacttcatttgcagctcatcacagatgagggcaacatatcaaaaataaaaatgagctatggcatgttcaaaaatgttcatggttttattgcgatggctgggaaaaaggatgatccggacctgaaggagaaactgggctattttggtgagaagctggtgctgctggctacggctgccggtcttgggacgtgctgggtcggaggtacatacaaaaaggagagctgtgtatgcagtctggagcgggatgagagcctggaggcggtcatcaccataggatatgtggaaacagataaaaggaccaaagaaaagatgatctcatcctttgttaagaaaaagggaaaaaaagcagaacagatgcttaaagcggatgagaaggtaccagactggatcatgaagggaatggaggctgtggtaaaggcgccttccgctatgaatagacagcccgtagaatttctttggcaggatgggaagctgagagcctgcgtggaagtaaataatggttttgaggagatcgatatgggtatcgccaagcttcattttgagctgggaacaggaaaagcaggttactgggaattaggaaacggagcggaattccgttgtatctaagtatttaaaacaggatggatgaaagatgagccagattaaattttcaacactatgttatatagaacaggatgatcaatatctgatgctgcaccggacagtgaaaaagcatgatgtgaacaaagacaagtggatcggtgtaggcggacattttgaatatggggagagccctgaggactgtctgttaagagaagtgagggaagaaacgggacttaagcttacctcctttcaattcagggggattcttacctttctttgcgatgactggcctatggaatatatcagtctgtttacggccgatggatttgaaggggatatgatctcttgcaatgaaggtattttagaatgggtggataagaaggagattatgaacctgaacttatgggaaggtgacaagatcttttttcatttgctggccgagaaggaacccttcttttccctgaagctcgtgtatgaaggggaccggctgaagcaggcatgtttaaacggcaaagatatggagctttttgacatcctcacctcagacggggaaagaaccggagtggtcaaggagaggtccattgtgcacaggagcggggatctgcatgggacttcccatatctggctggtgcgtcggaaaaaggacggccttgatgtcctgctccagaagcgcagcgcccaaaaagatgcatttccgggatactatgatgtgtcctctgccggtcatatggctgcgggagatgattatctggacactgcggtgcgggaactttacgaggagttgggagtgacggcagagcctgaagaacttaaactcataggaatgagggattccgtggttaaggatgtttttcatggaaggccatttcacaaccatgagctgagtgcaatttatgtatatgagacggaacttgcagaaggagaattccgtctgcagaaagaggaagtggagtctgtacgctggattgatttcctggattttcaggagcaggtgttgaaaaaagagatcaaacactgtattttcctggatgagatcaagctgctgggagaagccatgggctgtaaggtaattatttagaatagggaaaggagagaaactgacaacgggcagcttctctcctttttattattccttaatcagttttttaatctctgattccaaagtactttcctccatggcacctcttgccccggagacgatctctccgtcccggttgacaaaataagttgtgggcagggactcggcctgatagttataggcggcttcctgttcggtatcatagtaaacagggaaggtatatccctggtttttgataaaggaggaagcttttttcttggtttcccttgcgccgtctgtcatgtttaccataaaaaaatcaactttgtcagaatatttcttatacatggcctcaaagcccggcatctcttgtttgcacggaggacaccagctggcccagaagtttaagacaatgggtttcttgccagtcagagaaaaaaagctgacggattttcccttggcattttcggcagtgaaatctggcgctgtgacagcctcttgtttttcggtatcttcatcggaagaagtctcctcagttgatacatttgccgtatattttttgctgaggttctggtaaaggataaaagctccggctaaaagtaggataagtatgacgatgatcccgatcagttttgttctttgtttcatagattcctcctaaaatgtcaagattgataaaaagcggtccatcattccaaacatcatcatgaagcccacgataataagcagaataccggatatttttgtaataatgccgtagtgtgctttgatccacccgaaggcggtcatgagacgctcaatgataacggcgctgatgatgaacgggataccgaggcccatagagtagacgaacagcataaggatgcccttggccgcggaaccctgctgggatgccatcatcagggcggaacccaggaatgcacctacacacggtgtccatccgatggaaaacacaatgccgaataaaaacgatgaggcaagagaatgttttttcacttccatctggctgcgttttgtcttgtttaacaagcctatgttaaaaactccaataaaattcagcccaaaaacaatcacgaccagcccagtaacaatgtttacaatggttttatgcgaggtcagcagacttccaagagtgcctgcgaaggcacccagaaggatgaatacgagggtaaacccggctacaaatgttatggcattggaaagagccctgtgtctcggccggtctgtggcctcacctgcgaaatacgagatgtagatggggagcatcggcagaagacacggtgaaatgaaggttacgattccttctaaaaatgaaatcaaatactgcataaattctcctagatattaaataagtcgttgaatgcctcactcatggtcggatgcgtataaatggtatctctcagtacagtgtacgaaagatgggcatccatggcgagcttgatcaggttaatcatttcatgagattcggcgcagaaaagatgtgcgcccagaatctggttggttttggcatcgatcacagctttcagaagcccagttgtctgtccgagcacattggctttcgggattgcggctgcagggagttttgtaattttgatctcataaccctgctgtacagcttctgtctcactcaagcctactctggaaaatggtggatctaaaaagacgctgtacggcacggcaccccggttattaatggtgcgttctttgtcgccaaggatctgtgattttacgatacgaaaatcatccaatgatatataagtaaactgaagaccacccactacatctcccatggcatagatgcctggagctgttgtctgtaggaattcatctgttttaactgcatttcttggagtcagttcaacgcctgcggcgtccagattcaggccttttacattgggacggcggcctgtggcgattaaaacagcatccgctgagatttcctttggaccgtccggtgtttccacagatacaacggccttttggtcgctgtcgtgaactgaattgatcttagtagaaagcagaagttttacaccgcgctcttttaggcttgcagcgacagcgtctgcaatatcccggtcttctctcggaagaaacacaccgccgtcctggatgaccgtcacttcagaaccgaaattccggtaaatggatgcaaactccatgccaatatacccgcctccgatgatgaccagctgtcttggcagctcatccagggagagcatagtctcgctgatgtaaacatggctgctgtcagacaggccttcgatcggcggaataaagggacttgccccggtgttaataaagatctgttctgcctccagttctatcgtctcatcctgcaggactacttttacatggcggctgtccacaaaggatgcctcaccgttatagacatctgcattttcaaggtcagcgaccttatggtaatttttattcctgagtgcatccgtaagttttgttttctttgccacggcttctttataaagctttgccttttcttcaaaggaagaatcaagtttggcagaaaaagctgcacttgttacaaaagacttagaagggatacagcccacgttgatgcaggttcctccgtacattttgttatccttctcaatgagtgctgttttctttccgctggccgccaatgttcctgccaatgtctttccgccttttccaaaaccaatgatcactgcgtcatattttttcatactttattctcctttactgtggatgggccaaaaatcttctgatcaatggtctcgatggttacctgttttaaatagtccctgcacagatcatctagttttccgtaaatgtcatccatgatgcctgccatgccggaagctaccaggcagggcaggttgctgtcgccgctgcgccatgaggatgaaacaaactgtacatccagagcactgctgatgtctttcaaagttactttggatggatccaggtcaaataaatatcctcccaccacgccttctttggtagaaatgagtccgttctttttcagctttcccatgatcttgcgcactctggccggattcgtacagatattggccgccagcttgtcgctggatacgctctctcttttatggtttaaaaaaaccagtgcatggactgctattgtaaattcgctattcatatgttgatccccctctgtccgtcaaatatgtatttatttgagttacagtttatattgtaatcataacagttacagttaggggtgtcaatagaaattctaattttttcattaatgtgtcaggttcttgtccagaccgtgatatactatgcctaaaaggaggtggcttccatgattctcagtgtaagcaggcgtacagatatccctgcattttacggggagtggtttttaaaccggctgaaggaaggatttgtgcttgtgagaaatccagtaaacccaaaacaggtgagccggatcgcattgaacagggagaccgtggactgtattgttttttggactaagaatcctagaaattttatggagcacttgaaagaattaaaggattacccattttattttcagtttactctaaacggatacggcgtggaaatggaaccggggatcccggataagacgaaatggatgattcctttgtttcaagaactctcccggcagattggaaaagatcgaaacatttggcgctacgatccggtcttgattagtgagcagtattctttagaatggcatatccataaatttgaagagatggcggcggctctggaagggtatacggaccgggtcgtcataagttttcttgatctttaccggaagattcaaaagaagcttgcgcatatgggggtaagaactctaacggaagaagagattgtttctttcgctgaggcatcaggaaaggcggctcgaaaacacggtatggagatcgtcacctgcgcggaaaagtatacccaaaggtacaacctttcccgctttggaatccgtcccggttcctgtgtggactacaggcttgtggaaaaggtcataggaatggacatttctgtggataaagataaaaaccagagaccggagtgtggatgtgctgccagtattgatattggggcctatgacacctgccccaacggatgtgtctattgttatgccaacaaaagtgaaatggacgtaaagcagaaaatggataaatacagtccctgggcatctctgctttgcagtgagctggatgcatacgacagagtaaatgaccgaaagacggaaagctgtgtgcaagcccagttaagcttattttcatccaggcatttgtgatattgaaggcaagggtttctggcagggcagctgccatgttataataaaagaaacgaaaaggaacagaggtgaattcagatggatgcttccgagaggacaaaatataaactggcagaagccgtcaaagatctgatggcagagacagctgtggaccggatcacggtaaaacagattgtggagcggtgcggccttacgagacagacattttacaggaattttaaagacaaatatgatttggtgaactggtattttgacaagctggccattgtgtcgttcaagcagatgggagtgagcctgactctgaaggaagggctgatcaaaaagtttgagttcatcaagggagagcggcatttctttactgcggccttcaagtcagaggaccacaattcactgcttcagcacgactatgaatttatctatcggttttatacagacattataaaaaagaagatacaaaaggaaatctctccagacatccggtttcttcttgagatgtactgccgcggttccatttatatgacagtccagtgggtcacccagggaatgaaacggagcaccggggagatggcagaccttctgattcgagctctgccgccggagctagccaagctgttaaaggacctttaggttacacttttttgagactgtcacatttttgacactctgcggaatctgtcacttgtccggcagcctcgtggaagctaaactggcattaaagagacaaatgaccagtggtatgttaaggaggttgctatggcaaagcgtatcgtattaaatgaaacatcttatcatggaaagggcgcgatcaatgagattgcggcagaagtgggggccagagggttccagaaagcttttatctgttctgacccggaccttgtaaagttcggtgtgacaaagaaggtgactgatgtacttgatcaggcagggtacggctatgaggtctattccaatatcaagccgaatccaacgatcgaaaatgtacagaccggggttgaggcttttaaggcatccggagcagattatctgatcgccatcggcggtggttcatctatggatacctccaaggccattggaatcatcattgctaatccggagtttgaagatgtcagaagcctcgaaggtgtggctcctacaaagaatccttcggtgccgatcatcgctgtccccacgactgcgggaactgcagcagaggtcaccatcaactatgtgatcaccgacgtagaaaagaagagaaagttcgtctgcgtagatacacatgatattccggttatcgctgtgatcgatccggacatgatgtcctccatgccgaaggggctgacagcagccacaggaatggatgccctgactcatgccatagagggatacactacaaaagatgcctgggaaatgactgatatgttccacctaaaagcgattgagctgatcgcaaagcacctgagaggcgcagtggaaaatacagacgagggacgtgagggaatggcccttggacagtacgtggcaggtatgggattttccaacgtaggacttggcattgtacactcaatggcccattctcttggagcagtctatgacaccccccacggtgttgccaatgcgatccttctcccggctgtcatggaatacaatgcagacgccacgggagataaatatatgtacatcgccaaagccatgggagtggaaggcacagaagagatgaaccaggaagaatacagaaaagctgctgtagacgcagtgagacagctttctgtggacgttggaataccgcaggatctgaaagagattgtaaaggaagaggacatccagtttctctcagaatccgcggcggcagatgcatgtgcgccgggaaatccaaaagacgcaagcttagaagatattattggaatttataaatccctgttatagaaaagggatggaatatagcggtaacaaaaaatacgggacgtcatcatgggactgtcccgtatttttagtgtttgttaaagaaccgattgagaaattcctgctttttcaggtttagtgagcacaggtctacttctgtattcgtcaaaaaatcggtatagacaccatagactccaagcttcatatattccctggtttcatagacactgttgactgtgtgggtaaatgaataaatgccggctttatttaataattccatcctaaaatcattgacactgctggaaggaacggtgacggcttcaattccgttagctttacagaaccgtatcattttgctgaacgctacatccgtctgcttgtaagtggtatatacaacgtggcggaaggcatgaacctgttgaatggcatgatacatgggctgattgtagatctgtacgatgacccggtcaagaagatattccttcttcatatctctagcagtccgtacgataacggaaaagtcatcttttgcagcggcagcatcgctgtcttttgtatcggtcattatgtaagtgtcaggatattggtccatcagttcaaaaagttcttttaatgacactgaggtatattttccgtacagcttaatctttttaaattgagaataagatacaggactgccgcctttgcttttcggatcacttaaatctttcccccagtaatgtctggcgaccatgacatgatcagtggtctgcatcagatccacttcaaataccttaaagcccttctgataggagtttaaaaaagcatccttggaattggtatattcctttccatcaatctcgcccagtgcatgtgcgatggcacggtgctcataccattgtttggtgttctctgttttttcttcagatgtagtttctttgttggcctgttccgctttttctgctgctttctgtgtcttgtttttataatctttgtaaatgaagacacaggagaaaatgatgatccccaaaaccgcaagcatggacagacgaagggccatattttgtgctgccgcacgtaaatggcggggctgatgttttgcctttttaacggctcttttgacagattctgtttttagttttttacggcttagcatatcatttttccttcgtaaagagattgtaatgtatttgtaataattatgttaaataataatataacataaaagtaacagaaaagcatcagccctgtctataattattttatgctggaaaagtaatttctggcgattctctgacaaagttttaacattcaacggtggatttccgaaagaacttcatggtatacccaaaagggcatcccgtattccataccctgcgggtggacgcgctgcgcgcgataaggtatacccacagggcacaccgtattttataccctgcgggtggacgtgctacgcacgataaggtatagtaaagatactgatgctagttaacctttcaaacgattcataggaatcaaagtatccaaggaggaaatcactatggcaagtattatcgcaagcccaagccgttatatccagggaaaaggggagatcaagaacctgtgtacatatgcggaaaactacggaagcaacctttttgtactgacaagcccatccggaagaaaaagggtggaaccttccatcacagaaggacagaaagatgccaagatcacttatgaagcatttaacggagagtgctgcatgacagagatcaaccgtgtcatggatatgtgcaagaaggcaggaagcgaagtcatcgtgggaatcggcggcggaaagatccacgatactgcaaaggcagtgggttattacatgaagaagccagtgatcatcgtgccgaccattgcatctaccgacgctccgtgcagcgcactgtctgtgatctattctgacgaaggtgtatttgagaaatatctgttccttcctgcaagtccgaatatggtgctggtagacaccgacatcgtcagcaaagcaccggaacgcctgttggtagcaggaatgggagacgctttggcaacgtattttgaggcgagagcatgtaaacagtccgacgcatccaactgtgtaggaggaaagatcacacgtgcggcaatggctctggcagagctttgttatgaaaccctgatcgatgaggggattgacgcgaaacttgctgtccgtgagaatatctgtacaaaagcagtggaacatatcattgaggcaaacacctatctttccggtattggatttgagagcgggggcctggcaggggcacatgccatccacaacggtctgaccgcgatcccggaaacccatgagttataccatggagaaaaggtagccttcggaactctggtacagttggtcctggaaggggcagatcaggatgagattcaggaagtccttggtttctgtcaggaggcagaacttccgacgacccttgcagatctgggaatcaaagaagtaaaagaagatcagatcatggaagtggcacgccttgcatgttctccggatgacactctcggcaacatgccgtttgaggtgacaccggaggatgtatatgcagccatcattgcagcagacgcactgggaagatattattaaaaattctgtttattgcacagatgccttcctgtaaggaagcacgcggcacataacaggatcaatactgcggccatcagcagggcgcagtgaagaaagaaggcatccggcaggatggtgatgacagggtcaaaagcctcatcaaagatccaatagtcgttggaaaaggcaagctcgtgaaatgccacgaaagccctgtcccatccggccgcccagatcaggactccgaaaataagagggagcagggcggctataacggatgctttctttaaaaaacgaaaatcctttttttcccgcttccataaaagacctacaaggattatgataaaagaaaccaaacaggcgtattggaggccggaaaagatacgtttgacatcctgaaagtggatctttccttcctttgacataggaagagagggaaacttcaggtcttttttataaaatacagaattataatcaatcaaccggtcataattttctctgatccgttgttcagagaaccctgattcccgactgatgtgcagcagatttatgtcagaatagtaaagaggccggaagttcagcgtaaatataaccgaaaaagtgatcaggaagattgatagagaaaccgtaagaataaactgtttcatgatgcaccgcctttcatgaaacccattataacacaaggaagtactatgatagcaattatttcacctgcaaaaaatatgaaagtcagaaaagagaaacgaaggaatctgacagatcctgtcttttttgaaaagacaaagcagatttatgaagaattgaaaaaactaaagccctgggagatcgaatccttgatgaaggtaaatgaaaagatcgccctgcaggcttttttagatatacaggattttaaaactggggacggcagcgcagctctgatgacctacgacggcctggtattccagaatgtgggggcaggagattttaccggatgggatatgaaatatgcacagaagcatgtaagggtcttaagcgggatgtacggagtgctgaggccaacggatgccatccatccgtaccgtctggaaatgggatgtaaggtaaaggtagaagggaaaaatctgtaccagttctggggagatgagatctacaaggagctttacaggaaacaggatgtgattctcaatctggcttcagaagagtacgcaaaaactgtgagaaagcatttggaaggacctgatcattttgtagatgtagaattcctcaccatgagaggcggaaaacttcggaccatcgtggcgtgggccaagatggccagaggacagatggtccgccatattgtaaagaacaggattgaccggccggaagatatcaaagattttgactgggatggatatgaatatgaaccgtccctgtcttcggaatctaagtatgtatttatccggcgggatttaaagtgttaattgacgatcaggaatccaaggtttaacagagccgcaaacatacaccagacgagatacgggatcagaagaaaagcagcttttttgctgtatttccggtatacataaaacatcagtgcgttaagcaggttcaaggccaggatccacacaaaggagaaaaagaccagcccgtattcaaagaaaatgatcggccagaaaaacagaaagaaggatacggcaaggaacagcttgagcccctgctttttttcctgctccgttatgtctgacaccagcagggtataaaggcttaatcccagcagaatatcgagaatgagccatacgacagaaaagatccatggggccgggacgaagggaggtttattcagctgacggaagacctcatccatccggggtgtcaaaagtcttgatagcaggcttaccagaatcgggaatacaatgcagagttttaacagctgcttttttgttaattgtttcataacacacacctggggctttttacatagtctatgcagcaagggttgtatatcttgacaaaaaaagttattatagtgggaaaaggagagatgcaagatggaattaaagtgtccgaagatatataaagacggaaaatatttggcttacggcggcgaccaggaatggtttccaggcactttccagcgccgggcaggatgcggcagcgtcaccggcaccaatatagccgtctgtgagggactattctccgggaagatcaaggatcccgaatctatatcctacgaatcatatcttgaacttatggaaggcatgtacagttatatgacacccggctttatggggtatcctctgatcggaaagttcaaaaaggattttctgagctttgcttcccacaagggcagggagctttgcgccaaaagcatgtttttacccagagacagacaggactgccttaagtttatcaaagacgggctctatcacggccatcccgtcgcactgttgatctggaggcactccagaagggaattcagggaagataactggcactgggtgacaatcacagggtacgatgaggaacaggaaacattgatctggtccaactgtggggagagagaagagatccctgtaaaggttctgctggatgactcagccagatactatattggcctggtccggtttgaagaaaaaaactagggagttccgatttttacaattcattcaaaaataaagagagtaagctgttatccatcagcaagaaacagagacgagagatgggaacaaaggcgttcacgggagattatgatatcattaatccggcggacgccttttctttttgataagagtggtatgtatgtaaccttattgttctctgaaagtgatctccccgtcctttggatcttccacgattgcaagagattccagatgcacacccttatcgcggatgatcttaccgccgtcttggaagcctttttcaatgacgattccgcagcctaccaggttggctccggatccattgacaagatcaatcagtccattcagggcctgtccattggccaggaaatcatcaatgatcaaaatattgtcatccggggacaagaacttcttttcaacaaaaatatcaaattccatgccctttgtataagaaattaccttagaggtcagcagatctccatccaggttttttgacatagattttttggcaaataccaccgggatattgtcaaaatactgtgcggcgatggtggcgatgccgatgccggaagcctcgatggttaaaatccgtgtgatatttttaggaaataatctcctgaactcttttccaatttcctgcagcagcccgatgtccatctggtggtttaagaaactgtcaaccttgaggattcccccagcttttaacacgccatcatttaagatgcgttcctctaataatttcataaatttctccattccattcgacttttttatcattctagcaccaaaagctgtcaaaatcaatgagatcagggaagaattgagttgtaaaaaaaacatgtctaccttataatatataagaatataggttattttataaattcatatagaaatattaggaggaacgcccgtgaaccacgagaaatttcttgtccttgatttcgggggacagtataatcagttaattgcaaggagagtcagggaatgcagcgtatactgcgagatcaaaccttacacagcctctcttgaagaaataaaagaatataatccaaaaggaatcatttttaccggaggaccaaacagtgtttacggagaagattccgctacctatgaaaaagcgatttttgagctgggtatcccgatccttggtatctgctacggctcccagctgatggctcacgtgctgggaggaaaagttgagacagcgccggtcagcgaatacggccacacagaggtagatttagataacacatcaaaattatttgacggtgtaggtgaaaagacggtctgctggatgagccatacagactacattgcggaggcaccggaaggcttcaaggtcacggcattcaccccggtatgtcctgtagctgccatggaaaatgaagacaagaagttttatgcgacccagttccatccagaagttatgcacacggaacagggaaaagaaatgatctacaatttcttatataaggtatgtggctgcaaaggggattggaacatggattcttttgtagaagatatgatccagtccatccgcgaaaaagtcggagacggaaaggttctctgtgcattgtcaggcggtgtggattcgtcagtggcagcagtcatgcttgcaaaagcagttggaaaacagctgacctgcgtattcgttgatcatggtcttctccgcaaaaacgaaggagatgaggtagaagctgtcttcggcccggacggaccatacgacttaaactttatccgtgttaatgtccaggataggttctatgaaaagctggctggtgtggaagaaccagagcagaaacgtaagatcatcggagaagagtttatccgtgtttttgaagaagaagcaaagaaaatcggaactgtggacttcttagttcagggaaccatttatccggatgtggtagagagcggtgtaggcaaatctgccaccatcaaatcccatcataacgtgggaggacttcctgactatgtagattttaaggagatcattgaacctctccgggatctgttcaaggatgaggtgagacaggccggaagagaacttggcattcctgaataccttgtcatgagacagccattcccgggacctgggcttggtatccgtatcatcggagaagtgactgcggaaaaggttaaaattgtacaggaagcagatgcaatctacagagaagagattgcgaaggctggagtggataaaggcctgggacagtatttcgcagcactgacaaatatgagatcagtgggggttatgggagacggaagaacctatgactatgcgattgccttgagagcagtgaatacgtcagactttatgacagccgatgcggcacagcttccttgggaagtgctggctaaggtgacgacacggattgtgaatgaagtggatcatgttaaccgggtgatgtatgactgtacggggaaaccaccggctacgattgagtttgagtagtagacagggagccgggaagccgcttagaatagtgttccatccttcaggaggataattaaaagtaataagtttttctgccaccagccagtttactggttggtggtatttttgttgactttagtctattgagcaggcaacgaagtgtctgcgaaataaaaaaccacctgctatgcaggtgagtcgagggattgcttaagcttcaagcaaaactcctactatgataagatttaagaaggttcgccaaccaaaaaataagatcataggagggattcaattggacaataatagactatcacatacaacgtggaattgtaaatatcatgtagtctttgcaccaaagtattggagaaagataatctatggacagatcaaggaggatatggcaaacatactgagcatgttatgcaaacgaaaggagatcgagatcatagaagcggaatgatgcagggaccgtgtccatatgctgatcaagataccacccaaatacagtttgtcacagatcatgggatacctgaaagagaaaagttcgctcatgatacttgaccggcatacaaatctgaaatacaagtatgggaatcgacaattctggtgtagaggatattacgtagatacagcagggaaaaatgctaaaaagatagaggaatatataaagaagcagttgcaagaggacattgaatacgaccaaatgatcctgaagaatacatcgacctgtttacgggtgagccagtaaagtagaaggaagagaggcccgttaacgggcaaccggagaacgaagtgtggttggcggaccgggttggagcatctttagaagcaagacaagtaacgttaccttatagggaaaatactaccggctgagccggtagtattgattatgtagtctttcactctagtttatgaaacgctattggtctcatcacattcaggtttctctgttgccgttggtttttatagtaatgtatgtgcatcgtaatcccccgcatcatattgtctttgttagtaaaacagcgaccataatacatttctttttaaaaaattatcactaattctcgatcgctccgttgtctatacagtgcgtcacccccttgacatgttctgacttagtcttcacttgatggagcattgtatcttctggttctagtagatgcgcagtccctgcttgacgtttatgtaaatcctatgatataaactaagctcatctcaggtgcaattggtgcatcatctagattttcatagcagtgcacctgtttcgaatctcttttgttgggtgtcttacccaacggtagtacacggaacagctgattttaagaaatgtacacaacctttctatagggtatttctttgtctaggacaattttctaacagactaatagacacacagcttgcgtaccagagatagcaagtctctttttctagctctttaacttttttacaggtcattttccatttgcagatctatcttttgcagattcagctcttaggcttgcatgtgagcccgccctcccctttgttcttcaagcacggagcggccttttcttcatacttcatgacccagttatggaactgccgatagcttctaaagtgttttttaccacaatgtgcaaataatataaaagttaacctatttctaattgtttctaactgttctgatataagacatttcgcaaatgtttattagttttggtttattaacttttttgaatccatagcaaaaaataggttttacaagaaaaaaagttacatgaacattatattaaaaatatacttttatataaaacgcttttgatgcactagatacttaaacttaattaaaactatttgctactcaatacggaactaatatgcttgcgaagataaaatctaataattttacattattagagataaaattagtatagaaacattctgaattgaggtgtagaccatttgcttaatgaaaagtttattattaatcgaattaacggattatgtgagactcacaatatgagtatatatgcattatcaaaaaaatctggaattagtcaatcatcgttatcgaatttaatgaataggggaagtatgcctacatttaatacactaaataaaatttgtagtgcttttgatattacgttatcacagtttttcgccgaggaagggattagactaaatttaacgaatgaacaaaaaatggtgttagatgtatgggattcactatcagaaggtgaaaaagagaaagttactttatttgtaaaaggaatgacatcaatctaggaaataatctaagtaataagattattttctttttttggttagataaatatgtatactaataatggttacaatttacgcaggagaaaagttaatggacagttcaatatattggggagaattatagatgtgaagaagtcgagcaggaaaatttttaagttgaattaacgggtgtagaggggaaaaagttgtctactatacaatgaaatatgaaagaagtaggaaaaatagagaatgagcaataaaaattcataattttaagtgcattgaatgtggaattaattgtaaagaaaagtatggtgattggggacaggatatatatagattcatcatactagacctttcagctcattgatagaataattcatcgaaaaaaaggaaaagttttaccaattgatgagttaaagaacttggatttattgtatagtaataagcaataaactaactataaaggagataaaaaattaggtaattgttattcataattttacggaggatactataatgaaaaataatatggtgagcggtgtagcat

SEQ ID NO: 14 - DNA, 83307 bp, Anaerostipes rhamnosivorans
gtacaatacaaaagaaatcaatttaaaaatgttataaaaaggagaaaatttatgtttacaatctatgtttatgtccttgataccttggccgactgggaactgggacacgttatctcagaactgaattctggccggtttttcaaaaaagatgcaccattggtatcacttaaaacggtcagttattctgaggcgccaatccacacgatgggcgggcttacaatcgtgcccgattgtctcattgacgatatgattgtgagtaaaacaagtgtgttgctcttaccgggagcagatacatggaacgacccaaagcacgccgctatcatcaaaaaagctggtgagcttctctctttcggtgctttggtatgtgcaatctgcggggctaccgctgcattggctgacttcggtctgtttgaccaacgtccgcataccagcaacgggccgggatttcttgatatgatttgtcctggttataaagggcaagaattttatataaacaagccatccgtatcggacaacaaccttatcactgcaagctgtaccgggactttgctgtgggcaaaacaaatcattgagcatttaggtgtttttgcttcaaacacactggaatcatggtatgaatactttactaccggaaattctgaacaattctttgccctcatgcaaagtttaccgtccggagaagaaaaataatccttgtttccgttcggctcttagaatgcctcattccaatcatatagaaaatggacgtagtgtctgctagataaggattatggctgaacaacaggttgcatcctacaaaagtttttctccattatcggaaggaggcctttccagggctgactggagataatggagaaaaactcatattatataataatgtttcaatgctttttccaccccatctgcatccacatgttctgttatgtaatcggcacattcctttacttccctgtctgcattgcccattgcaactccgatccctgcatagcggagcatatccatatcattctcaccatctccaaacgccataatctcattttgctgaataccataatgctgcataatctggcggatacccgctactttccctccgctttttgaaataatatcgactgcatatggattccatctgctcattttacaatctgtaagccttgccacaatatcttcagctgttttctcatccgtaaacaggttacactgatataccggctcccctgaataaatgccaatgtcaggaacaggggtatgaatggctgcctgcgctgtccttaccttctcatctataaaactaatatacattttgtctttttcaaccagcatgacaggcacatgcccttcctcaaaaacatgaagtatctgttttacgtcggcactgctgatcggcacactatataataattcttcccggctgtccaggcaaagctgtccattcaatgtaatatatccatcaaactttatatcatctgccggcaggtctctgatctctgaaatatgcctgccggtggcggtaaatattttgactccattttttctcagcagatcaactgcgtttctggcacttttaggaatttcaccggttgtgccggagatcaaagttccgtctaagtcaaaaaacactgcctttatcatatgaaaatcctccttttattcctgacgcatttgtgtgcataatgcccgtagggcttttttgttccatagggaggttcggagaactttcctatggaacaaaaaaggcgcaagcaatattctcacttacgccattttctatttttattttatttctggacaatatttacgattcttcccggaacatagatttctttcacaatcgttccgtttaatttgtctcctaatgcttccttcgccttttcaatgacaacatcttttgcatcgtctgcgccgatcgtaacagtagccctcgcttttccgttgatctgcacagcaatctcgacctcatcatccttcagatatgcttcgtcgtattccggccatttctggtcaaatacactattctcatgaccaagctcactccaaagttcctgtgaaatatgaggcgcaaacggtgccagcagcacgataaaggtctccagtgttgttttgtccaccccgccttttttcgccagctcattgagcttgttgttgtattccatgaatccgctgacaactgtattcagactaaacttatttagcctgcttgtcacatcatatacaagacgattacgcacctttagaagctcttttgtctcttttacatccttatctttctgatccagtaccacgttgtagaaacggcttaagaaacggcgtacaccgtcaattcctctttcatcccactcggcatccagttccggcggtcctacgaataattcatacattctaagagagtcacatccgtagtctctcaccagatcatccggtgaaaccacatttccttttgacttactcatcttaattccgtttttacctgtgatcattccctggttaaacagcttatggaacggctcgtcaaaatctactacaccgatgtcatacaggaattttgtatagaatctggagtacagaagatgaagcaccgcatgctccacaccgccgatatacatatctaccggaaggtatttatccgctttttccttggaaacaagttgttcgtgattcttattgtcaatataacggaggaaataccatgaagatcctgcccactgaggcatggtattggtctctctttttgctggttttccgcagaccggacaggtagtgttcacccactcttcaatatctgcaagtggagattccccagttccagttggttcatatttttccacttccggaagtgtcagcggcagctgatcttcaggcaccggcacagcaccgcagtcagggcagtgtacaattggaatcggctctccccaataacgctggcggctgaatacccagtctctgagcttatagttggttgtctttttgcccacacccatcttttcaatgatctcaggggcttcttcctttaacacggaggattccattccattccattccccggaattgatcatcgttccggatgcatctgtgtatgcttccgtcatattttcaatttcttttccgtcttttgcgattacctgtacgatcggaatatcaaactttgtggcaaactcaaagtcacggtcatcatgggccggaacacacataatcgcgccggttccatagtctgccaatacatagtcagacagccagatcggcactttcttgccgttgatcgggttgactgcatagcttcccgtgaatacaccggtcttttccttatcctgaaggcggtcaacggaggactttaaggatgcctggaagatatagtcttccacagcttcttttgtctcttctgtggcaagacctgctgccagcttgtgctccggagccagaaccatgaaggttgccccgtggagggtatccggtcttgtcgtatagacagtgatcgtctcgccgcttccgtccaccttgaagtctacttctgcaccgtggctctttccgatccactctgcctgcatcttctttactttttccggccagtctaatttatccagatcacccaaaagacggtctgcatattctgtgatctttaacatccactgtcttaagttcttcttcgtcacatccgcaccgcagcgttcacacttgccgttgacaacttcctcgttggcaagacctgtcttgcaggaaggacaccagttgatcggcatttctttttcgtaggccagtccctttttgaacatctgtacaaagatccactgggtccatttgtagaactcaggatctgttgtattgacttccatatcccagtcatagacggcagcgatctcaccgatctggcgcttgatattgctgatattctctgctgtggattctttcggatgcacgcccatcttgatggcatagttttccgcaggcagtccaaaggcatcccaccccatcggatggatcacataatatccgttcagcattttataacggctccacacatcgctgatcacataacctctccagtgtcctacatgaagtccgcttcctgacggatatgggaacatatccaggcaatagtattttggctttttgccgtcatttacattgaccggttgttcttcccagtgtttcctccacttctgttcgattgccttatgattataaggtactgccataattttcatcctcctaaactgtatcttcgttctataatctgcacaaaacttcttgtacctatattatacttattaacttatttattttatcatataccggtttgatgtcaatatttctctcaatctaacgagaaaaagccgatcacttatccagtgatacggctttactcataatcttgtattaatttgttgatgctgtagttgcagctgtcaccgcggttgtcggtacagtcggatttgttgtctcgaccgtcacgtttacttttactgatttcgtaacagtctttccgctttttcctttataacttacggtaacatcatatgtgccttctgtactcttaactttgctaagatcaaccgctgccttttctgcgctgatcgttgctccgttatccataattgaaactgctttcaaaatttctttctttaatgaatccttcgctgcatcgaaagctccatctttcacagtcatggcaaatgtattcggttctacattaagttcagcatctttgtaattcttcactattacttttaccgtcttagatgcagacttgtaaggcttgttgctgttctttactgtgtacttaactgtataagttccagccttgttaaacacataggtcttagccttagagtaagacatagttgttgcctttttctctcccggctttgtgatggaaactgtcatggcagaagttctgctctttccgcttctcatcttcgccgtggtcttgaagaccgcgttctttgtgttgatcgtaactgtcttatttgccgccttggagattattggtgccagtgtatccactacttttactgtgatggtcttgctggtgctctttccaagggcagactttacagaatacttaatcttatatgtacctaaagatttggtgctgaatttagctttgtaatactttttcttcttggtattatactttgtgacggagtacttcaccttgctggtcagactcttcttggtcacattatccttggccgttacataggacttgatgctgtaggatttaccgtattccactgattttttcttcttagaagaaaccttaatggtcggttttacttttcggtaaggattgttcttatccgggtcagtaggatcccaatacatctttctggatgtggacaccttgatcccttttggttttcctaacggtcctggattcttgctgctgtagatcgtaacctttgttcccagcttacaattgtcatagatccatttggcatctgccacactcaaacggatacatccatgggatgcagtctgtccgagcttattgtactggacagtggactggcttgccttgctgtggctgtaataccatacagagtggaataaaattcctccgtgaatccttgtacaatactgtccgtagcttggacccatcagggtctgccagcggtatttggccggagtataaaacgtccctgacggagtattggatcctccgcaggataccaaaaatgccttgaccggtttgtatttgcctttggtaagcttatatacagtggctacattggcctgcttatttaccttgatccagtattttgtctgtgccgcactaacgctctttgcctttgccgggccgattcctgccccgatcaggaaagacagcatcagaagcacggccgtgaacttctttaacttatttgcttgctgcttcataattacccctttcgtcttttctcaataccctaccattatatccactcttatttatacttgtaaatagcaaaaagtatgttatgataaatttaagaaaattgtaaaatatcaaggaggacattatgatcgcatttaatcattttaactttaacgttttagacttggacaaaagccttgagttctataaaaacgcgctggaccttaccccagtacgcgaaaaaaccgcttctgacggcagctttaagctggtatttttaggggacaaaaccacaggtttctctttggaacttacctggctcaaggaccgcacagaaccttacgatctgggcgaagttgagtttcatctggcactggagaccgatgatatggaagcacttcacaagcgtcacgaggatatgggctgtatctgctatgagaatcctgacatgggaatttactttatcagcgatcctgacggatactggatcgagatcattccgagcaaaaactaaagaccgtacttatgaattcacaaagggaacccttctttatacggaaggactcccttttatttttatcagttatacgtttgtttttaacagtttctaagaaatacctcgtagcctttttccacttcgtacagatcggatttgctggtaatctcccacggcgcgtgcatgttcagcactgcaacgccgcagtcgatgacatccatagcataacccgccggaatataagcgatggtgcctccgcccccttcatccactttcccaagctcggcagtctggaatgccacctcattttcatcaaacattctgcgcagttttgccacaaattccggattggcatcattagagcctgacttgccacgggagccggtatatttatttaatacaagtccttttccgaagtacgctgcgttcttcttttccataacttgaggataatttgggtcaaaggcagcgctgacatccgaggaaagcatgtgggaattctgaagaatcctgcgcagttttaattcgctgtattctccggtcaaggcaacaatctcagccaaagtattttcaaagaatctggaatgcatcccggttgccccgacgcttccgatctcctctttgtccacgagaatacagcaggttgtcctctcggcatcctctacgtttagcatggctgccagagaagtgtaagcgcataccctgtcatcctgtccgtaagacatgatcatgctgcggtccaatccaaaatctctcgcaggtcctgctggtacaacttcgatttctgccgacaagaaatcctcttcctcaattccatattcttcttgaaagatctgaatcatctctttctttacggcatccttttcttcatccttggcaggacggcttccgatcaggacatttaagtcttctccttcgatgacaaccttggcttttttctccagctgctggccggataaatggatcaaaaggtccgttactccgacaaccggatccgtgtccttctctccaatgttgatctccactgtggtcccatcctttttgatcacaacgccgtgaagagccaggggaagtgtcacccactggtattttttcactccgccgtaataatgggtatctaaaagtgccatttctgtatcttcatacaaaggattctgttttaaatccattctaggggagtcaatgtgagcgcctagaatattcagaccctcttccatggacttggagccgatctggaacagaacaatggtcttgtccatccaagtgcggtataccttatctcccggcttcagctgtctctcctccgcgataaaatgctccagatccttgtatcctgccctctgcgcaagctttacagattcctttacgcattctctttcagttttaccattcgtcaaatactctttataatctgaggccagaacttccaagttttttttgtcttcttcgttgtaagaaagccacgtattttttcgttccatatacaagatcctttctgtcaaagtggtttttatttgatagtattaccccattgttcttctttaaatccaaccagtacgaaatcatccccgatcaccaatggacgttttaccagcatcccgtccgtagacagcagctcgatctgttcctcttcgctcatctgcggcagtttatccttaagccccaggtcccggtatttcattccgcttgtattaaaaaagcgtttgaccggaaatccgctcttatcgatccattcctttaattcctccgcttttgggttgttttccacgatgtggcggtcctcataagaaacctgatgctcatccagccatttcttggcttttctgcaggttgtacattttgggtactctataaataacatactcgattctcctttcgtttcttttattctccggttatcttaccatagattagcttagaaaaaaaggcagttgatccagattctcaacaacctttttctttcccttattctttacaggcagaactcatccagagtctttccgagataccaccaataatcctttttatcaatcgattcttttgtgtaaaccggctcctcgcgaatcaccttgccgttcagcgtataagcgatctttcccacctgttcttttcttttcaccggagcgtcaagacttttgggaatctggcatttgatatccactgtctccccctttttcagcaggactgtcataccgctgcctttggcctctataggcactttgctgtccagccctccgtttacatacagatcctccaatttactataatccgggatgactttgtggtaagaataatttttagccccgtagtccaccagtgtcctgacatcagaccatttataagtcttatggggaggccatccgcaggccagcactaccgcgatcatcgtcattccatttttctttactgctcccacatagcaatagcctgccttggaagtaaatcccgtctttccggaaacagcgccatccatcatagacagcaacgcgttgtgattattacacgtaaaggtccgtttcccagaaacatcgtgaaaagaatgacttttggctcttgtgatatccagaaaatccttatttttaatacactgtttcatgatcattgccagatcatatgctgtcgttgaatgaatcccatttttatccgtgcggtccaggccgttgggtgttacaaaatgagttgacttggcaccgtaagcttttgcctccgcattgagcttttttgcaaagttttctgtcgatcccgctgcgtgttccgctaaaatcaccgcacagtcattgtaagattccagcatcaggccatagagaaggtcccttactttgtacttttccccggccctaacccccagatgcacctgaggctgggcggcggcattttttgatacagtcgcctcttcttccagattgcaatgcttgataatatacagacaggttaaaatctttgtggtgctggcattgggcatcttttctttgcctgatttctcaaacataactcgtccacttccggcatccatcaaaatagctgcctttgcataaagcttcagcgtatcatcatctgcctggactgtgtgaaatccaagctggaaacagaaaaacagagaccatataacacagaatatcttcttcattcttttcactctccttcaagccaaatatacaattaatactatatgataaagaagatgaaaatataacataatctcacggtttcctgaagactacacaatttttcccattggcttttcccttgtacatctgtctgtcagccaaggtgacagtttcctccggagaagagcctttctccaccggacttacgccgaatgtcatagtgatctttaagttgatatcctcatggcaaaaagaatgttccgccacggcatcacaaagctgctgaattttttgaatggcttcctccatggatacattttgaaacagatagacaaattcttctccgccccaccggcatacatccacctctctgccgagaaaagagcgcaccaattccgcagcctcactgagcactttgtcaccgcaggaatgtccccatgtatcgttgaccaccttaaaatcgtcaatatcactcagtgccagtactgtggatgtgtcactgtactttttcatccgttccagaaaagcatagcggctcagaaggcctgtgagctgatcatagtttgccagagtggtcaggcttcggttttcatcctgaagttcctgacggctgacagccgcggaaagactggaggaaacagccgcatataatatgatcgtaaaacaagcgcagatgctgtagagagagatccagaccgcctccgtccctttcacctcaaaaaagcctgggttcacaaatccaatataaagcttcaatgccaaaaatacgaagatctcgaatgccgcaaatacatacggaactcctttatgctgaaacgggcaaaaatacgtcagagatgtcatggcaattaaatagacccagatccctatatcccatccagcagccacggtcgaaacaatggcaaatacacagacttccagatggatcgcggtcactgcagtacggtaataacctttctctgagattatccccatggtacagtaaaaacagacactggccacattataagctgccagtacccaaatccccgttgctataaatataaaaacataagaaagatgtgccaggagtgccagcaaaatgatctggcggtaaatacgtctgacgtatctgtcctcagctcgatcagattctgtcatagccaacccctccgctgcccttccaatacttctcctcaaactgctgcgccggaatcggccttgatatatagaatccctgaatgctgtcagcctccagagaacaaacggccttaagctcatcaatatattccacaccttccacgcagactgagatcccgacactatggcaaagctttataactgctccgataaaagagtggttaaaaacatgctcagaatcattgatataggatataaaaaccctgtcaatcttcacaatatccgcaggagtctgggacagcatgcccagagatgaatatccggtaccaaagtcgtccatggcaatccggatatgcagatcccgcagtctctggaacgtatcctgcagtgcaggcatatccgtgacaaaatagctttcggtcagctccagcacaatgtgccttgcatctaaacgataggtatccaggagctgttctacgaaaggaacaaagtctttatctataaactgtaggtaggacacgttgatatgcatgataaatcccggacaatttgaaagccaccggctgcatgtacagaatgcctgatcaaggatccactttcctgcctgtatgataagcccgctgttttcaagcagaggaataaactgagctggtcctatgggacctgcgctagggcagttccacctcaaaagagcctctgccccagtcagcttcagcccgtttgaactgacaagcggctgatataccaaaacaaaatctttcattccgtccatgacacagcgctgcaacaggcggttcagttccatcatacgaagttcagactgcaaaagatcagggaaaaaaacagtgcatgtgttcttccccttctttttggaagcatccagggcactggccgcaaacttcagcagatctaaatagttgtccgcatcttccccgatcacggaaatcccgccagagatggaacaaaaatatgagatgccgtcgatctcatgttccgcattggcatatagatggatggactcataaagttcctctatatcgtccagggagatatccgggcatacgatggcaaattcatcaccgtcaaaccggaagatctctgatttcggcggcagcatctgctggatattctgtgccatctgcctcagcaccagatctccgaaaatgtggtcctttagattattgatctgcttaaaatcatccagtccaagaagaagcagtcctccccctctgttcccctgctccagcagatcttccactcgttctttgcatttatcctctgtaaataagcccgtagtccggtcaatctttcctttgcttccgattggtgtgactacccctgcaaaggatactgggttatcatgttcgtctctctttaacagtccccggcatactacccagacatattcattatttctgtttcggacttgatactctacgttatgcttgtccgtaaggccgctgagcatgtcatccacagaatcaaaataacgcttcttatccttatcgtgaattaattctccccatagaggaacaagaccgggtacaagaatccccggcagctcaaaatcctgcagcatgttctcagagataagcgcctcatccgtcctcatatctatgatatatatgtaatcctctgtgctgttcactatggcttcataaaaagcctggccgtcaatctggaatgaagcagcttcttccggatatctatccataatccatcctcctcgtaagaaaaaccctctgcagaaatccctggtcctgaataaaataattcttaatgataaattaccatattttagtgagaagggcaagcagagcgggcccctgacactctcaaagtttcaggatcaatacagggagcggcggatgatttgctttattgtagaagtcctgtttcaccacaagataattactgtcatccaactgttttaaaaccgcaagcacgctgtccttctcttcaaatcctgtatcccctccactgtaaatgcagatgctcatgacacctcctgtcttcagcaggtcaagtcctgcaaagatcgcttttacggtactgtccggcctggtggcaatgctgtggtcccctccaggcaagtatcccagattaaacaggattgcctgaaccgttcccttttgggcatactgatccatgttttcatggctttccctgaccagcagcggatcataaccttttaagttaagtcgtttctttgccgctgccagggcttcctcctgtatatcaaaaccgatcacccggctagttaagccgcagagatactccgtatcccgccctgttcctacagttgcgtcaatgcagaggtctccctctttaataaaacgctttagctcctgctgtacccactgtgtgatactgaccctcatttcccttacctcccgtttctatcacaataaaatggataatctcccgtaagtcttctttattccatagggaggttcgaagaactttcctatggaataaaaaacacctccaaagcagaatggtcacttgccatgtctgcttcggaggtatcataccattttaatctctgttcctgccaggcttagtaatagcaggcaaccggtgttcccgcctcaatcatattatatagagttgctgccgcatagggtggcatatttacacatccgtgggatcctccagaaatatactcacttcctccaaaggaagatctccagcttgcatcatgaagtccaacattcccgttaaacggcatccagtatgaaactggggaagcatacccctggccgctcaatgtagcatggcgctgcttatataaaacaaacgctacacattccggtgtttttcttcctgcctccatctttccagtcactacagaagatgaaaatacaatctttttgtttttaatatagaaaacttcctgctgtcccatatccacttcgatataggtgtctccgatgtctccctgataaccgtcatatacctttgccttctggcgccagtacggctccctggtctccaccgttccttctttcagcatcttcttcacagcggcttcttccttgtcacggctcattctccagccgtaaggtccgccgaaaatcttcttggtccgtccatcatgggtcttaaaggtatgcatcgttcccatagtgttatatttgtacgcaaacttcataacccaggtttccatctttttcatatcaatggtaaagtccgtgtggtttttgattttaaaccacttgtggtagacctctttgtcaaggacaaccttctgctttccaaacttatatgtaatgcttccttttagagaatcgttcatcttatcattcagagttatgatctctttgctcttgcttgtgtatttcggagcctcataagccccctccttgtccagatctacaacagaaacaccgccttctacggcactctgtatcaacttctcggtctgatccttctttaagactgtaccgatttcttccttttggatctgaaaagctccgtctttgtagacaggcttggcattgcggattttaatgatgtttttctttttgaagcaatcaaggttcttgaatgccttttgaaatgctgccttgtcatatgcaaacatatcaatatctttgtacttctctgcgccgaagatccctttgatccataacagggaactctgtccgtctttgatctttttaatctcatctttgccggtaaaggaaaccttgagcacgctgctctttaaaatctcctgtttccctttgcgctcttttactgtcagcgaataaccgtctgctttcttcttaaaaatgtctgttacttcatcaactgtcttattggaaacatcgacaccgttgatctttgtcccatatgtaaactttttactgaaatataccgcgatacagcagtaaatcactacaagaatcccaactgcaataagtgtgtagtgtttccaagtgaattttttatgttccataaatgtcctcctaaacttagtatctaattatagtacaaaacctgtaaaaagaccacctatttttaaaattattttacttgtgtttcttttatgccaatggtacaatagaacagtatgttaataaattaacagataaagacaggaggattacttatgtcattcaaggaagaataccaaaagaaacttaaaactgctgacgaggcagtaaaagctgtaaaatccggtgactggctggaatacggctggtgtgttaccactccggcagctttggacaaagctctggcaaaaagaatgcctgagctggaaaacattaatatccgcggcggaattgtcatgtggccattggagatcacgaagattgattctccggcagaccattttacatggaattcctggcacatgggcggacttgagagaaaatggatcaacgaaggcttttcttactacgcaccgatccgctactccgaacttccgggatattaccgcaattacatcgaccatgtagacgttgccatgatgcaggtggctcctatggatgaacacggtttctttaactttggaccgagtgcatcccacttatctgcaatgcttgaaaaagctgactgtgttatcgtagaagtcaatgaaaatatgcctcgctgcctgggcgggtttgaagaaggggtacatatttccaaagtagatatgatcgttgagggagagaatcctgccattgcagaacttggcggaggaggacctgctacagatgtggataaggctgtcgcaaaacttatcgtagaccagatccctgacggggcatgtctccagcttggtatcggtggaatgccgaatgcagtcggttccatgatcgcagagtccgacttaaaagatctcggtgtccatacagaaatgtatgttgatgcgtttgttgatattgctaaagccggaaagatcactggtgccaaaaagaatattgaccgctaccgccagacctacgcatttgcggcaggaaccaaaaagttatatgactacttgaatgacaatccagaatgtatgagtgctcctgttaactatacaaacgatatagcgagagtttcttctattgataactttatttccatcaacaatgcggtagatgtagacttatacggacagatcagtgctgaatcttcagggatcaaacagatcagcggtgcaggcggacagttagacttcgttatgggagcttacttatccaacggaggaaagagtttcgtatgcctttcttccaccttcacagacaaagccggagaaatgcactcccgtattcttcctactttgcataacggctctatcgtaactgacacccgtgccaacgcccattacatcgtaacggaatatggaatggccaacatgaagggactctctgcatggcagcgtgcggaagctctgattaacattgcccatccagacttcagagatcagctgatcaaagatgctgaaaaagcaaaaatctggagaaaatcgaacaaatagatgcttcttgatatagattctcatttgtttcattttcgatgaatattttatcctcctttgttaaactatacctacaaggtataaaaataaaggaggatttttttatgataaataatagaaaagctgccatcattggctgtggttttgtaggtgcttccactgctttcagcctgatgcaccaaggactgtttacggaacttgtactgatcgatgtaaatgctgacaaagcaaagggtgaggccatggacttaagccacggacgtccttatgtggatacatcaaaagtttacgcgggcacatacgatgatatcgcggactgtgcactgatcatcataacggccggtgccaaccagaaaccggatgagacccgtctcgacctggtccataaaaatgttggcatttttaaatccatcattccggagatcacaaagcggaatacagaagggattcttctcgtggtggcaaatccggtggatattcttacttacgtgacattaaagctctccggttttcctaaaaacagagtgttcggttccggtacagtgctggattctgcccggttccagtatctgctcagtgaacatctggaagtggacagcggaagtatacaggcttttattattggtgaacacggcgacagcgaactggctgtttggagcggtgtcaatgtatccggcgttgccatcaatgatttctgtgagctgcgcggacattttgaccacgagacatccatgcgcaggattcttgacgatgtgagaaacagtgcctacgagatcattgaaaagaaaggtgccacctactacggtgttgctatagccgtaagccatatcgcagagagcattatccgaaacaaaaactcgcttcttccggtctccagcctcttggaaggtgagtatggcctttctgatctctgcctgagtgtaccgacgattgtcaataaaaacggggcggagcaggtcattgagatcgaactgaatgaggaagaaactgacctgctgaatcaatctgcaagccagctgaaggaaatacttgtgtccctggatctttagtatttaccggccgctcttttgtgtatctcaaaaagtacagcagaaaatatttacatgttttatcatctgtgctattgtaggattcaaacaaaaatacgtgttatttttagaggatttatacaaaaagtgaggtcatgttatgaaaaaatatctcttatccggctgtcttgccctttttcttgccgcttctctgagcggctgcggtacagcccatataaaaccacagggattgagcgacagccagtaccgtttaggactcagagccattgagacaactgacaaatatttaggagctgatctttcaaaagatttggcagacagtcagcttaagcatattgaaaaatcatttgaacagttccataaaagcaataaaaaaacggttaccgctgtagattcccagattgaacggctgggagactgcttatcgacagaaaaggtttctgataaaacagtcactaaggtaagaaatcagttggcagaaactttaaatcagaatcctgttaatctaaaatagttttaagaacgaactccggccattttgttggccggagttttttcacaatttaatttatacagggtatgaaatatcaattccaacccatgtaatatcacccgacagcacacttccatcctgaagctttctgacccattccaatgttatattaccagaactcaaaacaaggtatcggctcatcgtgccgcctgtcgcagcattggtgaaataatagtacgatccactcgtaatcctaaaaccagcaggtaacgtagtaattactttttgtgaatcacctgattttccagtcactttaacaacaccactaacatatacaataccattttttcttctatattttagcggttgaactgaaccagaaagattatagacacctgatgccaatggtgcgtttatccatcctgtatctgcaagctgatttttaatactctggatatttgtatttgctgtttttaagtcattgacggtagaattcagattaatgtttgttttctctaaattagtattcaatacgataatactgtcatcaagcttttgagtagatttttttacattgtcaatttcctccgattgaatctggtattcttcaatcctgaccaaacctttagaatttaccatcacctcaaatggcgccgtatttgaggtctgaaaataaaagtcccatgtgatagagaagcccggactttccgatactgcaggtatatccttccccttcgtggcctgggcaatgcaatataagatttctccttcatctggatcctctgcataaaatccaatctgccacagttcatatccctcttttaaatccttattctccagcagcaccggaataattgtttgatctccctcagttcttgcaggctgaagagtgatatctcccctttcttccgttacatctgtctgctgtctcagatttacagccggtacactacccgccccagttttggcacctgtaatcttcaatgtctgcccttgcataagctttgcctgtaatgcggctcccttatctgttaaaaccgtgtctttccaaatgttcataatatttacctcccaatgattgatatttctcatcaagaactatatcatgatcttttggggcagtgtgggcaatgtcagctttgtatccggccttcgcctgttcttttactgaaccaacgagtgatattttaaaaaatgaaataaataagttcggtttttcagaactaaacataaaatattatttaaaataatcaggccagaacatctgtccgaccttattaccagtataaaacagataatagatgaataaattcctattttctaaaaaacttgtctccattctgaccagccagctccacccgcattatacgttctagcaaacatttttgacccatctactacaaatgctatttgaataatccccccaaatccactattcataacaagtaaagtcagccactcgtaaatcggcagacattcagtggtaacatcaggatttattgtaaaacacccattctctataacattgttaagatttttaaccccagtagactttttacttaaatttgtttctttagtacttatatctacgtttatagcatttaaatccgcatttagttctttaagtcttccatcaagttcatgaacatcccctttcagaccatgaatctccccctcatgaacctgatactgctcaatactcaccagcccttttgagtttaaattcacctcaatcggcaccgtatttgaggtcttaaagtaaaaatcccatgtgattgaaaatcccggcccttctgccgcagattcactaacggtactttggcacctcccgtcatgacttgtgtgatatgtaacgtctgtccctctatcaattttgcctgcagagctgcccctttgtctgtcaaaactgtactctcccaaatattcatgatttctacctcctgatacatgcggttgtttacagaagccgttcaaaatcttatgagttatttaccactatttccgtcacgcttttgaaatgcgctcctccaatagtggtaaataactatcgtaggtggcgccttttgtcttgcaacagccatctccagcagacattacgtccattttcaccagttcggaggccttgcattcgaagggacgttagtttttcttcttgaagtaaagactcgtaggcggtgcgcattgcgcagtgaggctgtctgagcgtcagcgagttccgaacgggccgccggagaggctttgctgaaagttagaaaatcttacgtccctgagacagcaagccggagaactggtgacaatgtcatacccacaaggtttaaaatacgatgtaccccttgggtatggcaaactacactatctttaaaatttcttagatcatgatctctattaggaatatatcatgatacccacgggcaatgtgggcaagttctatttggggcagtctttttcacgatatatcttcaaggttattgatataaaatagaaaagcagccttctggctgctttaaaactcttggtagaatgtacaatgattccatgtatccaacttgcgcacatgagtacagatcccctcatcgtttctcaaaatgctggtaatccttatatgtgatccagtcacctccccactgaaatccatgttttctgaacagccggtatacacggtcgtttctgtggatcatgttatatttatattttcctttgcatttcttcacgtctctctgggcataaactttcccattttccggtgtaatggaatttctctttacaaacggattgacccttggattgatgtcaatggcctttccataggcatgattggacagatggctggtccccgccacgatccgatagttaaatgcagaagtattgttggcctccatagattttgtgtcatccgcatcataatcatcaatcagctgaatgctttcgatgggatactgcatcgtaaaaagctcctggaaaatctctaccgtatctttggcaatggacttgtgcaccagcagttgtccgtccttaattttcccatcatatccatgatattttaccttcacataccgaagatcctgaaaagaaatatcaggattcggacgatacgaaatcccattgaccttttctctcacagatttaggtaccttcccataagaaaaaccgctgatacttttattagaaaaagctggctgggccggatccttatgatacatctcctgaatggatggccccaatccgatcaatgctgccagcatcatgcttacgatatgttttcccatactgccgcctcctgtctatttgtcagtcatccaactgaaataagctgtcgatcagaagccagttggccctgaacggcctcattaaattccagtatccgaccccggaaaacccatactccttggctgtccggagctttacgtcgatgctccgcacatcctcaaaccaaacctcgtgttctacaccgtctaaagtataattaaaaaagggactcattgcagttttatcaaactggatctgtgccccattctggtccgcgatctccaccgcttccacatttcctatgctggttgctcttgtcactcctctttcataaggcaaaggccagtcataaccatagttgggaatgcccatatagattttttccgccgggatctgtgttactgcataatccagcacctggcggaccttgttgatgggggcgacggccatgggcggcccgtaggtatatccccactcgtacgtcatcagaaacaccgtatttgcattttctcccaaaagcgcatagtccatcccctcatataacagcccttcctgttcggacgatattttaggcgccagagctacagataccttatacccaagggcattcatgcgttccctcagattccccacaaatgccgcatatccttccctgtcttccggaaggatatattcaaagtccacatccactcctgcgtatcccttctgctggacagtctgaaccagattctcaatcagggtctgctgcatggagaggtcctcagagaccgtcttcaccagctgattgttaaaagatcccgtctctgcaaacggggtcagaaccagcatgggatccacgccaaactccagagcctgatcaatcaaaggtatttccatagccggagggatcaaagtccctgaggtagtgaatccataggaaaagatcaaaagctcatctaaatacaaaagtgcttcccgcagggtttccgtgctgatatatggatacgcatatcccgtcacattcaggctcccaagcttctcctgggcatactcaaccgtcagcacatcccccggcatcaggttcacctcatttaacagataaggattctttcttacaagagactggaccgaagtttcatattccctggcgatagacgtaagagtatctcctgcctccaccgtatgcacgacggaaggctccaggatcagcagagcctgaccggtcacaaccctccctgcgtaaatctggttatcatatatcaaacggctcctggaaattccaaactgtgaggaaatagaatcaatcgtatccccttcttttaccacataaatcatgtgtctatccttttgcttctttttcctaaatatatgcttgggataaaacaggaattcctctgcctgctattttaatgccgcttcatagactttctgaatgttttctttggtgggaaccccctcgtgcagcttttcatctcctacataataggtcggtacataccagtagtccagagagtccgccagatcagtgtcctcatcttcatccaccatctttactggaatgtccctgtattccgggtgctcctgtttcagctcatccatcatgtccagtgcctgatggcagtatgggcagctttccaatttcatcatcagtatctctttcataacaaacttcctcctttttgtcattctaacataagcctgccttatgcatatactttctatacacataaaacaggcttttatcttcttatttttgtttcctgcggtttaaaagaatcctacccgcgcacttatcagagtcttccctccaccgacataccttgcagttcaggcagcgcccggtatcttttccttcccgggcgtcattggcccagttgtaattgaccaggactccgcggccgatgtctgccatgtccacccctgtacggtttaagatatcctcggccatctgggcattcgttatgctgttgaccgcaaatacagggactgaaacatgctttttgatctctcctgccgcataaatgacatccttatatggaaaatctttcggtgcctccggctcatcctcaccagaaaaaccataagagatatccaggaagtcaatgccgtgctgctccaggatctgtgcatggcggatgccgtcagaaagctttggctcaaacgctcccagacggatccccacaataaaatccttcggggtctgctttctgatctcctctaagatctccagggcaaacttctccggatgcaaaccgtattcgtctgtccttaagtttaccctggaattgaaaaactcacacatcagatagctgtggcagccgtgaagctccactccgtcatagcccgcttcacaggcccgcacagccgcctgaacaaattctgcctgtacctttttaatgtcctcaggtgtcatttcatgtccaatcctctttgccccattcgtatgaaactcgtaatcactgggacataaaagatgctcctggcatccgttaactcccgcatggtggatctgcaaaaagataggacagccttccctatgtactgcgtccacgattcttttcaggccagcaatctgcccgtcctcccagatgcccagctgatctctgctgagtttgccgtccgtgtccacacaggtggcttcctggatgatcaggccaaaaccgccctttgcaatggccctgtaatgttccacattctttggcaccacataaccgtcatctttcacccagttataacaaaccatgggcggtacacaaatcctgtttttgattttaaggcccttgatgctaaaaggctgaaacagtttttccatacttgctcccctaccttcctttatgcttctgttttttcttctgctgctttttaagaaactgcatgtgctcccgttcctcccgcatttctttcctgtggacctttctctctgtcttcacagcctctctctgggctgcaagtgcctgctgggattttgtccccacaccaggctccttttgtcttcttaagcttctctgcatccttttaggattcagttttttccctgctgtctccaaaatcgttacaggcgggctgaatctaaggtcctgatgatgccttagaagaaacgagagtacctcatagtccttcggctcagggccaaaggtaatctttgacacagagagctggccgttttcctctctttccaacagtccgatccagaaaggatcctcaaaaaatacggtggtttttaacgtcactttgttcatttcttattcctccttaaataaaagatatgaacaaagaatggacaaccaaggaggcaggttactgacaggatacatctcccgcgcccggactaccaaccggaccgtgtttttatcttcgcttcttaaatactagcttttttctcagaacccgtcaagttattcatgcatgcagcatagcatagatatacatttgcataatacaaaactgcttcatctataaggaggttttatcaatgtgtaccgcaatgactgcacagacgccaaaggggaacttttattttgggcgcactatggatttttcctatcccctggatccggaactctatgttatcccaagaggatataaatggagcaacaggttaaagacccatttgatccaaaaccgatacagtgtcatgggcatcggccaggatatctctcctgtcactctcgcagacggcgtaaatgaaatgggttttgccgccgctgttttatactttcctggctatgcccagtatgatcccgcagaaacccagcggtcctccaaaatttccatagccgcactggagcttgtaaatttccttctgggccagtgtgcgtcggtaaaggaggcagtttccaccctttccatgctccgcattgtaggaatcaaagatcctgtcaccgattctgtggctcccctccactggatcctgacagacagaagcggacagtgcagggtcattgaaaaaatggcggacggactgcacatcatggagaatcccatcggcgtgttgtccaacagccctgatttccaatggcacatgacaaacctccgaaactacatgaacgttacctcctcccagcttcaagaaaacagctggaatacagtaacgctcagccccttcggacagggcacaggaacctttggtctccccggagattacactccgccggccagatttgtaaaaaccgcatatttaaaaacccacactcctcttccagaagcacaagatcaggcagtctccgcctgctttcatattttagaaggagtaagcatcccaaagggctctgtcatgacaaaccgtgaaaccgcagattatacacagtacacgacattcattgacctgtcctcctccacatattttttcaggacctatgacaacagccggatcacagctgccaggtttcctgatacgaaaaaacggggtgctgatatcttctcttgcggaaaattaaacaaacctgcctcttttgaacaatggaactagttgacgccggatcatagacttccagcagaacaaagtaggcaaaccacttcatctccccaccccctcactctttgaggggcttgtgcactttgcgcgccaaatgcgatttggcgtagtcaaatgatttccttacgcatttgtgtgcatactgcccgcaggtcttgtttattccatagggaggttttcagaactttcctatggaataaaaaaagactgaagtcatccagtctttttgcacatttatcttctctcatgctcaaggagaaaccgctccatatcatcccccggcatcggttttgcatagtaaaagccctggatctggtctaccccgaaaccttctaccagacttctctgttcatcggtctctacaccttcggcgatcactttcatccccagctgcttaaatgtataggacaaatttttgactgctagggcggataggcttttgtccatagctgcacgcacaaggcttttgtccagcttgacagtcccaaacggaatattgatgaccgtggcgatgttggaataacctgtaccgaaatcatccaaccccattttgatcccattgtctttcatccgcagggcgaattctgtgacgacttctgtgctctccgcaagggtactttccgtaaactcaatctcgatagcggacattggagtgtgattgctccggatgatctccaggactttatcaactaaatccggctgtgagaactgcactgccgaaaaattcacatggatcgatcccacctggatccctttttccaaaagccggttaatgaacttacagactttgtccagcacaacgtaagtgatatccacaatcaggcctgtctcctccgcgatcggtataaactcagacgggtagatcggccctatgggcgagtccgggatcctcattagtgactccgcataatgaaaatctccgctcttcacggaatagatcggctgatagtacatctcaaagctctgctctgagagactgtccttcaggatctgtatcaccctgcgccttctttccagttcctccagcatattcttatcacagtagcagacctgcccgtaccttccggccttagccctaaaaaccgcatattcgatggcacttacggtctgttccaggctctccccttctccggtgtaccggataatgccggtcacgcaggacagatgaaaccgataatcttccatctgccatggctgctgcatccgctggttaatctgatctatgcactgcctgatctgtttttctccctcgcgggtaaataaaagtgcgaactcatcgccgctaaaacggtatatatttccggccggtcccacagaacttagaaacctgcagaactccttcagaaattcatcccccatctgctgtccacacgtattgttgacctggcggaaatcccggagggataccacaacaaggacaaaacgcctgtctggagttttgctgatcatcaattccagcatgttgagcagttcctggcggttgggcacattggttagataatccatagatatctgtttgttctgcagatgcaggtagatgatcatcagcgcgcaggttgccgcggagccggataaaatgatattcggatagatctgctggacaacgataacgaccactgccagtatcggaaaagcggctaaaatatgatagatctttctgtcgatccgtttataattccagaccgtgacgatgatacttgcaagacagtatgcataaaaaacaagataagtggcggcaacccagtcccctctcacgtagccgtcactcagattgatatcaaagagctgttttgtaaacgggttggcgatgaccagcagcacatagatcacccctgggataatcccaacccctatgactttcttaagctgtccattctccgtataaatcacagagactgtataaagaaagtatgcaagtcccataagcggagtcagtacatagtatacggttgtcaccgtccacgtcatccacatgggcacctgatcacactggtaaatcatgatcgttgacaggatgttggtgagcatagctccaaatgtcaccatcaggcatccctgaaatattctgtttttcagtgtgggaagatgacttccccttcttgaatatacccaaatgatgcccagcattactaatgatatcgactctgctgcaatattccacctcaaattaatccacctgccaatccccttatttaaaaatccccgttcatttccctattggtttattttatcatagccagtttttgctgtctattaaaggatattgaagattcccttctttttgtgtctcaatgcctgtcgaataatatactaatagaaactggaggtaatcatatggctattaaaaaaactccttgtccttatcagggacctggaaaacaaaaccctgaaactatcggcggatacgatatgatccgtcaaacaaatgatgatctggatccggattactggatcacctctggcctctccgcagtctatgacgcaggctatgaagaaggccggggaggtatcctgcattttcatgaccggctcagcatttccaaaggagccctgggagactgcacatcgaaagtaacactcgatgtggcggcagagccttttgtttattcttattatccacctcattctctggacgtgatctttgttttagatgtcaccgcaagtatgatgtccggcgggagcagaaaaatggctctggccaagagagctttgatccagacgatccagctgctctggcgtcagaatcaggagaccaggatcactattgtcccttttgcgagggatgcctatatcccgctggctggaggcggtttttcctacgactaccttggtacgctgtttacctggcggcgctccaccgtaggcggcaacatgatcggacagatcttaggctatcgcaacggctcttatgtctcagcatctgagattcccgcctacatgagccaatcggctccgatcgctgccagtgctgaacgaagcttgtacaattattataactattataaaatccagtactctgacatttatcatgccgacggcagtgccagaactgatacgatcttggaaaattatcttcagcaggtgtatagcacagatccggctgcatatacaggaaacttcatcacatccgtggcgtcagggactcccctcactccttctcagcttccttacagcatgaatgataccggatatgaagccaataccattcttgacaatatgatctgggccattccttacggagaagacaccaatactgaggcaggcctcaatgaagcataccgtcttctaaagactccgggttttacccagtcagatgatattttacgcagagccgttattttaatcactgacggtcaggccaaccgctccgtaaatcctgaatatgccgatgtatatgcaggcccttccaacacagacagtgattttcttcctgagatgccgggaggcctgtggaagtattatttatatttaaagcagactctgccccggctgatccaggagttagccagccggtcagcaacctctgaggaattgatcttagcgcttaaacgtgcctatgaaagtgccgccaagataaaagatccctctgacggaaatgcctctttatttgtgctggggatcgaaatcgatgcacagactcccggcccgtatacaagagaggatgtcctgaacattatgaggacaatcgcctccacaggttcctatcttcgtgaagcggccgagagcgggtccgaacgccccatcatcgaggaattagaacggctggtgcgggatctcctcgttctggcaggaagccttcgtctgtcactgaaagataccatcaacaccgctctgtttgaatatgttccaggttccctaaagatttcaggagaacaggacggcatcctcctaaaaactgcagatgatcctgacatcacggatccttcagcccccggctatacggtttataaaaaaccgccgctgctccctatcgtagatgacggtaatatacaagacggagtcattacggttgacctagggaacgttcccttcttccctttgtccccggacagtaaaacccggctccagctcagctatgagatcacggctaagggagcagccagtggttcgcatcttcacacaaacaatgaccgggaaacgtttgtaaccttcctggaacccagccatctcactgccgataccgcagtgctgacatacgataatccggcccgcactctgcatttccctacacctgtggtgtcctgccatcccgatgtgaccgtagaaaagtttgtgggcacggaagccgaccagatcatctataaatcactggatgccgccgcctgtaaaaaagtatattaccgtatcgcagttcgaaatcactccgatcttccggctgtttttccgctgctctatgatgtattcggagcaaagtcagcagaccaggccgaacacagtaccgaacggcggatcctggccgaggatttcactgttcctccgcatgactctatggaattcacctttgagtacaaaacaaagtgcggggatggaacaatctccaactatgccgtgttagtcaccagcctttgtaatctctatgatgatacatccatagaagtccatgatgatactggaagttataccgtgcagtatctggaccgctgcaccggaaaccgcatctgtcctgaccgtcaggtgacagacgtgaatgcctgtgacaagatcaaggcccgcaaactggccgtctgcattccctgctggaggtatgtaagtgcgtgtccctgtgagattgatctgtgcagaggagaaaatatcataaaactctattacgttcctctgtgatcaaagctccttgaccataagaaaatttgtgagcaggatcccatttctgttcacctgctgctcttttactgccctataaccctgctttttaaaaaacggttttgcagttatggatgcaaaagttctgaaactccgcttgtctgaatgcgactccagctcccttacaagcgcggctgccacaccgattctctgataatccttgtgaatatacagccggtccagataaccgtcagcgtccatatctgcaaagcctatgatttttcctcctgcctttgccgtcagtgaggtatgttctaaaaatgacaggttccattcaaaagcccgtctggtttcggagcctgctgtccatgcgtccagctgttcttttgtgtaatccgccgcattcacggcatggacggtctcataaaacagtttaacgatttcaacgcaatcaactgtctgatatgtgtgaatctcaaatttcatctgtctgtcctttcattttttcttcagtatcttttgcaaaaactggtatggattaatgctgtattccccatgcaggcggtcataacggtagattcccagatgcaggtgtacaggaaatttgcccacggtcccttccttttttccatatccggagtcccccatataccctataatatctcccgcctgtacccgcattccccgtttcatacccggagcataactgtagagatgagcatagtaaaaatacacccctcccggagaacggataccgatgcggtatccgcccagcttcagccacccgatctgttctaccacaccgtcggacatactggttaccgggatttcgcctctttcttttgtcgcagtatcagaaagaatgtctgtgccctcatgatgccggtctcccccaaaacttctcgcctcattccacgaatcagaatagttgacaaacggtatgtagtcctcctgcaccggagaattttttatttcttttaaaatatgcgggtcaggctttccgtctttacatccggtgttgcggtactcctgaaaccgcttttctctcgcaattgcgtcgttgcgctgtaaaatcctctctacggccgagctttccgctgcgatcaaaagcccaagaaaaaaaacagcaaaaagcagcaaaatacctctttttttatttcccatccgctgtatctacctccaacttgtgcactatttatatatgcagaagaaaaaggagatacaaccgaaaggaacggggtattgcagctctttgctctatgttcatctattttttgtctgttttgtcttccatcaggtacttatgaagcagcctctccaatgcctgcacatcgataggctttgcaaaatgctcattcattcctgcccttaaggccgtcctcacatcctcctcaaacgcattggctgtcatcgctatgatcgggatatgtccggcgtcctggcggtccatggtccggattacttttgtcgcatcatagccattcattttcggcatctgaatatccatcaggatcatgtcataatagttttcttccgactctgaaaccttcttcactgcatcttcaccgtctacggcctcgtcaatcagaacccccatttcttcaatcaaggttctggagatctctctgttgagatcattgtcttccaccagcaggatccttttgccggtgtaatccggcttctcactggaatactgctgttcttcatactctgaatcttcattcagcctgccgagaagataacataattttgagtaatacagcggttttgacaaaaatgtcgtcacacctacatccctggcttcctcctcgatctctgcccaatcataggcagtcaggatgatcagcggaatcttttttccaacttcagcccggatacgcctggtcacctccaggccgtccatacccggcattttccagtctacgatcaccagctgtaccgggtcctgctcagcctttgaccggacaacgaagttgacagcatcctcaccatcaccagcgaagtctgcccgaagccccatactgttcagaagctcggccccatccctgcatgtctgaagatcatcatctacaataagacttcgtaccccggcccactcaccagagatctccttctgctggatctcctgcagcctgaagggcagagtcacagtaaatatcgaaccttttagaggctcactttccacttggatatcgccgttcatcaaatccacgacatttcttgtgatcgccattccaagccctgtacccaccgctttgctgccggaagcatccgcggcccgttcaaaaggaagaaacagcttatccagaaattcattgctcatgccgactccgttgtctgcacagcagaaaacataattctgatatcctctgcgcatactgctctcctgccggacacggacatcaatatctccgccttccttcgtatactttacggcattactcaaaatattgatgcatacctggcggacacgcagggcatccccgatgactttttcgtttttcagcgcagtcagctggactttcatatgaagctgtttttcgtctgcctgtggttttaccagtgcgatcacatcagccatgagttccgcaagattaaacggttcatccctgagagaaaactttccgctttcgatttttgacatatccagaacatcgttgatcaggcttaacaggtgcttgctggaaagagtgatcttctccagacattccatgactctctctcgttcatccacgtgtgccgtggctatggctgtcatcccaacaatggcattcatcggcgtacggatatcatggctcatattagacaggaattggcttttggctgtattagccgcattggcattgtccagtgcactctgaagcgcctgacgctgctgttcttcttcatacctctgcttatcaatacgacgggatatgaggaccgccaatttgtcatctgaatatggattatccacggaaatgatctgcgttgaggtccagtgatagttgccgtctgaaagcctctgtcttgcctccaaaaacacctcatttgtatcctggcctaaagcttcatagagctttccaggctcaaaccggcgcttaaactcttctacattgtctggatgcagggttgttgccacatcttcgtaaagtctgctataggatgtctgactgccaattcccagcatcagccctttttttacataaacaaagctgagcgtatcttttgtcagattcatactgatgatcacaggataagcattggagatggctcccaccagggtgatcctctcttgaagtttctctctctcagccgcttcttttgccagcttttcatccgttatgtcatggaatgccgccaccaggaccggattgccattatcatccaatgttctttcaagaatcccagatgcccagaagtaagtgccttcctcttttcggatacgatattcaaacgtattcttatgtccattttctgccgtctgccgaaatacctggacaagcttaacatagtcatccggatggatcatgctctgaagatcttccccggaaactacatcatttgaagtactgtcaggataaccaagcagacgcagtccctgctgattcagctgtagaaaacggtacggctgatcaaccgagatcaaagcaatcccctccggtactgcattatataaattcataatgtaatccgcctggttgcgcagctttctatttgtcttactggcataacggaaatagaaaaataccaaggccgagatacccgcaagaatacatccgatcaaagccagagaacggcgtaagatctcattggtctgggcgtccaccacatcttttggaataatggatattaaataccagtcagactgtaaatttaacggagtatagcaaagcactgtatcctttccctgataattaaatacagcccatccagtcttcgattgcttcaaagcctcttgaaagcgtaaaatactgtcccggtcattctgagccaccggcagcatatcaaaaagatttttcatggtcttgttgctgtttggatggggagaacggatcaaaacctttcctttttggttggtcacataggaaaaacctgtatcctcataaaaagacaggctaaaactgttgacaatactgctcacttcatattccttcaaaagataaccttttgtcccgtctttcaaaatcaccctgacatataagttaaatacattgacaccggtagagctgctgatatgcggatcaatgataccgtatttatcgtcagactcaagcaactgcctctgaacctcctcatccggatttgttccagaagggatacaactgccatcctgcagatagaggctgatccccttatccgcccgtgcataattgcttagagcctccgatacatccttcctttccgccattgagtactgcttcaggtattctgtgatcgttcccatggcctcatactcatcctggagctgcaccttcagagtattgcagccttgctgggtactctctttgatggtactgatggactgttcccacagctcctcctttacaccctgaacaaaaagataggtcagaaagctgagaatgatgccggtgatcactgctgccacagcaatttttttctttaccttcccaggcctgattatttccgtcattttattccctttcttttgctgctgcctggtccatctctttcaaaacagctttcagtgattttcctgagagaagctgcctggaggcatcggccgttaaattccagatcggcaattctaaaagactgtctgttccgattaccgttttgcccgccttataacacgataaaagaggctgaatctcatcaatcgaagaaggattccctcctttcaaagggctgaatgagcactgctgatccgcaaacctctggatattttctgcctctgtaaaatatgctacaaaccgttttgcggcatccacatgccggctgtcggcattcacactcaacctggtatccgcattcatcaccagcagagaaccattcttcaagacagggagagctgtaacttcaaaattaaagccgggcttcattgacttcactcttcctgccgcccatgctcctgtcagcataaacggcgattcccccttgacaaattcttcaaggtcatctgaagtcttctccgtatccagcgcctttccggcatcgatataaccttttttaataaagctttccgcctgagaaaagcctgagtttaagtacttgctcagtttttcatttccgttattcaaatccttaaatacctttttctgctcatgtttctgataaacagaataaaacccttccccaataaccagtgtcttcagagaaatatcattgttggatataacaggcgtagttcctttctccttaaaatactcacagacatgctcccactcctgcaaagtttccggggccttctgcttatgtttctccaaaagatccgtattgcagtacaatccaaaaacagaaaccgtggtaggcatccaataaatctttcccccttcctccatctgcccccgcatctggtccgtataatcagaaaccgtgctgaggccggacagatctgcgatctgtccttttcctttcagtttcagcaggatatcatggttaaccataaacacatcatcgccttttcccgaagccatacgcttttccagcgcctcaaagtactcggctcctttcaggctctcatatgacactctgatatcaggattctccttcataaaaccagagatgatctcttcgatcacttcgacattttctttttcgtatttatttccaaaaaaagttatggtagttacattctgaccggtactcttttcattttctaccgtactttttttgctgcatccccacaataaaagagtacaaatcaaaactgccgcacagattctcccactcttcctcttgtccattccatatcccccttagccgtccaactctgttcatgtatatttcaactgttattataccataattttgcctgtatcacaactgatgttttccggtttacctaaggaaggttttaataaattcacacagaggaacgggctttccgtaataatacccctgaaatacgttacagcccatatctcttaagagatccctctgctctttcgtctctacgaactccgccaccacatggaacttcagtgtctttgccatttctacgattcctgaaacaatatttctggatctttcattgtccagaagctgtcttaccagcctcccgtccagcttgacctcctcaaacgaataatcctgtaagtagaccatagaaccatggcccattccaaaatcatccatgctgatctcaatgccatgttccctgaccgctttcaattcaccggccactttatcagaatggtccaaaaacacacgctccgtaaattcaaagaccatctgcttgttcccaagatcatactttgagagaagcttgaacacatgccggctccaatccttttgctccagctgatttggcgagatgtttacagatattcttatttcttggtctgaaaccttgttcatctcctgaatatccatacatgctttttcaataataaagtaacccagcttctccaggagacggctctcataagccagctgtatgatcaatggaggcgcaatgtacccggccaccggatgattccaccgcagtaatgcctcggctccgtatagacttccgtctccagccatctgcacctgataatggagagtcagacatcctctctcaagctcattttttagatcataggccaatgttctagctgcatagttatgtacataatcatcagagagaagttccggtctgtgtcctgtctcatctccctgatccatatctttggtcatctgccggacctcttcctgaaaacttcttgtctgctttgcttcactgtaccggataaacggtatatagatcagagtgccgatcaccagatttacagcctgcaaaaggcctcctgtcatggaacccgtcgcctcatagccgctgaaaacaatcggaactgtccactccactgactttgtcacatacggcaccaaacccgtgtacattgcaaagctgctggtcagcacaaagaccagcggtgttaagataaatggcaggaacatgacagggttgaatatgacagggaatccaaagactgccacttcgctaatattaaagagaaccgatactcccgcaacctttgccagtttccggttatggctctttttcgcagcgatcaaaagggcaaaaatgaggcacaaggccgccccgcagcctccgagaaacacaaagacatccaaaaatgacttagaatagatctccgttggcatctttcccgcagcaagcaatgcctggttgacctggacccccggctcgaaaagtctctttgccaccgcgtccagtgtattggttccgtgaatcccaaaaaaccagagtacatgggaaaagagaacatacagcagggctcctgtcaggttgcctgacagatgcctgaatgccttcatgaataaaaaggaaccgaaattggtaatattgctgactcctgtccattgtctcaacaaaacccctgctcctgcaaacagcagtgtaatgataatgatcggcgccagattcaagatggaaaggttaaataaatattctgcacctaccgtgtgcatcgcttcaattttcttggcggccctgacacctatgcggaaaaggatgcaggatgccagtgtgatgcacatagccgtaaacacccactccggtccaaaaatatattctttgttttccgtgattccaccgcaaaaggccatataggagactaccgctgtgactgcataataaaatgcttcattggtctccgccatcttgccaaaggacaggctgatggtaacagtcagcagcagcgccagggatccaagagtgatgttatagaccgatgtcagaatagacaaaatccgccctcccaggaaatcactcatgaattcctgatagggcggatatggaaagctctggaataaaagtgcaaaggaacccagaattaaaaaggggataactaaggtcagcccctgtttgattgataacactgcaatcgatttaccgggattcttccggctcttaaaagtcttcatcatataactcccagaaaattattgtcccgtcatctgttcatgttcttctttcagattctcgtacaaggtgatcgaatcccatgtcttgttcgtgtcagttatgacagctttcagattgatcttgtctagtttttcttttctaaacctgaggatcatatcatcgatctgatgcccggtgaaacccttcatcaccagcatctcttccataaatcccgggccctcgtatacactgtctggagccacaattccaggcaatcctgccagagccccgatgggtttcagataatcttcctttttaatattcttaatccgcactcccatgcggatcagaataaacttaatctttcttcctctctcagagtgatccagattatataacaatacagcccttccgctgcttcctttttgcttcatcatatctactcctgcctttacaaatgcggtatgccctgtggatatgaacttttctccattatccttatccagaagatactacgtccatgttctacatgatcggagtgaggcattctaagagccgaacggaaatcatgtagaacatatcatacccattatagcatacttgtatgaaatcttacagattggtaaaaaatattatcattctgattctattgtataaaaagagaggagaggcctatggcagaccatcttttaacggacactgtgatgctgtgcatccacatgctggagctctttggcatctttgtgatcgtattcgggtgcgtaaaagctttttttcaatatctacgcgccggattcaccacgcaagaccgggatatcaagttggagcttgccaagatcctggcttttgccctggaatttaagctgggaggcgagatcctacgcacggttatcacaaaaaatatgcaggagctttatatgctgggcgcggtgatcctgttgagatccttcctaacccttgtgatccattatgaaattaaatttgaatccgattaatagatctccatcagctttccaagacgtcggattccctcccgtatcacttccggttcagagtttgtatagtttagccggaacgtagggacagcttttgtatcatccacgtaaaatggattgcccggtacaaacgccactttttcttccatcgcccggtcaaacagtttaagggaagactccccttccggaagtgaaccccagacaaacataccgcccttcggcatcgtataagagacactgtccggaaagaactccttcatagcctgcagcattgcatcgctttgtttcttatagagatcttttatatgatcgatatgttcatttagttcatgattcataaggtagtcataaactgcatactgggcgaagatattgctgtgcagatcagctgcctgctttgctgtcaccagatggctcataagttccctatccttagtgcagatccagccaagcctcatcccaggtgtaatgatcttagaaattgttccaaacaccacactttttttcaggccgaaggaactgatatatggaaacacctctccttcaaatttcagctgtccatacggatcatcttcaatcaaataagcagagtagcggttcagaagctcacacatctgcttcctcttttccacggaataagtaagccctgtggggttttgaaaatttggaactgtgtacaacagttttacattccgtttttccaaaatcaattccaatttatccagatccagaccgtcatccaggagcggcaccgggcaaaaatctggctcaaacatggtaaacgcctgaattgctcccagatatcccggttcttcgatggcaagggcatcgccaggattaatcagtactttccccattaaatccaaagcttgttgggatccggtagtgatcaaaatatcttcagcctgaacatccatctgatactcgtcccggtatctttttgccacccattctctgagaggctgatatccttctgtactggagtactggaatacttcatctccatattggtcgatcactcgttccatagactgcttgagggcttctttcggaaaagaaacaggatttggcagacctccggcaaaagaaatgatatcatccttctggatgacttttaggatctcccttatgaaggatgccggtgtctttaggattctttctgaaaactgtgtcatgattatgtacctcttctttccgtgacgatgtaagaaaagccctaaaccgacactccggcttagagcaattccgaatttttaattttaaatattatagtccttgtgcattcagatgtcaagaaacgctggaataggctgttttatttaatcttcacctgttcaatatttttgatggtgatgacacttccacctcccggttcttcccgtatctctacattatccttggtaatatactcttccatagggattttgatctcaattccggaatcagtctccaggatttggtattctaacttcttgacggtattctcctttgcgacggtaaaggtatcatactggaggtcataacgctcgattcggtcatcaaactcctgtttcttttctgtgctctcaccaaagatccgatcaccgatctcattgatacggaattcattcttctccgcaaattcttctctcaatttgctcttagcatccagacggttctttaaaggttcattttcataacggttgttgatgtccgtgatcactttgttcaggatctggaactttttctttggcgccatatctgcatggcactgaaggaaccgttcggatatgtagttgatcttgtcccctgtgagcatctcatatttcttttccaccagctgtaccttatattccagaagatctacgatgacagcctctgtgagttttgccccgtccatgggcatcacccgctgtattacaatatcattgacctcattttcctcctctttgtgtacataggtctccttatagttcattttaaggaatgctagatggacaacgctgtaaagctggaaactgacaacaatcaggtctgcggctgggatggtgacactgtcgcacataatgtcataaaggctctctgccagaactctgcttgcttccacaaagctttcatcctcctgctcctccatcgtttccaggagtgtcaaaacgggagacaggtttccgtcaaactgacacttcttagtgtcatcgctctctaagatcttaaaaatatgtccacggacaaattccatcaagtccggccccatatccaacagttcattggacaaaccaagatatccgttatggctgtccagaatatgtatgatcccttttctgataataatgtcatctctctgtatctgcatactattcctactttctaataatttttctttgtccattatactagaaaaaatccgcccggacaactccggacggatttctataaccccattaccttacatatctgcaaggacatttttgacatattcataagctcttgggcaatgtttctttaaagaagttctgttcatgcaatactctttgtatacttctgcaaagaactctttgttattagatactgcatatgctttgttgtctccgacaaatttgcctttttcagcgttatagatcgctttaaactctgctgtggaatcagctctgttgtttacatatgctacaaagtgtcctacctcgtggactaaaactctgttgacattctcttttacgatgatctttctctgagacgggctgaacactccatctgcaccttttaatactgaagaattcggattggtttcaaatgtcattccgactctattgaactcattgatcaccttgtcatcgacgattccctttaactggttaatacttgcattacctgcctgtgcgaggtttgttgtcttaatgactttcttaacgattgttgttgtcttgacagttttctttttggctttttttgttgtctttacaaccacattggtctggactgtctcttcaacttttttagatacgcttgtgataaccttcttggatgtctttttggttgtctttgttgttaccttcgcgcgtttaacctttttctttaacttatatgttttggtttttactttcttggatgtacttgttttgactgttactttattgctggctgctgatacagttgctgccgccggtgctgtgagtccaactacaagtaaaactgcaaatgcacttaccagaacttttttgattgcttttttcatgaccatgcgcctcctctatttcatagacacaagccagtgaccatcttgatctctggtacgaaaaaagcaacctgcttatttcttacacatgaacttctctcatgcggcaaccggctatcgtaatcttaaaaagatcttagacccttggctttgtgtcactacctttcgatagttttactaaaaatattaaattactgattaattaacttcatcatccatgttgtgattctgtgtagaatattaattaatccagctttatgaaattcggagcatctatctggaacgttctcttccaaataaaaaaaccatttgcaaagttatcctttacaaacggttgcacttataatcatataagatagataattattatccatacacattaaatatataatgtggcaaccggctgtcataatcctctatatgaggaccttagaccctttggctttgtgtcactatctttcaatagttttaccgatgaataattcaattgtacgataagacctagtaacttactcttatcttagttttattatatgcctctatatcaattttgtcaacattaattctgattatttttcaatatgaatctatataatgtatgatattttccacatgatttccgttcggctcttagaatgcctcactccaatcatgtagaaaatggacgtaatgtctgctggagatggctgttgcaagacaaaaggcgccacctacgaaagttatttaccactattggaggagcgcatttcaaaagcgcgacggaaatagtggtaaataactcatacttctagacatcctgtctctatgccttcactgcccatctcatttttgtggaccgggcccttccgtttttcgcacattcctcggcagacggcctgatcacatcctttgctatatccgaatatatcccttcccggtataattgcttaaaagcctttttcacgatccggtcttccccggaatgaaaggtcagtatggcagctctcccgccctctgcaaggacatggggcagtttttccataaattcatacagtacctcaaactcactgtttacgtcgatcctcaaggcctggaaggtcctctggcaggatttctttacagcttccttcctctcggctatcggaataaacgccagtgctccttctattactttacgaagatgtgtagttgtagatatgacattgccctttttttgttctgatataatggccttagtgatttccgcggcataaggctcatccgcgttttccatgagcattccgtggagttcttcccgctcagctgtcctcaagcgctcggcagctgatattcctttcttgggattcagacggagatccagcgggccttctgttttataggaaaaacccctgtccggattatcgatctgcatggacgatacacccaaatccgccagcacaaaatcaaacttgccatattcctgtgctatcttatcaatattggcaaagttctcaagtcttacagtcaagatctccggtccgtaccccagccctgccaagcgttctgttgtctttgcagactcaatcgggtccacatcaagtgcatagagatgtccctgtccattcagccttttgagcatctccagggtgtgccctccatatccaagtgttgcgtccagacccttctgtcccggttttatctgcagaaactccataatttctttcacgcagatcgggatatgcatccccgccggcgtacttcctttttgtatcacctttgccacagtatccgcatacttttccagatggagctctttgtatttttctttataggtttttggatgtgtaccgctgtagcgcacacgtcttttatgcttctgttcctgattttccatgtctaactatctccttttatgtcatagtaacatatgacagcactttttccaaacacacaactacatcagactaccctggtatatttttttgctgcccttatatcttgacggcgtacagcccattttttgtttaaacacttcggtaaaataactactccccgaaaaaccggtttcctgtgcaatctctgtcatggaataggtcccctgttcaatcagtataaggctcctgcggatcctgtaagtattcacatattcaatggggctttccttcaccacattccggaacatcctgcagcattcactctgacaggactgacatatctccgcaatttctttcagggtgatctttcttttataatgtttctggatgtatgcgatccctctgcgtaccctctccgtatccttgttcatcgatacagccccattttgctctttgcccaggtatcggatgaatccgttccaaaacaaaaaaaaccttccggccatttccatctcatatccttccagcttcgtctcataaatacggaccatctcctccagctgtccgatcagttccctctgcccggcagtattgctgtaaagcgggatgcagggaatctccgtattgtttatgacaggctccatgaacttccggtaaaccagactgtccgtacttccgcccaagaaaaaaggctccgcacggacaacactaaacctgcactccttttttcctttcatttgagccatgtgaagggtattctggttgagaaagatcccatccccctccttcagttcatagacccgtccccctgcctcatagatacattcgccctctgttatgatagaaaattcgatctccggatgccaatggcactgaaaatatcggttgaaatatttaaggaagctgtcactgctggcccatacaggaaatctctggtccagagactggttcagttccctgaaattctggtctgtttcgatctgcctcacaatatcctccctcttttgccataggattgttataaaacgtcctaatatgctgatatattatccctctgattcaaattataatgataagagaacgaaattgcaaggaggcacaccaatatgattcaaggcgttatttttgacatggacggcctgatgctcgatacagagactctggccatacccgcttggctgcaggccggagaaacctacggctatccaatcacagaagaacacgtccggcacacctttggattctctgtccccggaatgcaggagtactttacatctctgttcggacctgattttccatttggtaaagctcttcaaataagaaaggattatgtaaatgactggattgatgagaacggagtcccattcaagccgggacttctcaacctgctctcatttctaagagacggcggctataagaccgcagttgccacatcctgtgatctggaacgcgtcacccgctattttcggcaaggagagatcatggatttcttcgatgccatagtcactggagaaatggttcctcgcagcaagccctttccagatattttcctgaaggcagctgaaaggctggatctggatccttctgtatgtgtgggacttgaggactcccctgctggattggagtccatctcccgcgcaggcatgacttccattatgattcccgataaaatcccttattctgatgccttaaaaccattcgtcaatttggtatacaaggatctaaatgatgtcatagcctatctgaaaaaagcggacaatcccctcaatctctgagggacttatccaatttgaacaccaaatacgtaacactcgcagggctttttttaccatagtgaggttcaaagaaccttcctatggtacaaaagcactggcggtccggcttaatccgccggccgtctgtctttgtttgtctcaagcaattttccaacatgctccgtctcaaaaaacatctctttattggcaaaaaccagtcccactgctgccaaagtgatcacgatagtctctatacattttgtctcaggagtcatggcgatcttttcctgaaagaaatttacaaacaaatggaaaaaaatactggccatcatactccggttgttttttacgtacacccaggtcgtgataaaaccaagtggaatgacgctcacaaaaaaattcaaggcatatccaaagccgagctgcataagccccgcctggtaagttccatcaataaaaaacagagggatatgccaggcagaccatataaatccaaacaacaccgattcccagaaccagctgccatactgcgctatagagtcttctccataccctctccatcccaattcctcaatgacagaagccagaaggattgtaatcagggcagaacttcctttgatagaaaaagagaaaccttcagtaaaggaaaactgatcaagactttgcccgaagacagtagacaataggatcgtcagcgcaacaatacatgcaaacagcagaactgccgccagcaagttaaccgggtgtacccggtaaaaaccgatcagcttccgcttaagatcggatttcagtgctttgcttttggacgttaggacagtgcaaactgctgttgccgcaggaacacagagacccagaaacatcagggtcatagctgtcccattgtccctgcaggccgccgctccgatccagaaggcccacgtcattacaaaaacggttacataaaaacggattggatgatacttatatggtttcatagatcacacctcaaagctgggactctgtaccgcttcaatgatcaactcacttttcattccgttgagttcaaccatgctggtctggtcatccaactctccctctttccttgaaaagtcctcgcaagggctgccctctctttcataatatatactgttgccaattccctttttaaccgcaaaaaattccatattctcagatatcatcagtcttgaggtagaagataactggttgatatccagacgtccgtccagtcctgcacagacaatcaacatatcctcattgctgttaagctccacatgtgcggtgactccattgacaaagaccttttctgtcttacctgagaattctatattttctgcctctatgttcccaagttccaacaacgaagtgttgccggatatttcaatatctccggtatattgtcggggaatcctgataaaaatatctaattctgcttttgcccttgtctccgtcatagttccaaatcggcgcacgtcgatgtcgatctttttcttcacatcgtcaatccgtactttaaaagcagtctgaatctcagcaatctggtctgacgcaaggcggacctggattttctctccctcatatccgcagagcgaaacgcgtctagcccctgcaaaggtgatatcgtagtttttaccgccgtcgatatcatattctgtgatgctgtcatatacataatctttttttggcccgtcactttcatcgttctccagaagttcatcgattgagatgtggaacaaagctgcaatcgcctttacattctctatatcgggaacacccgccccagtctcccactttgtaactgcctggcgtgatacctgaagcttttcagccatcctctcctgagacatttgtgcctgcttgcgcagatcttttaattttttagaaaacattgtattttcctcctctgttttgatgatccaagtatagcaatcaggtatttccctaacaagcaactgttgtttacattctgaattttttggctactttccgtagcaaaagaggtcctgcacgaatacaggacctcttttgtgagttttattgatgttttttattattttactacagcttttaactgttctgtaagcattggaacgattttgtttaagtctccaacaattccgtagtcagctacgtcgaagatcggtgctgtgtcatctttgttgatagcaacgataatgtcagcttcttccataccggcaacgtgctggatcgctcctgagataccgattgcaaagtatacattcgggcgtactgttttaccagtctgtccaacctggatatctcttggcttccatcctgcgtctacaaccgcacgtgaacagctgacttctccgccgatcacttccgctaagtcttctaagatcttgaagttttcaggacttccaactccacgtccaccggatacaaggatgttggcatccatgatatcaacaacgtcagttacagatttaacaacttccatgatctcaacatatttgttgtctggagtaaatccaggattgaattcaatcacttcagcttttgcaccttcgatcttatcgattgcctgcataacaccaggacgtacagtcgccatctgaggacggttgtccgggcaggcgatggtagcgattgtgtttccaccgaatgcaggacgtgtcatcagtaactgattgtgcttctgctctcttcccgggattgcaaccaatgggaaatcaccgatttcaaggactgtacagtcagcagtaagacctgttgccactctggcagatacacgaggtcctaaatctctaccgattgcagtagcacctactaacatgatttctggtttgtattcgttgatgacagatgccagtgcatgtgtgtaaggctctgttctgtattctttcagttcaggatcgtcaacaacgatcaccttgtccgcaccgtaagctgcaagttcatctgcaagatctttcacttcagatccaattaaaacagctgtgacatcagtatctaaatcttttgcaaggtctttggcttttccaagtaattcaaaagcgatgccgcttaattcattgtctacctgctgtgcaaagacataaactcctttatattcttctaaacccattttgttcaccaattctcctttcaagtgcgctgcggcgtacttgcgccgggattttcctgtgcttgcacagaagattcctttgaaaatccctggcatccgccggaggcagatggggttttatctataaaaccacactagattacatgtttttctttcaatttgcccatgatatatgctacggattcttcaggatcaagtgttactttttctcctgcacccttacgcactttatcggaagcttttgcgatctttgtaggtgatccggcaagtccgatatttgcatcatcgacatctttcagatcttttcttccccaaacggtaacttcttgatcgtatgcgtcaaagattccgcccggagtcatgtaacgtggctcatttaattcagaaagagctgtaatcaagcaaggcatttttgcctttaccacatgatatctgtcttcatactgacgttcaacaacaacgctgtctccgtcgatcttaatatcctgagcgtaagaaataaccggaatatccaggtgttcagaaatctgaggacctacctgtgcggtatctccatcgattgcctgacgtcctgtgatgatcagatcatattcaaggtttctgatcgcacctgcaagagttgtagatgtagcccatgtatcagctccaccgagtactctgtctgttacgagaactcccttgtctgcacccattgccattgcctcacggagaacttcatcagcttttggaagtcccatcgtaagaactgtaacttctgcaccatattcatcttttaattttaatgctgcttccaatccagctttatcatctggattcatgattgtgagcattgcacctctatccaaagtaccatctgggttgaatttaactccacccttagtatctggtacctgttttacacaaacaacgattttcacagtaaagtacctcccttattttaacagatttccagaaataaccatacgctgaacttcagatgttccttcgtagatctctgtgatcttagcatcgcgcatcatacgttctacatcgtattctctgatatatccgtaaccaccatgtaactgaacagcttttgttgtcacttccattgctacttctgctgcgtataacttcgccatagctgcttccacactataattcttctgtgtagcctttgccattgcggctttgtaaactaacagtttagcagcttctacttttgtagccatgtcagctaactggaactgagtattctggaactgtccaatcgtacgtccgaactgttttctctcttttacatattcgatggttgcttctaatgcaccttctgccaatccaagagcctgagaagcgattccgatacgtccgccgtctaaggtatgcatagcgattccgaaacctttgccctgttttcctaataagttttccttcggaatacggcagtcttcaaagatcaattcataagtagaagatcctcggatacccattttcttttcctttgttccaaaggagaatcctggagtacctttgtccacgataaatgcagaaatctcttttaactttcttccgcgtttttcaacgacacctgttacagcgatcacgatataaacgtcagcttcttttccatttgtaataaagcacttagatccgtttaatacccactcgtcaccgtctaagacagcctttgtctgctgtccctgagcgtcagtaccagctcccggctctgtaagaccgaatgcacctaacttcttaccagatgcaaggtccggaaggtacttctgtttctgctcttctgtaccgtaagtctgaatcgggtcacagcacagagatgtatgtgcagatacgataacgcctgtagtaccgcagactttagataattcttctacacacataacatatgtcaaaggatcacagccctgtccaccgtactctttcgggatcgggataccaaggaaaccgtttttagccattttctcagctgtttcttttggaaactgttctgtttcatccacgtcctgtgcaagaggctttacttcattttcggcaaactctttgaaaagagttcttgccatttcgtgtttcttacttaatgcgaaatccatttcttattcctccatttaattatttactataatcgtagaatcctttaccggtcttctgtcctaacataccaccgcgaaccatttttctgagcaatggatgtggacgatacttggtatctccaaactcgttgtaaagtacttccatgatagcaaggcaaacatctaatccgatcagatcacctaacgctaacggtcccatcggatggttagctcctaatttcattgctgtgtcgataccttctacagatgccactccgtctgcatagattccgattgcttcattgatcatagggatgaggattctgttaacaacaaatccagctgcttcttctacctgaaccggtgtttttccgatttctttagagatttcgatgatcctgtcaacagtctcctgaggagtgttgattcccgcgataacctcaacaagcttcatgactggagctgggttgaagaaatgcataccgatcatcggacggtcaaggcctgctccgatctcagtgatggaaagggaagatgtgttggtagcaaaaattgcttccggtttgcagatatcctgtaactctttgaaagtctgctttttgatctccatgttttcgattgctgcttccacaacaaggtcacagtctgtgcagatgtctttcacaccagttgtgattttagctaaaatggcgtcagctttttcctgatccatcttaccttttgctactcttttttcgaatccttttgcgattcttgcttttccgtttgctgcgaattcttcattgatatcgcaaaggcaaacttcataaccttctgtctgagcgaatgcctgagcaattccgctgcccatagttccagcaccgataactccaactttcattgtgattcctcctgtatttaaactctaattgttgcctgccactgattatttattcttgaatccatcaacctttgtcttgtttaagaatgcttccattccggctctctggtcttcgctctcaaagcagcttccgaatgctttttcttccacaacgatagcctgatccatgtccacatcaagtccgtcgttgatcgcttttttggatgcacgcactgcaatcggcgcattcttagcaatcttggctgccatcttcttggctgcgtctaacagatccgcctgaggatatactgcattcacaagtccgatcctgtatgcttcatctgctttgatattgaaagcagtgtagatcatttctttcgcttttccggctcccacaagacgtgcaagtctctgtgtccccccgaatccaggtgtgattccaaggccgacttccggctgtccgaatactgcattttctgcgcaaagacggatgtcacaactcatagagatctcgcatcctccacccagagcaaagccgttgacagctgcgatcgtagggataggaaatgtctctaacttacggaacacgtcatttcccttcttaccgaaggcttctccttctgcttttgtcaatgtactcatctcagcgatgtcagctccggccacaaaggatttatctcctgctccggtaagaatcaaggctcttgtattttccagatcaacagcatccagtgcttcctcaatctcgccgagcacctggctgtttaatgcatttaatgcttttggacggttgatggtgaggatacctacaaaaccttctgtttcatatgtgatgaattccatggattcaatctcctttcaaattaaattagtccatttcaacgatggtagagcatcccataccgccgccgatgcaaagagttgcaagacctttcttagctcccctgtctttcattgcgtgaagcagagtaacaaagatacggcatcctgaagctccaaccggatgtccgatcgcaattgctccaccgtttacatttaatttgcttaagttgaatcctaagtcttttcctactgccacagactgagctgcaaatgcttcgtttgcttcgatcagatcaaagtcatcaatgctcattcctgttctctctaatacttttcttgtagaagcaaccggtccgattcccatgatcttaggatctacaccgccaagagctcctgcgatccatgtagccattggagtcacgcctaactcttttgctttttcttcgctcataacaacaactgccgctgcaccgtcattgattcctgatgagttcgctgctgtaaccattccgccctgtttaaaagctggtcttaatccagagattccttctgctgttgttccaggacgaggtccttcatctttattcacgatgatcgtctcttttttcttcttcacttctaccggcacgatctcttcatcgaacttacctgcctcctgagccgcaactgccttctgctggcttgctgccgcaaactcatctaattcttctcttgtaagtccccactggtcacagatattctctgctgtcattcccatgtggtaatcgttaaatgcacaccataatgcgtcatttaccatagaatcttttaatacaccgttgttcatacggtatccaaaacgtgcctgatctaatacatatggagccattgacatgttctcacatccgcctgctacaacgatatcagcgtcaccacttctgatcatgtctgcagccatgtttactgctttcagtccagaaccacatacaacgttgatagttgttgccggaacttcgatcggaagacctgccttgatggatgcctgacgagcaacgttctgtcccagaccagcctggattacgcatcccatgtatacttcgtcaacttgatctggctgtacgttagctctgttcaatgcttctttaataacgattgatcctaagtcagcagccggagttgtgcttaatgctccacccatcttacctactgctgtacgacaagcacttgcaataactacttttcttgacatatcaattcctccataataattctctgttctatagtgtttggcagtttcccgccgatatgttaatagtatcacaatcactttttcatttcaattacaaatttgtttcaggccttcaattaacgttcatgagatctcgagaacctcgtttttaagccatttcttttggtcttttgtatgcagtatagattgtacttttttcaatacagccatatgcctgcttttttatttagaaaaattttatatatttttagacattctattcctcaaaatccacacaaaatcgtcacaaaattaacaatatcagttagaaacagctggcagaaataaaaaaaagatggtcagagaataccatctaatgactgcgattccccagaaacagcagatgttaaccggggttctatcaagagtcataatgaatcttccatctttttgtcagttttttatcttaaaagtggtaaatttccagttaatttattcaccatctttttgggcccgcatacagcgatcccgaggtagttgagttgttcttccggtgtttctgacattttttccataaactcactgtaaatcatgcacccctgggccagatcagaaaaatccgttaccaacagctctttaaactcaggctggtttaatttatgtctcaattgctttaatacttcttgaccggccttcagaacaggtaccggaaatgtaatgatcccccggtgctcattgccatctccatccataacatcagctcctattgcttccggcatatgttttcccatggtcatcccaagaatcactcctgcgttgaccgcaattcccgcaggaagagcttcatctatcactaccgcgcatttttctttttccatcttcatatgtttcctccattttgtttttttcgatcaagtcttattttaatgcaaacaatcagaaaattcttgtatgatattgcacaggatagaacgataaaaccggggtgcttttttaagcgccccggccgtatctttttgacagttaaccttctatagaaatgtattcctctgcaggtacttcctttgcctcattggtcttaggaatctttaacattaactcgccattgtcaaatttagctttgatctcctcttgtttgacctcttttccaacatagaagcttctgctgcactgtcctgaatagcgttctttgcgaatgaaattaccttctttatctttttcgtcctttacttcatttttagctgcactgatggtcaaataaccgtccttcagctgagcggagatatcttctttactgaatcccggaagctccatactgagctcatatccgtctttggtatctttgatatccgtcttcatataacgttcacagtctccgaagccgaaacggtcagccgggaatgcatttttaaatgcatggtccatccagccgtcaaaaaggttctctccaaaaatacttggcattaacataagtcattcctcctattctatctctgatacagaaaactctgtattgttatatataatctacttgttctatatgcaatataacaataaccatccgatatgtcaactcatctaataaaagttcacaattatttcacaaaataacaatgttgaacaaactgggcaagccctctgaactgacccccattcctgcggagcgtttttatttcctatgttataaacaagaaaaggcccaggagcctgtttgcccctgagcctttgaattatatcatctttttattcctgtcgcagaatgatgtcttctatattaaatgcttcctcctccaacagatattatatccattttctacatgattggagtgaggcattctaagagccgaaaggaaatcatgtggataacgtccttttatctgtcctgcatactgatagagtcaatggccacgcttcctccacggactacctcaatgcttgagaaccttttcttgaatacatttaaaatggagttgtttttagcttctgtccgaacggattcgattaggatactgtcttttcccatatcctttactagaaagcgaaaaacctgagccatctggaatacttcgtttctatccttctgtgtgcatcccttcactttgatgaacatgatctccttcatacggatggatacagtcgtataatccataaccttgataacttccacgctgcggtttaactgctttttgatctgttcaaatgtggcgtcatcgctctccacactgatcgtcattctggaaaccgtctcgtcttccgtcggtcccactgtgagactgctcagattgtaagatttccctgagaataaacctgcaatccttgccagcactcccacacgattttcaacatataaggataaccatcttttttccatagaaaaacctcctatcggtccatgatcatttcgttgatggacccgccggtcttcatcatcgggaataccagctgctcactgtcaataatgaattcgatcaatgtcggtccgtctgtctttgcttttgctttttcaaatgctgcatcaatctcctccggttttgtcacccggataccctgtgcaccatagctctccgccaatttcacaaaatcaggagtgtacggaggacatggatgatgctccggtgtacagttgtctttgcagctctttctgtatttcaggcaggtgctagcgaatcttctattatagaagagatcctgccactgtctcaccatgccgagatatccattgttaaagatacagaacacaaccggaagttcctgcacaactgcagtagccatctcctggatattcatctgcgcaccaccgtctccgctgatgcagaccacttctcttcctggatttccgatacatgccccaagcgctgccgggaaaccataccccatagtgcccagcccacctgatgtgaggagctggcgccgtccgtgaagctcaacgtactgtgtcgcccacatctggttctgtcctacgtctgtgacaacaatcggttctttgaagtccttattgatcgcctcaatgatcttttgaggagttaatacttctgctgtatcctccattttgatcggatgtgttttctgccagctttccatcatggaaatccagcgttctacattcagagggggttctttctgcgccaattctaaaatatcgataattgcttcttttgcatctgctacaatcggaatatccactgtgacattcttagaaatcgctgctgtatcaatgtcgatatgtatgatctttgcattggacgcaaaggttcccagctttcccgttatacggtcgttgaacctggtccctatggaaaatagcacatcgcagtttgcaatggcttcattggctgcaaaatttccgtgcattccaatatttccgaaatagagcggatgatctgtgggaagtacgcctctgcccatgatcgttgacactactggcaccttcaggatttctgccagtttcgtcatctccttgtgcgctccggcgatcttggttcctccaccgatgaggaataacggctttttggatttataaagggtctttaaagcccttctcacttgaccggaatgtacctttgtatttggtttatatcctctgatattgacactttccgggtactcatcactgccaaagcctgccataacatctttcggcaggtcaatcagcaccggccccggtttacctgtcctggcaatataaaaggcttcctttatgatacgcggcagatcttccctgtctctgacaacgatcacaaactttgcgatattccgcgtcactccgacaatatccacttcctggaaggtatcgtttccgatcaaaggcagtgctacctgtccggtaaaacacacaagcggtacactgtcatagttggctgtagcgatccctgtcaccaagttggtcgcccctgggccgctggtggcaagacagacgcctactttcccggtggatctggcataaccgtcagccgcatggattaatccttgttcatgcctcggaaggatgacgtcgatcgtatcatctttatataattcatcaaaaatatcgatgacgcaggctcccggatacccaaaaatggtatcaacaccttcttcttttaatgcttttacaaaaagctggtttcctgtaatctttcccatatgctgtcctcccttaactttgttctagttcctctaatgcatactttatttcctcctgagcctcttgtttaaagtcctctaccttatcttgcccgatttcaggaagctcttttatggattcaactccaaaacaacgtaagaattcttccgttgtcctgaataatatcggtcgtccgacagcatccaaacgtccggcctcccggatcaagttgtactctaacaacttattcaccggatggtcgcatttgacccctcggatggcttctatctcttgttttgtcaccggctgcttatatgcgatgatggataatgtctccatcataacatccgtaagcttaggctttttcggctggtttactattttaattaattgatcataatattccggcctggtacacagctggtatgccccatcgagttccaggagccggatgccgctgtcttttctgttgtattttctcttaagctgatcaattaagtaaaaaaataaatcctctggaatctccagagccgccatcagctgttttttcgagacactctctcccatggaaaataaaattgcctcaatcattgcctgtttctgtttcatgcctctctaacacctctattataatttcctggccggtcctctcttgtacggcccggatctttcctaccttcatcagctctaaaatggagagaaacgtcaccacgatttgttctttgcttacctgtccctccagaagctcccgaaatgaaagacgcctttttgacaagaccagatattccacctcgtccatcttatcttccagcttaacttcctcctgcttgatctctccgaatttacttctgatgggatcaatcttatcctcccgcttgcgcataacaaactgaaagatacggtttaagtcctccattgacacatctctggtgatctcccggatatccaccggctggcggtacttgagtacttcttcgggaacggcacgttccttaaagaatattttctctgcctcatattcccttgccttcagttctttggacgcatacttgtagattttatactccaaaagcctccggaccagttcttctctcggatctccttcctcttcatcttcttccctggctggaagaagcatcttagccttgatccttaacagagttgccgccatcacaaggaaatcactcatcacatccaggtcttcctcctccatctggcggatataagccagatactgctccgtaatctcagagattgggatatcgtaaatctccaccttgttcttctcaatcaggtggagcaaaagatccagcggcccctcaaatacatttagttttatatcaattgatgccatagtttatatcctactttttctttaatgtgatacacgatacctcaggcctgttaaacagcctgatcttaatggaatgattcccaagtccgcggcttaagatcatgatggatctccctatctggtattcacccgagtcatacttaggaaacagctgaaactgtggtgagataacaccgccgatctttggaagcctgaccattcccccgtggaaatgcccggataagaccaggtcacagccccatttagagtactgcctgaagtagtttggattgtgtgccaaaagcacctgaaaaaaatccgggtccggttccccgacagcatctgccatgtcttctacggaagggggcgccggatggaacttgcggtactgcttttcctccatatcataggcagtcagacagatcgctgagatcccgctgtccaccataacactttcgtttgacaaatgaatgacaccgaactctttcaactgatggacatattccttataagccacaccatatacttcttcattccgtttcagtctcagttcatggtttccatcagcataatagatacggtatcgcaaagaaagctctctcatcagatccaaagcaacgtcataagatgaatctgttctgctcacaagcatatctccgcctacaaagacagcatccggactgcatccgtcgatcatgtcaataagtgctttattctggtaatcaaactcattgcagtgcagatctgtgaggaacacgatcttatatccatcgaagtcctccggcagtttcgctgatacgatcttatattcttccaatgccaggttttgattttcatttatgctgaccagacaaatggcagcggtgaggatcaaaaccccggttataataataaacaacatatgctctcactttcctggtatttgaaagcccaatttccaataaaggccattcccgcgcctttctttacggttcgggtatacctttccctattctactaaatattcaggaaaaaaacaaggggacggatgcccatccgggcttccgtcctccattgtccattgtgataccttgtaaatatgaatcgttcgattactctgtgatggaaattgtgcttccgacctttaatgacggtacatctgctttttccacacaaatgcttcccggaaggcattctccgcttccattgaaagaatatgttacatgtcccagattattcagattttctctggccacatcaccaaccatggtgatcgtatattcttgtccgtcaatcacaagcttgctgccaggtttgatgtctccctgaacaggatttacatccactgtgtagcagaaatctgtcaaagtatccggagcattgtctccgaatgttacgaagattccttctcccacgaatgcttctacctgatctcccattcctttgattgttgtctgataaatcattttcttcttcctttcctgctaaagctgaattatttgtataatccgatacttgcgacgaatgctacgagcacacgcggcacacctatgatgaaccttgagtatagcacagatggcacacccacttcaactgtttccggatctgcttctgtcagtcctaaacctaccgggataaagtcacaggcacactgtgtattgatggcaaacaatgctggaagcgcaagtcctggtgcaatatttccttttccaatctctacaccgatcagagtaccgatgatctgagcgataacagctccaggtcccaacagacaggacaggaacggaatagaacagatcagtcctaagatcacgagtccaacgatatttccgcagagaggttttaacatctgcgcgaaccagttaccgaatcctgatccctgaatgataccgatcagcagggatacgaatcccatgaatggaaggatcgtatgtaatacggtatttacagattcttttgcagctgcgttaaaggtcgctacgactttacctgctcccataccgatcttctggataaagctggactttccgccgccgtttccacccatctgctcagaaactttcttatcagcactgtatttgaattctctttcttctgtctttggagcttcctctctgatcggagctgcagatccgtctgctgcgctgatctggttcatgccgactcctgaaacgtagatgtcttctgtgatatattttgccatcggtcctgattttccaaccggattgacgttgatagtcggaattcttttctgtgggtagattccgcagcgaagtgttccgccgcagtcaatgatcacaaggaaaatttctttttccggtacggttgtcttaaatccatttactgcacggcatccagtaaggcttacgatcttctcaacgatctcaggttctgcccctcctccggtgataaataataaaacatcttttccttcttctggttttactgttaaaggtccgccgaatccgccgcttcctttttcaattgtaattgctctgtaatctgccatgatgaatcctccttttctctcaattaatcctctaatttaatctcgttgctcaattcaattccctgctgtttcataaccatctttgtagtaaagtctgtcacccatcctgcgaagaagttcatgacaagaccgactaacagatagcggagagcaagatctgtctcatttaagccgagtttctggattccagctgcaattcccatgtaaatgaagatctcacctggattgatgtgagggaaaataccgctgtttgtatggcagtgataagctgctgatgcatagtaacttggtttctggcgttccggtaagaattttcccatggaaaaagccattgggtttcctaacataaaggctgcgataaacggcagcaccccgtaagccaaaattacatttttagagcaaactttcgcaaatttattgattctttcctgtccaaccaatgcgatgattgtattcattaaaataagtaacagtaatacctttggtacaattcctgacacccagccgataaatgtttcagcaccagtatcaaataatcccataaatcctgacgcaaattttactataacgttcatatatatttctccttcctatttgcaggcttttctggatttgccgagaagcatgtctgcaattcttgtcaaaagtcccggcgtctccactacttcgcctccgtccatgatcgtgttgtagttggaggctgcattgagaacggatctcctcagagaatattccatccctttgcaatcttcttttgtgatcaaaccaacgttctttccgttgaaatcattaaactttttaaatcttgcaaagatcgtaaatccccgcataaagcatccttctttgatcatgccacgcttatcaattgcaaacattaccatggctccggcatgaaaaccgcctttgctctttccgatcgccactctgccgatcttcctcagtctgccgtaatggacattaaaggccttcatctgaatcattgaaaacagaaactgcagtataaatgcggtgagcagcgcacctgcaatcaataaatagtatgacatatgcatcctccttaatcttatttaaaaatattgttttcttccacaaagtacaacagtaattcccggtaagtcttcatcttcctaagcttcttcaccacgtctggttcatgggcaatggccagcatgttgtcgtaaagctgaattagcacggaatcatttttcatttcttccggtatggccagcaaaaacaccagctgtacctcgtccttcccttttgctttctctttttccggaaatactccgaaagcaagggccagctcaggcagtctgtttgttgtgtggggaaaagcaatatttttctcaaatatcatcgtcgattcttgttcccgaagcctgagtctctcattaaagctctcatctacaagtccttgttttaagagctctccgaccatcttgtctacgttttcctcatagccaagctctggctccagtacaaagaaccgctcctcgtccagcatatttaagaatactgaatcgatgccacggcggatgggaattcccatctctaccatgttttttacactttccaccttgcttttcagcagatttttgtcaaacacctcatcaatgtctataataggtgtattcccttttgcttttaaatttgtcgtcgtaataatcaagtcataggaatcttctttttgtacttcaaagtccccgttaaaatagtaatcaatagccggctccacttcaaaaatatttttcagctggctggcgatcaatctgccgatgatttttcctgatccacagacgatggcgattctgtactgcttctgctccggtgcctgctctaagaggaacacaccgaagtacatagccagaaatccgagctcgcccttggtcacctcgactccggtccttgtctcgatgacatctttggcaatgccggccatcgtgtaggcaacggagtattcatcttttacttcctccaccagagcgttccggatatgaaatccatatttcagacggttgatcataaaaaatacatgatagacaaaatcgtcaaacagttcattcactatgactgtgactccgatctcatcccggattcggtccaaaatctcaataatcaggtccgccgcttcctctgaaatctgaatataattttcaatcccctccgtattgaccggagtcctcatccctgcaatgggcaggcagagaaaaatcctttccggctttggtattttaaacggtactgctttttccactctgtccgcaaattcgtctgcaatctcgtaaaccttgctgtcataaagctccagatacctgtggtccagagactcgatcgtatgtccgtttccgagccggtcaatcatgaccacaaaggctctaaagaactgcccgaatcccagggcatccagagaatattctgtctgcatatcgtacagaagctgtctcagctgactgcccagaggatagttcagataaatctgttcataaacattctccaggaggaacatgcggatcttaatctcctcgccgcacaggacaagtcctgtgttggcctttccttccactgtcagattgtacttttttatctgttcccggatacggtttaaatctcctacggtagtcgttctccctaccttcatctcttctgacaggtcatcgatcagatatggctttttggcatccatcagctgccagaaaatatacgccatccttgtctgcggtgaattaaaatattcttcctgttcgtaaatcttgttacgggtctcttcgtaacccttctgatcgaatacaataagcttatactgtccttttttattgctgatgactgcataaccgcccatcaggcagttcagctcttttacatcgtttctcaccgtttttgtagaaacatcaagctttgccgcgatgcggtcaacatcagaggaagtctgtacctctacgtttcttaatatagcagccatcctgttttcatcattaaaaagtttcataagcttacctgattaccaccttttctccgtatgtagaattaacctctcgtttttccgccggctacgttgatggtcactccgtgtacataagaagatctctggcttgccaggtacacacacatatctgccacttcggaaagctttccggatcttccaagcggtgtggtggatgtcttgctgtatcctgctcttaagtcatccactgtgattcctcttgtataagccaatgctgattcataggataaggttctcaaacctgttgcttccatgattccaggtgccactcctactacacgcacaccttgttttcctaattcttttgcccagcttctggtcagggaattcaccgcgttctttgtcgccgcatatacgctctgtccctcagaaccctccagtccgctctctgaggacatattgatgatgacgccctctcctttttccacaaggatccttcccactgcctgagcacagaagaacactccttttaagttgacgctgcacactttatcccacacagcttcatccaactcatactgacccttcggatcctttggatctaccagcagtctcggaatgttgatccctgcgttgttcactaacacatccacggtgccgaatgtgtccaccacttctttgaccatggcgtccacatcttttgcgctggtcacatcggtcttaacataatggaacttgccgtctgccgtgtcaaactccggagcttccggtgccatatcggaaacgacaacattgcagcccacatttaaaaattcctgggctactgcctttccgattccggatgcccctccagttacgatgacggtcttgccgctaagtcctaaccatgattcgctcataaataatcctcctaacatgtgacttgtttacttgatggttttattataaagacaaaaatgaagaaatttaattctgtctttttccatgccaatgaaaagaagtgtcttatttatgaaatttgcggaaatattactttatatattgttcattatttgtttataaaatatttatacctaaggatctatccaaaggtaatagcattataactgatagcgaattcataatctactatttttgttcactttcatttaaaaatattgttccgccagacgtgtcagactggtcagatagttcattttttctacatcttctgtggccctcaccggtttcttcaaaaggatctcatcccctcttttatagataatataacccagcacctggccctttttcacgggagccttcacctgcccgatgcggatttgtttcttcacgtcatttttgctgcccttgaccagaacaatttttgccggaatatcctgatcgtaggagactgattcctttttcccctttgtgactgcgatctttccgatatcttttgcttttgtgtgatcttccatcacctgacaatgagaaaatccatagtctaacagtgcgctggcatcttttaccctggccttggaatcatcgctggccataacaactgcgatcaggctgacatcatttcttgtagcggttgcgcttaggcagaatttcgctgtacttgtgcttcctgttttcagtcccgtacagccattgtactgttttaaaagcttatttgtattgctgagtccgaattcctttgttcctttttttgtctcatgggtaaatttgtccatccaaatttttgtgtacttaaaaatatccgggtgcttggtggtcagttccctggacatcagtgcaatgtcataggctgaagtttcatgtcctttgatatccagcccacagctgttcttaaatgttgtatgtttcattccaagctgttttgccttttcattcatccgttttacaaaggctccctcactgccggcaatgtgctctgccatagacaccactgcatcattggcgcttgagatcacgatacacttcagcatggtatccacgctctggctttcccctggctccaggaatacctgggatcctcccatagacgccgcatgttcactgactgtgactttgtcagtatacttcagatttcctttgtccagctcctcaaaaatcagaagcagggacataacttttgtgacactggccggcggcagttccatgtccttgtctttttgatacagtatggtgccgcttcccgcttccatcaccactgcagatttggctgtcaaatctagtccttcttcatcctgggccactgtgagcaatgtttccggttctgtggccgtcacaaccgttccggacgagatgcataccaacaaagaaagaataaaaatcgctgcttttttcataaaaaaacctttcacctcttatgttacagtttaataaggaacaagccgatttattacaaaaaaactgccgacatgaaaaaaagaaccatagatggattcccatctacagttccttttcatcttctttgccttattccccattgatttttagattttaatttcttgtattcttcgtatgcttcctttaaaatctctttttcattcgggaacttcaacaagtggtaggcttcgtgatatttgtagtacccagagtcaacgaaaaactcttctttctgcggttttgaatgatatccctctgcctccatcaaataccagtgaacactttttacgatctgttcatggaaagaataaaaagaatactcactctttcctacatatttaatgattcgggcattggcgtctgtctcttcttttacttcacgcaaagcggtttgttcgtgcgtttcccctttttcaactgtacctttcggaagtacccagccgtcatatctgtttttatagcttttgtacaacagcaatatcttccctctgtaaattacgacacctccacagcttgttgcctctgtcattgcagcctccaatcatcctgcctcaacgctattttgggtctctctagaaaatattataacgttaatggcaattcatttcaacattggattttgctttccctttacttacctgaaataagcgtcaaatacatcttttgcgatcggcgcagccacacttcctccggatcctccgccttctacgataatactcaccacaatttttttgccgttgtgctccgcacagccgataaaccatgcgtgggagtccttatcgctgttgtactctgccgaaccggtcttcccgtagaccttatatcttgaggaataagctgctgtaccggtaccattggtcacaacttttctcagcatttttttcagggttttacattcttttgcgctcaatggactggctatctctttagctttcgtttcttttataatgcctccgtccacatttttcaccttgtctaccaggtacggttccatcatgacaccgtcgttggcaatggcactcatgactgccgcattctggagaggagtgaccagtgtagtcccctgtccgatggcaatctgaggaacctggctgtctttggaacttccgtcaaatgaaaaacggctggagacagctgccaggttgatcggtatcttagaattgtacatcatgtcctccgcaagagaagccagctttcctttgttcagctttgatgccatatggacgaacgcagtgttgcaggatttttcgacagcctgctccaggttcacggtcccatgggcggtccctccatagcagcggatctttacattgttgatctttgtatagccggtacagtgatatgaaaagtttttataatctttattttctctcatatattccagagccgttatcactttaaatgtagaccctggcgggtacagtccctgtgtcgccctgttgatcaaaagagcatcgctgtccgtgtttaactcttcccagttttctttgacaagagctggacggaagtctggcttggaaaccatggcgatgaccttcccgctctccggatccatggcgactaccgctcccttttcaccgcttaacgcattgtatgcagccttctgcactcttgtatctagtgttgtatagacattgtccccgatgctcttttctcctttcagattactctcgatctgagacaggagattggcattggactttagaaggtcaaaattacatttagactccagacctgatttccctttggcattgtatccgaccacatgggcaaacatacggccatacgggtagtctctgacttcatcttctccgtcattgaccgtctgggccagcacttttccgttagcgctgatgatctttcctctcaccacatgcttctctaattcctgaagtctcaggttgtgggaatctgtgatgacactctggctgtccctgacaacaaaatgtatgatatatccaatcagcactagaaacagtcccacaaagatatatgtaatctgcaggatctgtctattggcgtgctttttcttttttccttgttttcgttctgttttttgggagggagatttctttggtgtctccgtttccgcgttctttctgcgtttgaatattttcattttcttcttcctcactatctgctaacatgtgcaatccctgaattacgctcaaaatgatcaaagtactcagcaccgatgttcctccgtagctgaccaaaggaatggtaactcctgtagacggtatgaatttggtcactccgccgatgcttaaaaatacctgaaagataaaacaaatgccgaatcccaaacatagcaatttgttaaacagagtacggcttcttgtagaaatatccataaacaaaataaaacagctgatcagaacaaagatcaagcagataccaaaaattacgccgaattcctcactgatcacggaaaagataaagtctgattcccggaccgggatatcaaacggtcttccctgggtgaggcccattccaaaccagcttcctgtgccgatggcaaacaaggactggcagacctgtgctccccttccctcaatcatggaaaacggatccttccaaacagccacccggacctgtacgtgggaaaacagatgatatgctaccactgccgccagagctccgcctcccagtccgcccagcagataactaggcttggctgtggccacatacagcatcataaggtagatcataaagtatagaagcgctcctccaagatccttttccaccaccagcaccagcacataaaatgcggcgatgattgtgattttcacaagatccttaaattcctttgccttgctcagcatagctgccgcaaagaaaacaaagatgatcttaacaaactccgagggctggaatgccaggcttccaaactgtacccagttatatgcaccgtttttcatgacaccgaacacaaaaaccgatgacaacagtgcgaaaccaccgaccgcatagacccagccaagcttattccagaaagaaagcttatgcatcatcagcgggatcagtccagtcacaagcacaccgatggccacgatggcaaactgcttcatggccagttcaaaggacagccttgttagaatgacaaacccggttcccagaagaaaacacatattgttgatcagaagtcttgaggacctcttatatattttcggatataggatcattacgatctcaaagaaaacgatctgtgccgcaaaaaatatgaggacttttaattccagggtccttaaaaacaggaccagattgcacagaaacaaaaatacaaacatataaatgacctggttgtccagaagttcttcctgccgctttttatttttcggccggaacatggtaaaacatgaaaatgtataaaccaggcacataatcagtatcaggtatttcgcaaccactgcaatgatttgaaccatattaccacctataatattcctctcttaaagtgtccttttgtaaactgtgggaatggaaactcaaaagatctgccatccagcgcccttaaggcagccctgtacaccagacgggcttcctcccggttttccttggtaaagtgcagacggaggtttttaggagcgagtctctttaatgctgatgtctctgtcccaagccatagaggctctccgttgtaaatttcattaaaacatcccttacactgatttttgacataaaaatcttttccataccggtcttttaatgtcatccagaaactttgacggtcacatccgatgctgttcttcctctggcactgtgccgaaaccatcagcggcaggtgtccgtaaaacagaaaatccgcatccctgagtgacaatgtcataagttcctcaaagttgagttctacaggaaatgtcggccggatcttcttgccataggcctcattgagcgtctggtatgcctctctgttgtaacagtaaaccgtataatctgccagcacattttttgtgcatcccttatctctgagccaaatgagttcttccaggctccgtacacagatctcatttacatccggtccggacagcagattccagcactgctctaaaagcttaagttccggctctctcacgatctgtggaagcatgatggtcacctgacgtcctgctttctggcactgtgataaaatctccggtgcctccgatacttcgtagagagaaagataaatttttttcaccctgtcccatgtgaggacttccgggagcagtttcctgtcttcaagagaaacactcaacacaggggaattctgtacaggtatctcttcttccggcacatagattgcctggcattcaacctgatttctgcggctctttttcagaatctcttccgtcagcttttcaaaaccgtctcttctcagctgttttaacgccgccacgggaagaaaactctctccgtgaacttccgcttgaagttcttcaaaggtgaagttactctcaccagtcttagatatctgctttataatatcctccctggaaagagggcgtttctgggccggttctgccagggcacccaaaacttccactgtcacttctcctgaagttaacacaagtctagcacactttccaggaaaaattataatttttcccttaatattttctttcgatttttgttttagattttctgctgacttatccctaagagcctgattttttgtcctgaaaatagacattccaggtttcagatatttcagcttctggccgtttaagtcgaccttatctccctttttccaccgttgcggacaggtgagttctaccttccgcccatgttccagggaaatctccagcacatccccttttccaaggttctctgccgtctgaaacacaacatgttttccctggaccgactgaatctttcctacaaatattccctgatggttgggcctgtgaagggacatcatatccctgccgttatgcttcttatagtatccggatgtaaatcctcccctgttaaaaagctccagcaattctttttcatcttcctcagctacccggtagggacgtccgctctcatagagatccacatactttctgtaaatccttgtgacagcgcctacgtattccggctgtttcatcctgccctcgatcttcagagaatccacgccgtgctctatcagttccggcagttctctgattgtacagagatccttgggactcagcaggaaattctggcctttccggttcagctttgtgccgttctcgtacaggtcaaagggcagcctgcaggtgcctgcacagcgtccccggtttccgcttctgcctcccagcatactgctcatcagacattgtcctgaataacaataacaaagggccccatggacaaaacactccatatccagccctgtatcttgtttaatcttttgtatttccttcagggaaagttctctggcgggaaccaccctgctgcctcccagttcctttaccagtcttgccccatggatgccggtcaccgtcatctgggtgctggcatgaatctccatgtccggaaagcagcttcggatgatgctcactgctcctagatcctggacaatgactgcgtccagtcccctctcataataaggctccaaaaacccggcaagccccgggacctcattctgcttcatcagtgtattcactgccaaatagaccctgcgcccaaaaaggtgggcatagtcaatggcccagagcagttcttctttatcgaaattatttgcataggccctggcgccatataagctcccgcctaaatatacggcatccgccccgtttttcacagcggctttcagactctctgccgagccagccggtgccagcacttctgttgatttcatacttttaccgttccttttttgcaactgattcttcctccagcatccgaatcctttcccggtactcgttcagctgcttttctaatgattcattcttgatctgcagttccaccaactcatttttcatacggtacatttccgaatcctgctgatccatatcttccctgcttttctccaaggtatttttcatacacatgtattcatctgccacactgagtgccagatggaagctctgcatgtccggcggaagcttcaggtaatgctccgaagctttcagatccctgatcttcgcgttcagatacgatgcgatctgatgcatgaactcttccggttcctctccgcctaaataatataattttccgtcaattacaacctctacgacgtttttcttcataagtaagccctcctattccgggattggcagtccaaaatgctggtaggcggcacctgtcacaatccgccctcttggagttctctggatcagaccattttggatcaggtatggttcatatacatcctctatggtcccagaatcctctccaatcgcagccgcaagggtatcaagccctaccggattgccacgaaagacgtcaatcattgtcttaagcaatgtccggtcgatctgatccagtccaagggtatctacctccagatggtttaaggcaaccattgccacgtcctttgtaatgatcccgtcatactttacttccgcaaagtctctgactctctttaacaggcggtttgcaagtctcggggtccctctggatcttctggcgatctcccgtgccccttcctcttcgatggcaatgcccagcacggcggctgagttgatgacaatggtcataagctcctctgtctcataaaaattcagccgattgacaacaccaaaccggtcccttaacggtgctgtcagcatccctgccctggtggtagcccccactaaagtaaacttgggaagctccaggcggatcgaccgcgcggcttgtcctttacccaccagaatatcaatagcgaaatcctccatggcgggatacagaacttcctctacctgacggttcagccggtggatctcatcgataaacagcacatccccttcctgaaggttgttgagcagtgctgcgatctcccccggtttttctatggcaggcccgctggtcactttcagatgaacatccatctcattggcaacaatccctgcgagtgttgtctttccaagacccggaggcccgtaaagcagcacatggtccagagattcgcctctgctcttggcagcctcgataaaaattctaagattctgtttgaccttttcctgcccgatataatcgtcaaggctctgcggccttaggttattttctattgtaatatcttcttccaccaattctgtggaaatcattctatctaacataatgttcctctatatcagcttcgtcagcgccttttttagcaattgctcaggcccataatctgctgcattctctactttcttgatggccatcatcgcctctgacctggagtaaccgagacttacaagtccctgtgccgtgatcgccacggaatcctcctccagggtttctccttcaaagcttaccgtatcctcctgcttaaattcctcaaagtccagcttgtcccgaagctccaggatcaatttcttagccccttttggcccaagcccaggtgtttttgcgatagttttggaatcatcactcatcactgcgatcttcaattcatagacagaaagggtagccagtacagaaagccccaccttcggcccgattccgctgactccgatcaacagctcaaacgcttccagctcatcctttgtcagaaatccaaataagctcagatcgtcttctctcacatgcatgtgggtgtatatcttgacctcctggccgatgccgcccggaaactctttaccggcaggcatcataatgtcatacccgataccgttattttctaccaccgctcccccaggtctcatggaaactaaaatgcccttaatatatgaaatcactccatatcctccttgcgacgttttgaagtcattataacataaatctttcacctgtggttagggattgaaaaaaattcacacaggaactataatgaaggacagcagtttttgaaaggagcctgacccttgaatacaaaagaaaaccttctatatctggatattgagactaccggactttcgccggaaacctccgccttaacggtcataggatgctgtgaaaaagacggaacagccgttcagtggtttaatgagtccggatcggaacaaaaaaaaattctttcttcttttctctcctacgcagaacggtttgacacctttgtcacctacaatggaggcacctttgacctgccttttctaaaaaagaagtgtgaagagtatggtcttccttattctatagaaggaaagaactgcattgacctctataaaaatctgcgttcctggaaacacctgctgcccttacagaacttaaaacaaaaaaccgtagaggagttccttgaaataaaacgcaaagaccggttatccggcagacaactggtcaaagtctaccaagactacataaaaaccagacagccggaattaaaatctatgattttgcagcataataaggaagatatcttatccctaccccggattcagtcactgctggtttttggaccgctgggtaacggcagctttacggtgaaagaacatcatatcacggaccacaaattatcggttcatctgtctcttccatttgctgcccccacatcgctctttattgaaaaatccggccaccgcctttgtgtttcctcatcggaggcctgcttatcctgccctttagacaacggacagttaaagcactaccacaaaaataccaaagattaccgctatcttccgctggaagatttggtcataccggtttccatggcttcttttgtagatcagtccgcagtggaaaaggcggaaccccaaaattgttacacaagattttgtccggatgaaaactttctgtcaaatcaggatgatcttcaaaaatactgtactgatatgatatattacttacttagaaaggataaataacatgagacacctattacaaatgagctttcttttcttcgtctgtttggcaggagaagggctggctaagctgctcccgtttgcttttccgggaagtatcatcagcatgtttctgctgcttatacttctgctttcaaagatcgtaaaggaacatcagattcaagatatctgtgactttctacttcaccatatggcttttttctttcttcccgccggcatcggaatcatggaaaaatatcagctgcttcagggaaagatcattccttttctcctgatctgtctgctcactaccgtactcacgtttttcaccacgtcactttccatgcgtctgatcttagccctgcaaaagaaaggaggatccaatgaaggaactgactgctaatcccatgtttcccatcgccctctccctgtgcgtctatgagggatttcggatattacagaaaaaatcaaagatcgcagctttgaacccattgctgctctccatagcatttattattctgtttttaaatattttctctatcccccttgaggattataacaatggcggagccatcatctccatgttcctggcacctgccacctcttccctggcactgtccatttacagagagtttgacctgctgaaaaaacactggtttccgattctgatcagctgctttgtgggcgctgccacatccatcgccagtgtctatgtgctgtgccggctttttggatttgacgaacatctgactgtctccctgcttcccaaatccgtgacaacccccatcgccatggaagtcagcagccagctttccggtatcccctccatcacagtggcggctgtggtgatcaccggtattctgggggcagtcataagccctgcactgatcaaaatctttaaggtgactgaccctgctgccgccggtgtttccatcggtgcctgcagccatgctgtcggaacttcaaaggcagtggagctgggtgagatcgaaggagccatgagcggtatctccatcggtatatccggcattatcactgtcatcctggcattggttctctttcattgacaatttcacaaaaataaaaaatctgcgcagttttgcgcagattttttattttcgtttcttttgcagagcctctttaaaagttttcacagagcggtttactaccagctcttccggaaaatctatctctttcagcagtttttctgcctcgttgagatcacctactgcatatggagtatgtgcatcgctgttcacgatcacaggaacgttatgcttcctgcagagatccagcatttcataataattttctctggcgttgatcctgaagctctcaggacagagggaactgttgttgacctccagcaaagtttttgtctccttcgcacccatgaccaaagtcttataatcaatcggaatctttccatcatccgggtggcttatgatatccaccagcgggtgcttcatagctcccagataagccgctgtattctgctccctgtttcccactttatagcacaggtcgtgaatccctgcgatcctaatgtccagaaactcctccatcagatcatcatccagactcagtctgccgttataatcaataatattgatctctgaaccgaacatcatctctatgccatacatctgtctcggaagtactcttaaattcttaaaatacacatccgaacatgttcctggaatccctttggcatgttccgtaatcccaaacagatcaaatccactttctgccgccgcatgggccatctctttgactgtcccaaatgcatgtccgctggcaatggtgtgagaatgcacgtctaacttaaactccataaattactactccttctttcctatctctcaagaatcttccccttccggggcacactatgctttatcatactataaagtaaaagaaattggaacctctcttaagaatctctccctaacctgatcgtcttcctcccctttcacttttgggcagatcgtctggtccaggagcaggtcaaccaggcctatagtatccttttccatcagactgtccagaagaaaactgctggtcccctcagacatgatcgaatccagcccagtaagcaacaaatctttccccggacattcactccacatcatctctaattggtcatctgtaaaccttatcttcagctgacgggtagacgcctcctctataaaagaaaacttgagcttcagcatcgtgtgcccatcctcgtcataggctgcctgtcccttgactgccaccagataaggctccccgtgcatatcaagttccgtgatcttggcttccttccatcccacttccatcatgctggcttttttgccttccctgaaacagaaataaaacttctggtcttttactatgaatcctacttcactgatcccgtctgtaaagttgttatgaaagacctgcatgatcagcggtaggatgcccacatgctgtttctccagcttatagaaacgtccctctgtccgggagatgagtttttttctcttgtagctctcgcttccataccaaagcacttttttaagtcctgcgcaggagaccactggaaatctggtatcatgaatgcctgttttcctctggaaattctgaagcttatgataagcccagggattcttcctgacatgttcctccggaataaagtctccttcaaaatactttgcaaccgtatctgacagcaaagaagtatgaaacaattcattgcttccggcatttgtgacaatgaccatgtccagatccggatataccaaaacattttgtcccagcatgccgttgaagacatagcttccgggtcttcccgccatccacatctgatatccgtagccgtatgctccaaactgttttggagtttccacatgacagacacaggcttcctcaagccactgtagcggtacaagctgacactggttccacatccccttctgaagacacagctgcccgatcttcgccgcatcctctggacagagaaacagcccccatccgccttttgtgatacccttggggcagctctcccaaaagatcctggtgattcccagcggttcaaacaaccttggccttaaataatccatcaaagattctccggttatctcagtcacgatcgctgacagcatgtacgtattcatgctattgtactcaaacttagagccagctgttccgttaaccggagaatccagaaatccccgtacccagtcattgcaggatactgctcctctttcattaaactgcaccagactggtcatggtaagcagatgttccactgtcaggtttctctgctggaagccccggatagaaaaaatactcttatcaaatatatccagcaccttatcatccagtctcagctttccgtcatcgatcaacattcctatggctatccctgtgatacttttacacagagaatgggtaatatgccataagttctccggatacggagcgtaatggcattctccgattacatatccatgcctcaggaccatgacctggtgaatgtctaccttattcaggctcaaaagttctttcatgagatccatgatctgggcagatctgatcccctgctcctcaggcgatgatctgggcagtctctgtgctgactccggcatcttggaaaatgacggcttctgcggtgtaaaatccaccttgctcgtatgttctgtattacctttgattaaattaaaaattaattccagcattgcctgctgttcttttaacataatgctgcacccttttctcttctgctatttcttctatataccatctgtttaatataatataccttattgtgcaaagcacgtccacccacagggtataaaatacgggatgccctgtgggtatgacatgttccacatgatttccgttcggctcttagaatgcctcactccaatcatgtagaacatggacgtagtgtctgctggataaggatgacagttaaacagaaggtgccatcctacgatagtttttcttcattgtcggaaggaggcctttccagagccgactggagataatgaagaaaaactcataaatttaaaaccagaaaaagcttcctgtgtataccgttctgctatgtttgaaaaaatatacaaagaattttaaaatttgtctttactttttttgaaaaacctatataatagataaaggtgacagcaagaaggccccatggtcaagaggttaagacgcgaccctctcaaggtcgaatcacgagttcaattctcgttggggtcatacagccggaacatcgtatttatgcggtgtttcggttttttaatgtttgtgtggaaaagttactcaccaaaatcctttgttgctatttaattactttgaacaatacgataatcaaaacataataattttatagattatttgacatgaatgtaatatcatataattagatacacttaagaggggtgtaactatagacttatatactaaggaggatttttactatgaaaaaaaaggcactattattaacaatttgcactctattaatttttactttgaccgcatgttcaaacaaatcaacaaatgaattttgtgatgatgactttttaaagtatatggccaaaggattagatgaacgttgggatactaaaaccccggatgacgttgtagctggaagtgaaaaacaacaagaacatttcgaaaacattgtcacaaaagaattgaatgggattcaacaatataaagataaaaagtttaaagattctgaattgcaagaattagcaataaaatatataaatcaattaaaagctcaaaaatcagctctcaaatatatgactgtgaattctaataaatatgatgacctttggagcaaagcttatgatgagcgatcaaaattaatcgttgaaataaataaaaaatacgatttgaaaataagtgatcgaaataaaaaaattctcacagagatggaaacaaacgcaaaggaagttaccgataaagaggagactgataataaagtgaaacagatggttaactcctccaaactcaagcttatttcatcagaatatggctataaagaatataaaataattttagaaaataacacgacatctaaatttacatcatttcaattagatgtaaaattaaaggataaaaacaatgttatcattgaaacccttacagattatgcaaataattgggaacctaaaactaaagtccaattttcattcagtactgacaaaaagtttaagtcatacgagttagttccttcatactatacagactagacaaaaatcaccaaaccgtttccctacatattaggaaatattgagtataatgaacttaataagacaaccggatggatggattcgactcattcgcttcggtagatatgatctaaaaatagacgtttatttggccaaatgtaccgaccccaagaagttagacctaaatgatatgtacccagaatcctagacacattaaaatttaacttaggcggaacacatggatgcttctctgtattttacaggaggcatccattttgttttagcctgaattctcttgttattatattaatctatatattcttcaactacattagaaaactattcaaacgaagaatcgtctttctcatatccatagaacatttcattttttaatcttccaaagaatgtttccataatgcaatcgtcataacagttcccttttcgtgacattgattgaattattccatggtcttttaaagaagttctataagaagtatgctgatattgccaaccttgatctgagtgaaaaaacaatccttcgactttagtgaacttttcaaatgctttgtccaacatggaatctgcacgtaaatgggtaaatgcatacaaagaattcggtggtgaaggactgcttcgttcaaaaaaataatgtatatcctttccattttaaacttcatgtggtagagttatacctatcaaccgagatctcttatcaagaactggcattatctgttggaataaacaatccaccgctcattacaaagtgggtaaatgattttagaattgctggatatgatgcactaggacctaagaagaaaggtaggaagaaatcattaaaattagcaaatagtaaaaaaatcaccatcttctgaatcatcacatatggatacaagtgctgaacacgtaaagcaactagaggatgaagcacgtctgagagaatagcaagagtcatccacagcctccgaagagacttcaaattgaaaggcattctctcatatacaggatttccaaaagctacatatatgtactggcagaagcgatttaaaagagaaaatccagatgctgtactggaagaccttattcttgaaattcgtaaagacaacaaggactttagttacccaagaattcatggcgaataaggaaaacgaggcatggacgtaaataaagagaaagttcaaagaatcgtgcaaaaacttggacttcaagtgacgccattcacaaggaaaagccgtaaatatagttcatatgagggaacgataagacggattgctccaaacaaaatccaccgacgttttaacacttgtataccacatcaaaagataacaacggatacaactgaatttaaatattataacgtagatgataaaggacgaatgacaatacaaaaactatatccggatccatttatggatatgttcaattcagaaataattcgttacggcattgataagagaccttcagcacagaatgtaatgaatgttctaaatgaagcaatcgaaatcacatctgactgtgtctatagaagaatttttcactctgatcgggggtagacttatcagatgaaagcatacagcaacacgttaaaatcaaacagtatataccaaagtatgtcgagaaaagataactgctatgataattccattatagagaacttctttggtgtaatgaaacaagaaatgtattatggctgcgtgtattacagttatgaggaatgaaagaatgcaatagagaaatatatagattattataataatcaaagaattaagcaaaaactatcttggatgagtccagttgaatataggctcagccaagtagcaatcgagtaggaggaatttctcttaattgagaaattccgacctctcacaccaccgtgcgtacggttccgtacacggcggttcaatcaacttaacaaaaaaaacacctttcagtgtagtaatctaacattgagaccaatccaaatgaggttaatctcttgttgcttattgctttctgtaaccatccattatgggcaggtctcgcatattgatcgccacaataagcgattttaaatgctgc

SEQ ID NO: 15 - DNA, 75012 bp, Anaerostipes rhamnosivorans
gaatgattttgatgttatgaatgctttacctgtttctattatattatttatgatttgtattataaatttatcagtagctttatttattaatgaaacataataaaagtaattttataaagaaatttgcacgtgactttcttttgacactctgttttgttaaaatagcagagaatagatttcagactgtgttgtttatcataaaggaggcaggtcatgtcagatcaaatcaacggacaactgttccgttttatagaaaaaagtccgtgcagctattttgctgcagctcagataggaagagagctggtggagaacgggttcctggaactgaaggagaaggaggaatggaggatccaggagggaggaaagtattttacccagagaaacggatcttccgttatcgcgttttgtgtgccggagaaagagttcaaagggtttcacatcaccgcgtcccatacggattctccttcatttaagataaaggaacacacggagatccaggtagaaaagcactatacgaagctgaatacggaaaaatacgggggaatgttgatggattcctggctggatcgtcctctgtctgttgcaggaaagcttgttgtgagggaaggggatgatctgaaagaaatgctggtccagattgacagggaccttcttatgatcccgagactggcgattcatatgaaaaggggagcagaggatgaggccttaaatgcccagatacagatgcttccgctgtttggggatgaaaatgccgggaacacatttctatctgaggccgcttctgcggctggcgtggaagcgcaggatattctgggaatggatttatatttatataaccggatgccgggcaccatatggggagccaaaggagaatatctgtcagcgccaaggcttgatgacctgcagtgtgttttcgcatccctgcaggcctttgtcaacagcgagggtagtgagtatatgaatgtgtactgcgcgtttgacaatgaagaggtgggaagcggaacaaaacagggagcggggtctactttccttatggatgtactgttccgcgtcaatgaagcgttggggaggacttcacagcagtaccgcatggcagtcgcggacagctttatgatctctgcggacaacgctcatgccgttcacccgaatctgcctgcaaaagcagaccttactaaccggccgtatatgaacggggggatcgtcatcaagtacagcgccaatcaaaaatatacaacagatgcatattctggagcagtgatgaagcatctctgtgaaagggcagaggtaccgtatcagacattccataaccgttcggatctgccgggaggatccacccttggaaatatcctgaccggtcaggtgtcattaaaggccgtagatatcggtcttgcacagcttgccatgcattcttcgtatgagactgcagggacaaaagatacggaatatatgatcagagttttacaggagttttaccgcagttaagggaggttggttcagtgaaacagcataacaagatccagatgtctgaggcctttcagctgggagcggtcctggcggttatcggcggttttctggatgcgtacagttatcttctgaggggaggcgtatttgccaatgcacagaccggaaatattgtgctgcttggcatcagtctgcaaaaaggaaagtggcagggggcagtccactatgccatacctatccttgcctttgccgcaggggttattgtcgtggagatcattaaaaagtattttaaacaatacccaaagatccattggagacagatcattgttatgatggaagctgtgttgatctgcctggtagcactgattccttcgggggacttggatatgatggccaatgtgatcatttccttcgtctgcgccatgcaggtggagacctttaggaaggtccacggaaatgcctatgccaccaccatgtgtacggggaatttgagaagcggcatggaaatcctgtttaaatacagccagacgaaggaccgtgagctgagaaacaagagcctgaaatattttgggatcattttgttctttatcataggggcggcactgggtacggcggcggggcgtattctttcccacaatgcgattctgatctgttccgcgctgctgctggtagtattttttatgatgttcatggaaacaaaaaaaattaaatgagaatctgttgaatatccaacagattaaaaagatccactcttgtatactcaaggagacacaacagaaatcagtatcaggaggatagatcaatggatcataaaatgttttgttttcaatgtgagcagacggcaggatgcagcggctgtacaggcgctgccggagtctgcgggaaggatgcccagacatcagagcttcaggatcagctgacgggagctctgatcggcctggcgcgctcgtctgaaggaaaccagagaacagaaagtacagacagagctatgctgtcaggtctttttacaactgtgaccaatgtgaattttgacccggagaccataaaggaacagatcgggcttgtgcacagagaaagagaagcgctggttcctctgtgcagcggatgtgcatcgtcctgcggcagaaacgatgactatgatatggcagacctatgggaggaacaggaagatatccgttccttaaaatccctgatcttatttggattaagggggatggcggcctacgcctatcacgctatggtgctcggctattcagacccggaagtaaatcgatttttctatgaaggaatggcatcgatcggatatgacctgccccaggataagctgctggccatggccctgaagctgggggaagtgaacttgaggtgcatggagcttctggatcaggcaaacacggaaaccttcggccacccaagcccggaaaccgtttcttttaaagtggaaaagggaccgttcatcgtcatcacaggccatgatctttatgatctgaagctgctgcttgagcagacaaaggatcaagggattcatatttatactcacggggaaatgctgccggcccacgcttacccggaactgaaaaagtactctcacctgaaagggaattttggcactgcttggcagaaccagcagaaggaatttgacagtatcccggcaccagttctgtttaccaccaactgtctgatgcctgtgaagccttcttatgcggaccgggtatttaccacagaggttgtctcttatccgggtatggtccacatcggggaggacaaagattttactccggtgataaagaaggcattagagctgggaggatacagcgaggacagagaatttaccggcatcaacggcggaaacagtacagtgacaggcttcgggcataacgctgtattgtccgcggcagacaccgttgtgaacgcagtgaaggacggggatatcagccacttctttttggtaggaggatgtgacggggcacataaggagagaagctattacacagatttcgtgaagcaggctccaaaagacagtgtgatccttacattagcctgcgggaaataccgctttcatgatatggatctgggacagatcaggggactgcccaggattatggatatgggccagtgcaatgacgcctacagtgcgatccgcacagctcaggcgctggcagaggcgttttcctgcggcatcaacgatctgcctctgactctggtcttatcatggtatgagcaaaaggctgtatgtatcctgttgaccctcctgcatctgggaatgaaggatatttatctcgggccaaagctgcctgcattcctgtccgaaggcgtgttggatatccttgtaaaggaataccggatacacccggttactgatccggaaagcgatctgaatgaaatcctccattaagatatggagcagaaaatagaatcatacatgaaacagaaggaagaaccttaacacaggagcttccttctgtttttttaccaacatttaacatgatgttcaaatgaattcaaactttcggtgctagactaagccttgttcaaagagattgagtcgatgaagaaaggaatggaagtatatgctgaagttacaaaatataaaaaagtcttatgacggcaccactgtgctggacggaatatcactggagatcccggatggagagattgtatcaattttagggccttctggctgtggaaagactacgcttctgaatatgatcctggggatcacagaaccggacagcggaagtattgagtttaatggagaggatatcacagactctccgatggagaaaagaggatttaatatcgtgttccaggattatgctctgtttccgaatctgaatgtataccagaacattacatatgggctgaaaaacaagccggatatttcttccggggaggaagtggaggaattgatcggcctgctcggcttgaaggagcatcttccaaagaagatcgaacaactctcaggagggcagaagcagagagttgccctggcaagaactctggttatgaaaccgaagattcttcttctggatgagccgttgagtgccttggacggagtgatcaaggaatccatcaaatataagatcaagaccatagcaaaagaattccatctcacaacagtgatcgtgacccatgatcccgaggaggcgctgacgctttcagaccgggtgctgatcgtaaacgagggacggatttcccagtacagtgaaccggagcagatcgtcaacgctcctcagaatgattttgtgaaaaacttcattttaaaccagctggagatcaaaaagaacaatatctttaccctgtttaagaatcagctgaatcttcagcctggaaaggaaagccttgtgtcgtaaggcggtaaatcgaagatgaaacatagaaaagaaaaagagattaaaataatatttgccggaatcctggccattttcctgtcatttttggcaatccccatgattcagcttcttttgaagtccgtcacaacagaacagggtgctctgactctgcagaattttaagtccgtcttcacaggaaaagacttctttggaattctgaggaacagtttcggcgtggcagggcttagtgctgtgctaaccacactgctggcattttttctggcttatacgatccactataccaatataccgaaacagatcaaacggttcatcaagacagcggccgttcttcccatgtttcttcccaccatcacctacgggtttgccatcatttattcttttggaaagcaagggctgctgacccgcctgttcggacatcagctgttcaatatttatggtttgaacgggctgttgatcggctacgtggtttatacgctccctatttcatttatgctcatcaacaatactatgggatatatcgataagaaatatatggtcgtctcaagggtcatgggggacagcgcgtttgccaattttaaaatgactgttcttcgcccgcttttgggcacgctggcggcatctgtgatccaatcgttctttttaagctttacggattttggtatcccggcggcagtgggaggaaagttccagacggttgcggcgctgctgtacagtgagatgctcgggagcatcccaaatttccagaatggggcagtggtggccgttgtcatgctggttccgtctgtgatcagtatcactgttttaaagatcttggaaaaatatcagatcagatacaacaaaatttcaaatatagaattaaagaaaaacaaagccagggacgtcctgtgcgggggagccggtatcctgctgacgatcggtgtcctgtctatattcgcggttatctttgtgatcccttttgtggaggaatggccataccggctgagctttactttggataatttcaaaagtgtttttgaggatccgaacctttccaatgtctatacgaattcattatttgtggcagcggcaacggctgcactgggtaccctggccgcttatggaagcgctctcgtgacagcgaggagcaaaataagcgccaaagcaaaagacgtgatcgagggcattgcgttggtgacaaacacgatccctggaatggtgctaggccttgcatttttgtttctgtttacgggaaccagccttcagaatacatttttgctgattatcgtctgcaacgtgatccactttttttccacaccgtacttgatgatgaaaagttccctgggaaaaatgaatgcgtcatgggaaaccacagcgatgctcatgggagacagctgggccaagacgatcctaaggatcgtgacacccaatgcactgggcacgatcatcgaggtgttcagctattatttcattaacgcaatggtaacaatcagcgctgtgatctttatcgtaggggccaggacaatggtgatcacaacaaagatcaaagagttgcagtattataacaaatttaatgaagtgtttgtgctttctcttctgatcctcgctaccaatatcataggaaaatttatttttacaaaacttgcggggatgacagaaagaggcacaataaaacagttctttaaattacatattagaaaaaataaggagagaagtttatgagaaagacatggttaaaaagggcgtccgtgatgtgtatggctgctatgctggcagcgacgggagtttttgcctcaggatgttccagtaaaaaacaggaggatcaggttgtgatctattccaacgcagatgatgaggcagtggaagcaatgaagaaagccctggatggaaatggatacgaaggaaagtacattcttcagaccttcggcacctccgaactcggagggaagctggtggcggaaggagggaagatcgaggctgatatggtgactatgagtaccttttatattgaaagtgcccaggataagaataagatgtttgccgatcttacatttgaccggaatcttcaaaaagaagatgacttccagaagtatgaatcaccgatcaccgcacaggagggaaccttgattttgaatacagaagtcatgaaggagaaaaagctcccgaaacctgcttccattaaggatcttgcaaaacctgtgtataaaggttatatctctgtgacggatgtgaaagcctcatccaccgcatggcttttaattcaggggctggtctctgagtacggagaaaaagaggcaaaatcaattctccacgacatttacaagaacgcgggagaccatattgaagattcagggtctgctccgatcaaaaaggtacgtgcaggagaagtggctatcggatttgggcttaggcagcaggctgtagcagacaaaaaggacgggcttccaatcgactatgtggatccgaaagaaggaaatttctctctgaccgagtgtgtggcagttgtagataaaaaagacagcgacaagaaaaaactggctcaggaaatggcggaatgcatcatcaaaaaaggaagagctgacttgatcaagacttatccaatcccgatctacaacggcgagaaagaatccagcgaaaataaatcaggaaatccaaaagtatttaatgaaaaacttaccttggatctacttaaaaaacatcaggaattatcagaaagtgcaaaataagaggaaggtacaagatgaaccagtataagttattaactcccggaccgctgacgacaacagataccgtaaaaaaagaaatgctgtttgaccactgtacatgggatgacgattacaaaaatattacacagaagatcagaaaacagttgctttccctggctcatgtctctgaggatggatatactgccgtcctcatgcagggcagcgggacctttggtgtggaagctgttatcaccagtgtggttgatgagaacggtaagcttctgatcgttgccaacggtgcttatggggagcggatggagagcatcgcgatccatgccaatatttcatataagatctacagggaagattaccggaaggtgccttctgcggcagtggttgaaaggatgctgagagaggatccaaaaatcactcatgtggccatggtacacagcgagacaacctcagggattctcaacgatatcgcctcagtggcttctgtggtgaaaagacacgaaaagacattgatcgtggatgctatgagcagtttcggaggcgtggatatccaggttggaaagcttaacatcgactttctcatcagcagcgcaaataaatgcatccaaggtgtgcctggcttttcttttatcattgccaacaaaaagaaattgatcaacagcaaggggaaggccagaagcctatccctggatttgtatgaacaatgggagactatggaccgggacggaaagtggagatttacctcacctacccatacggtgctggcatttgccaaagcattggaggagcttgaggcggagggtggaatcgggaaacggtcagagcgttacagggaaaacaaccgtatcctgatcgagcggttccgagctatgggaatgaaaccgtacattgacagcaggaaccaaggaccttttatcacaacattttattatccagaagatgctgactttacgttcagtgagatgtatcattatatcaaagagcggggatatgcgatttaccctggaaaggtaacagaagctgagactttcaggatcggtacgattggagaaatctatccagacgatattgagaaactttctcagatcatggagcaatttttaaaggagagaaaaggatgaacagacgtatagaagcagtgatatttgactgggcagggacgacggtggactatgggtgctttgctccggtgcaggcttttgtggaggtattcaggcattttggtattgagccaacgatggatgaggtaagggaacctatggggatgctgaagatcgaccatatccgcactatgctttccatgcccaggattcatgatctgtgggtcaaagagcacaaaacggagccttctgaggaacacgtaagacagatgtatgatctctttgagtctaaactgatgggaatcttggaacagtttacaaaggtcaagccatatgtgctggagacggtggagatgctcagggaaaaggagatcaagattggttccactacaggttataccgatgaaatgatggaggtagtagtaaaaggagccagggaacaggggtatgagccagacgcatggttctcaccggattcaacaggagggatcgggcggccgtatccatatatgatatttaaaaatctggaagccttaaagatctcatctgtgaaaaatgtagttaagatcggtgatactgtttctgatataaaagaggcgaggcatgcaggtgtcatttctgttggaattgtggaaggaagctcagagatgggactgacggaagaagaatatacagacatgacagactcgcagagggagaacgcctgcaggaaagtgaaggaaacattcaaaaatgccggcgcccactacgtgatacaaaatatgtcgggattagaggagctgttgaaaaaactgacccaataaaggcttttatgttttcctaaggattgcacataatactagaatatgaaataataagtcgtgcctatatagggatgccctattgggtatggcttattttattacgtttagttttatggaaaggaatacttattatggaagctttaaaatgggcggccgccggaacaggttttacgtttttgatgactgcactgggcgcggccactgtatttttcttaaaaagtgatattcacgcaaatatgcagaggatttttcttggatttgcagcgggagttatgatcgcggcctccgtgtggtcattgctgatcccagccatcgaggaggccaaagccaatgggcagatcggctggatcccggctgccggaggttttgcgctcggaggagtttttttgcttttgatggaccggctgatgccgcatctgcatctgggggagaaaaatccggaaggtctttcctcatcctttaaacgcaccacgctgcttgtgctggctgtcaccttgcacaatatcccggaaggtatggcggtaggtgtggcctttgctgtggcaagcggacacggaggcgtgggattcagcggcgcggtagcgttagccgttgggatcgggattcagaattttcccgagggagcagccatctcactgccacttagaagagaaggactttccagatttaagtcctttgtctatggagcactgtcagggattgtggaatttatattcggtgtgctggcggttcttgtggcaggaagacttggcacctatatgccgtggcttttatcttttgcggcgggagcgatgatctatgtggtggtggaagagctgatcccggaggcccatttgggagaacattcccatacagggacattgggtgttatggcgggatttctgatcatgatgatcttggatgtggctttgggatagtctgcattggcttttaggaaaagagaaaatatctcagtgagatattgatttatagggaatttcagaaaatcttgtgaaataaaaacaggcgggattttatctcccgcctgtttctgtatattcttccggatccacatctatggtatccttaaatacctgctccacaagatagcagtattcattatattcatggaattcagagaattcttcgaaacattcgatcatactcttgtaataccagccctgcatattcttatctttcatattaaaacgctgccacagctcgtcccccagaagtttataatctcgggcaagtgagcggacattggccagcttgtcccccagagcgataactttggcggggcgtttagcccgatgttttaagaaattgatcgtatggctctttctttcgatccaggacttgcttttatcttcactttccatcaggacataatccgctactttatccccgaattccctgcgaatatcttctccggtcacatcccggcagtcttcgataacatcatggagaaccgcagcgcacatcatctcttcatctggcgtgataccggcaacgatcgaggcgacttccagtggatggatcataaatggaatatttgttcccttacgcttctggccggaatgggcattcgttgcaaagataattgctttttcaaacatgggtttctccttttttgcggacaattttacatacttatcataaatcattttcacttcttggtcaatgaaggaattttccactttgttactttaaagtgacgatgtgttgacttttacccaacagcacggtaaaataaaccttatcgtgtgaagcacgcccacccgaagggtatggaatacgggatgccctgcgggtgaaccttatcgtgcgaagcacgcttacccgaagagtataaaatgcgggttatcatttaatacaaggagatctatatgtcaatagagacaaattttacaatcggttttattgggcttggactgatcggcggttccatagctaagaatgtacgccgtgtatttcctaattacacggtgatcggatatgacacagacaaagaagcgcttaagaaagcagttgaggaaggaattcttgaccgggcggcctctgagcttaaaagtgattttgccgagtgcagctatatctttttgtgtgcaccggtacaacataatcttcagtttttggaacagctgaagccatatattaaagaaggctgcattctgacagatgtaggcagcgtcaaaggcggaatccataaaaaggtcaaggaacttgatatggagtcctgctttatcgggggacatcctatggtgggatcggagaaagccggattttcctacagctctgaccgtctgattgaaaatgcgtattattttattacgccaaccgaggaggttagtgaagaaaaggtaaaggaatttactgcttttattgaggaattgggggcactgacgattttgctggacgccaaacgccatgatgcattcacggcggccatcagccatgttccgcatattatggcagcagaacttgtacatacagtgaaggatatggacacggaggatggtatattaaaacagctggcagcaggaggatttaaggatattacacggattgcatcctcttctcctgtcgtttgggagcagatcagcctttccaataaggaaaatataaaagagatccttgagcagatcaaaggcagtattgaggggatgatcgatgccctggacagggatgaccacagctatttaaacaagtatttcaaagaggcaggggaatacagggaaacggttcctgacagcgctgtgggactgatggagaaatcctacgagatctttgtggatattccggatgagccgggaaccttgtctaccaccacaaccctgttggcgttaaataatatcagtattaaaaatatcggtattatccataaccgagagtttgaagagggagtgctaaagatcatgctctatgatgatgtctcagcaaaacgcgccagggagatcctgcaggataaaaattacagtgtatatgaaaggaactgacaatgaaacttaggaaagtaaaaggactaaatggcaccatagcaataccaggagataaatccatcagccacagggcagtgatgttcggatctctggcaaaaggcaccacccatatcacaaactttctctcaggagccgactgccttgcgaccattgactgtttcagggcaatgggagttgagattgaacaggacgggaccgaagtcatagtccacggaaacggtctccatgggctgaaaaaaccggaaaagcagctggatgtgggaaacagcggcaccaccacccgtctgatttctggtatattaagcgggcaggattttgatgtcacactgtcaggggatgagtctttaaataagcgtcccatgggacggatcatgaagcccctctcaacgatgggagcggacattcaaagtgtcaacggtgacgggtgcgctccgcttaaaatcatcgggaagcctttgaaagccgttcactatgattcaccggtggcatctgcccaggtaaaatccgccgttttactggcaggactctatgcggacggaaagaccagtgtcacagagcctgctttgtccagaaatcatacggaactgatgcttcagtcttttggagttcaggtgtcatcccagggaactaccgcggaggttaccccgccagcagaaatgaccgctgctgatattgttgtgccgggagatatttcttctgctgcattttttatcgctgcaggacttgtgactccggattcctgtattaccttaaagcaggtagggatcaatccaacgagaaatggaatattaaaggtatgtgaagctatgggggcagatctcgtactgtccaatgtaaaagatgacagtggagagcctacggcagatatcacggtaaagaccagcaatttaaaaggaactgaggtaggcggggacttgattccggcattgatcgatgagatcccggtgatcgctttgatggctgcgtttgcgcagggagagacggtcatcagggatgcggcagaactcaaagtgaaagaatccaaccggattgaccttacggtagacaatctggtcaagatgggtgtggacgcagaggcaacagaggacgggatgatcatccggggcggaaatccgctcaaaggggcatccatccactgcagatatgaccatcggattgctatgacattttccattgcggggattaacgcagacggagagacggtgatcgaggatgcagagtgcgtggacgtatcatatccaaccttttatgaacagttacagatgctgtctggacaataagattctctcattgacaagctggaaaattcttcatacaatggagacagcagcgaacaaaacatgagagaagcatatatgggaagggaaggatcgcagaacatgaacgagacaagggtgagattactccgtctgacggcatggctggttgccagcgccatgtttgtcagtctgagcagtgaagcggtggtgcgggcagcacagagaagaaaccaggttgcaaaggttcagccaaagaccacggtgactgagacagcaagacaggcgaaaaagacaacggtatcaggcgaatacaaggcattttggttttctttttacgattatgatgagtaccgtgacgcctataaaaagaacaacgcggcaaacttcaaaaagtattttaccaaggtggtcaacagaggaaaaagtcttggcatgaaccgtgtcattgtacaggtaagaccgttcggcgatgccatctacaagtccaagtatttcccttggtccaaatacatctcaggaaaacagggcagaagtccaggatatgatccgttaaagatcatggtgtccgtggctcatcaaaagggcatggccatcgaggcatgggtcaatccataccgggtgaccaaaggcagtaccaattacaataaactatccaagaacaatccggccagaaaatggcatgccaaaaagtcaaccagaaggaatgtgttatcctacgggggaaacctttactacaatccctccaaaaaagcagtccagaatctgatcgttaatggcgccaaggaaatcgtgcagaagtacgatgtggacggcatccatatggatgattatttctacccaagttttacaaaaaagaacgtaaagaaagcatttgacgcaaaagagtacaataagtcttcctacaaaaagaagaaaaaaagcatttatacctaccgcagggcccaggtcaataatctggtcaaaaggatgaaaaagaccattaagaaggtagatccgaatgtgacctacggcatcagcccggcaggaaatatcgacaacctgacaagcaagtattcatattatgtggatatttataagtggctgaattccacggcttatgtggattatatctgtccacaagtatattggggattcaagcacccaaccgcagcctttgacaaggtgacgagacgctgggtaaaagcagcgaaaaagaagaaagttaaactctacatcggaatcggtgtttaccgcgcaggccacaatgtgggccagaaccgggcggagagaaaagagtggaagagcgacaccaaggtgctgaaaaagcaggtgcagtacgcaagaaagtacaaggtggacggattcgcattctttgattaccaggatttaaagagcaaagccagcagaaaggctgtgaaccagctgaaaacagtcttaaaataagaaaccaaagaaccgccagggttctgcagataaagaagcagaaccctggcggtttttgtatgagttattcaccactatttccgtcgcgcttttgaaatgcgctcctccaatagtggtgaataactttcgaaaagtgcctcctttttgacagaagcccttctccagcagacattacgtccattttcaccagttctccggcttgctgtctcaaggacgtaagattttctaactttcagcaaagcctcttcggcggcccgttcggaactcgctgacgcgggggcagcctcactgcgcaatgcgcaccgcctacgagtctttacttcaagaagaaaaactaacgtcccttcgaatgcaaggcctccttccgacaatgaagaaaaactatcgtaggatggcaccttctgtttaactgtcatccttatccagcagacactacgtccatgttctacatgattggagtgaggcattctaagagccgaacggaaatcatgtggaacatgtcatacttatatttctgcaatgagcagttcttttagatcattttgaatgctttcggcatcttcctcccggatattagaatcagtgatcagcaggtcaatatctcggattgagttgccctggaaggctttgtgaaggccgattttagaagaatcaagcatgagaaccttgtatccttccatttcgcagatgatcctgattgtgctcatctggatttcatttgcgcactgcatttcgtgattgttgtgattgtgaagacccaatgcagaaaaaaatattttttctgggtaaattcttttcatattttccagtgtcagatttccggtgagggagtagttggaggtggagacctctccttcaagagcataaacacgggaaatattaggccgtggaccatagtgaatgattgccagatttggagtaaagaccgttacattttttgcagtgatctctttataaagcaaaaaacaagtggagccggtatcaaggtatactgtgtcattgtcgttaatcagcttagctgcagaacgtacaatggcatttttttctttctcgttcatcttttcgcggatattaaattttgtgatccggtcatccgaaagggcacgggcacctccatggatgcgttcgatgagcttttgttcatctaaagtagagagatcacggatcatcgttgattttgagacgtggaattcatccagcagctgtgtgatcggtacatactcataggttttaatataagataataaatcatttaaacgtttttctttttttgtcataaaactttcctttctaagcaagaaatcccaagatatataaggatcaaagtatagatgatgttagttctatagtaatgaaatgacacgaaaatgtcaatatcttattcagaatgatatctaaatatcaaaaaaatgaagaatttatttaaaaatagttgacaaagtacgactgtgaaggtaatattgagttaaacaagtcattaaaatgacaaaaacatttcaaaattatgaagtataagcataatggagacatcaatgataaagaaatgaaacaatagtatcaaaaagatgggaggtgaatgtatggctagaaaaatgaaagcaatggttgcctgtggaagtggaattgcgacttctacagttgcagcaaacgcaattcatgaaatatttcaggaattggaaatagacgtagagatcataaaaggaactgtgccagaaatttctgaaaaggcagatgagatggatattgtgtttgtgacaaactgctatcgggaagagataccatgtccagtggtcaatgtgacagcatttctgaccgggattaaaaaagacaaaaagattgcagaaattaaaaacatcattgtaagtctgaatgaaaagatcaacgggtaggttaaaaaacaaaggaggattacatggaactgattaatacaatagtaaagtttatttcagatgtaggagcttctgcgatgctgccgtttgtgatcgcagttctgggcctttattttagggtagggattaaaaaagcggttagaaacggactgatggtcggaattggttttctaggcatcaatacagctctggggatactcaccagcgctatgggaaatatctcaggatactaccaaagtcttgggagcggctttacagtcattgatggcggctggccggcactgggagcagcgggctggtctactccatttgcgatgctggtgatcccattgggatttatcttgaatttcatccttgtaagattgaggtttaccaaaacattaaacgtggatctttggaattactggcattttcttatcactgcatgtatggtctattatcccatgagactgggcggcgcatctatttttgccgcggggcttgcagggacggtagtcgcgcttgtatgttcggtcattgtgctgaaagttgccgatgcaacggcagacagctggcaggattactttgggcaggaaggaacagcggttaccacacaatttgctatggtaacggcataccccatcgctaagatcacaaactggatcctggaccggatccctaaagtgaaagattccagattagacttaaatacattgagtaaaaaactgggcattttcggagatacagctgtgatgagtttcgtgattgggatcatcctatgtctcatcacaaaacagtctgcggcaaacacactgaccatcagtatttctatagcaggagcaattgtactacttccgaaaatggtagcggtactgttagaaggattaggccccatcggacaggctgcctctgaatttatgcagaaaaaactgggagacaagtatgacattaatattggaatggatgtggcactgggacttggagacacttgtgcgatccagacagccgtaatcatgattccaattaccatagccttaggattcatagttccgggagtaaacttcttcccgatcggtttggttggaggaatggtctatacaacaacagtttcttcctgggcatcaaaagggaatgtactgaagacattaatttcagcagtggtagtcacagtatatgaaatgatcgctatgagctttatggcaggattgacgacgcttgttgtaaaagcagcgggcactatggatttgtcaggcgggactcaggtcgtaggtaccgtctgtgacaccatctataatgtgatcattgccatcattgcaaaacttgcagggttgatttaggcaacaattatttattgtatgcagataaatatttatcaataaacatttaaattttaggaggttaagttatgagcgaaattccagcaacaatgaaagcagcattatggtacgcacctttggatgtaagatttgtggatgttccggtaccggagattgatgataaaggtgtattgatcaagacaaaggttacgttaacttgcggaactgatgtgaaaacatataaacgtggatatccaggagaaaagccgggtgcgacttttggacatgaagtttcaggggaaatcgtaaaggttggaaaggatgtaactggattcaaggtgggagaccgtgtggtaacacacaatacagcaccttgtggaagctgctattactgtaagatcggcaggaatgacggagaatgtgaatctctggtgaggatcaaagggggacattcccagtatgtggcggtgccggatcagatcgtaagaacgaatctatttcatattccggaaggagttccttacaaagcggcggcattggtagagccattctcctgtgcagtttacggcgctgacatgactcctgtgcattttggagattatgtagtgatcttaggagcagggccaattggccttatgatcgcaatgctgatgaagaaaaagggagcaaaggtcattcatgcagactatagcgcagaacgcctggaagtcagcaaatcgttgggaactgatattgtatttgatctgaacggtgtggaagatccggtgaaagagatcagggctttgactccggatggaagaggcgcagattctgccatcgatgcttccgggcagcctgcggcatgggaaaatgcaattaatattgtaaggaaagccgggtttgtcaacctgtttggaggatgtaaagcgggaacaacgatcaccgttgatacgcacagaatccactatgacggagtgaccttgacaggcttctatcataccacaccaagacatgtacagatggcggttgacatgatcatcaacggagagattccggtggatacctttgttactggtgaatatccttgggaacagctgattgatgccgtagaagcacacggaagacaggaagggatcaaaaatgcgatcaactgggattagaaaaggaggaaaatgatgtctgaagcattaaagagagcaaaggctcaagttgtccgtgcctgtaagatcatttcaggaaatggttatgttcttggaacagcgggaaacgtatcttccattgtagaaggggaaaacctgtttgtcatcacgccatctagttatccttatcaaatcatggaggaaaaggatctggttgtggcggatctggatggaaatattgtagaaggggataagaaaccgtcgattgagtttaccatgcaccggggcatttacctggaaagaagagatgtaaaagcaatcgtccattcgcattctccgtatgccaccacagcggccagtgtagaagggatcacccacattccggcagttgatatagaagcggccttcggcctgggaggtgatatggagattgctggcttcgcccctccggggagccccgaactggcagaatttgcaagacaggcaatcggagaaaaaggcggtgtcctgctggcaaaccatggagccatcggcgtagggaaaaatatggatgaggcgctgctggccagtgacaacattgaaagaaactgcaggatgtttttaaacattatctctgtgggaaaagtaaaacctatgccagcagattttatggagttttcttcttccatttttaaagaagtcagcggtatttcaaaatagggaaatacatagaatgaggaatgcttatgatagaaaatgtgtttgtgatagaaggagatgcaggaaacaaggaagaggcgcttatgcttaccttccaaaaattatacggggagggctgcgtggaaaacagcttctatgaaggctgtatccagagagaaaaaaagttccctacaggattggaaactgagattccggtggcgattccccatacagactccattcatgtgaagtctccggcagtctgtgtattaaaactgaaaagaccggtagctttctctctgatggaggatgattccaggcagatcaaagtggattttgtatttaatatggcactgaaatcaaatgacgaccagctggggatgctgaataaaatcattggtaccgtccaaaatggggaattccttcaaaaagcaaaaaccatgtcctgtgaggagctggaagctgtgcttggcagcgagtggatcaaataggaaaggagaatcatggataattttacattctacggtcccacgaagttttgttttggaaaaaattctgaacgagaacttggaactttgctaaactggatccagtccaggaaagttatgatctttcatatgagcggaccagaattaagatcaggaattcttgaaagagtaaaggagactctggatagagaaggaattgattatattgaaatgggcggtgtaaaggcaaatccaaggcttgattatgccttggagtgcatagaaacagcaaaaagggaaaaggttgattctgttcttgccataggtggcggaagctgtattgacacggccaaagccactgcagcaggagctttatgtgaagacgacttctggtcccattttaaacagaatattcctttcaccaaagcgcttcccattggagccatcgttaccaaagcggcatccgggagtgaagggtctgaggcatgcctgttaaaagatgaagaacgtaatataaaagttggcctgcacagcgaagtgttccggccaacgtatgccatcgagaatccggagcttacctacagtctcccatcatatcagacggcgtgcgggatcacagatatcatgatgcatgtcattgaacgttattttacaaatacaagaggaacagaacttaccgaccagctaagtgaaggagtgctgcggacgatgatcaagtacggtccaatagcattgagagaaccggatcattatgaagcaagggcagagatcatgtgggcaggagtcatcgcccataatgatatctgtggagtcggaagagaaattgatctggcaagccatatgatacaggatgtgatcggaggattgtatgattctgcccatggggcaggacttgcaaccgtgtgcccggcgtggatgaagtatgtatatacacatgatatcccaaggtttgtgcggtatgcgacagaagtatggaacgtgagtaatgatccgtttgaccaggaagccgtggctttggaaggaatcaaaagaaccaaagagttcttccagtcccttggcatgccggtgacattggaggaacttggtgtcaatgaaaaagatatggactttctatgtggaggccggctggtaggacattttgtagaacttgaggaaaaggatatcagaaacatttacgagcttgcaaaagggtaatggagaatcacgatgaaagtgttaaagagaatcagcagcaggccgcaggatatgaagtttttggacataccagagcctgtgatcccaagaaaagactggatcaaggtcaaggttgcctacgcgggaatttgtggttctgatattaaaatgtttcacaaggactgttccgaagctgacagcaaattaaagccgcctgtgatcccgggacatgagtcaagcgggattgtgtgggagacgggcagtgaagtgtatcatgtgaaagcgggggaccgggtggtatgtcatacgatggcagacccttgcggatgctgcgaatattgtctgacaggaaactggggactctgcagcaaaagaaagggtatcggttccgacattaacggggctttcgcagagtatctgatttgtccggcaaaaaatgctatcaagattccagaccaactatctctaaagacagcagctttgacagaaccattggcatgttcgatcagaatgatagaagaaataggaaacataagaagaggagaaacaatcgttatctttggcccaggtcctattggggcatgctgtgcactggctgcgaaagcagccggagctgttcccatgatggtgggaacggagcactctgggcatcgtatgaagattcttgcagatttagggatccaatgtgttacaaatgatgaaaacttagcttacagggtaaaagaaatatttggagatctggcagatgccgcagtggatgccgtgggcagtgaaaaggtttttcaccaggcattccaggtggtaagaaagcttgggagggtcatcatcggtgcggcagacgaagtaaataaggattattctgttaatatgcagaaagtattcagtcggcagattaagattctgccggcatgttcctccacaccaaagggctggcatgaggccgtcaatatgcttaagcagtatcaggatgaatttgagaagatcttaggaaaagagtatccgctgcaaatgtggagagatgcatttcaaaaggcagagagcagggaagattttaaaattatgctgagaccatgacctggctctgtaaaaaagaactaatcttgagtttagggggatttctcctgtggcttcgctgttaaatttgtattatgatagtaatatcaatcagcgtaccgtcacaaaggaggaagagaattgaacagaccagtagaagccatggtagcatgcggaagcggaattgcgacttccacagttgcggcagagcaaattcaggaaatctttgatgagatggggatcagggttaggattacaaaatgttctatcacggatatccctttgaaacaggatgatatggatgtgatcttcgtgacaaataattaccgtgaaaaggtgaagtgtcctgtgatcaatgtgacatcatttattacaggaatcaggaaagacaagacgatagacaagatcaaagaagttctgcttgagattcaggaacacaaataatgatatgttacggggctgtcgcactaaatgatggaatgaatcatcattagtgtggcagttccgtttttgtctttttcgggtttttatattgacttattatagaaaaaagcatattatatatcatatagtattaataaatttataatatgggagcgtgtctatggtatttaatacaggagctgctttgctggacgcgattgttctggcagtagtctcaaaagaagaagaaggatcctatgggtataagattacccaggatgtaagaaaagtcctggatgtatcagagtctactttgtatcccgtgttgcgcagactcagaaaagaaggctgcatggaggtttacgacaggcagtgcgacgggagaaaccgcaggtactataaagtgaccagtcagggtatgattcaactgaacttatataagacagagtggaaatcttactcatttaagattacgaaaatatttgaaggaggggcagtccatgagtagagaagaatttctggaccaactggcatatttgcttcaggacatttcaccggaggaacgggacgatgcaattggatattatgtggattattttgaggaggcaggaccggaaagagaacagcaggtaatcgaggaactgggcagtcccgaaaaggtggctgtgatgatccgcgattctctgaaaggaacgaccggggaggatgaatatacagaacatggatatcataatcaaagatatgatgaaaatacaaagatgcctgaaaaggcaaaaaagaaatcaggtttccattttcgggggaaccgggaccggaatcttgtactgatcattcttttgatcatcggggcagtcatacttggactgccgctgatcggagctgttgggggaaccgccataggcatcgtcggagtgttttttggcatcgtatctgcggtggccggagtgagcgtcgggctgctggctggaggtttcggcatatttgtggcaggaatcgtaaagatgtttacacagcttcctacagggctgatgatgagcggcggtggacttctgatgatggcagtggggcttttgttctgcatcttgtttgtctggatcctcgtgaaagtgatcccgccttgtatccggggaatcgtaaacctgttccagcgtatatttcataaggggggagaaacatcatgaaacgattttataaaatctgtctgatcctttgtctggtgtttactgtcgcaggtgcaggatgtattatagcggcggcagccatgggattttcattcacggattcttacaattatgtgagagaaaaaataaatggttatacaaggcgggatctagattctgttgaagagaagcttgaatttccgaaagagagtgtaaaacggataagtattacagtgggcagcaaggatttgtccatcgtgagaggacagggagaccagattgtactgacaacggagggaggacggaagcttttccggtctgaactggatacaaacaacaaggagcttacaatcaaatccatatcgagaagaacccattggtttttttacgactatggttatgaacgtgctgttttgagtataccaagagatgtgaacctggatactttccgcctggacgtgggaagcggcgatttttcatcggaggaactcacatcgaaaagtatgaacatccaatgcggaagcggggatattaaattagacgggatccggtctgagaccatcgacattcaatgcggaagcggagacatcggggcaaatatatgggacagcagggagaattacagatataatattactgtgggaagcggagatgtggtcttagatggacatgagctggaacacgataacaaaagaggggcttggggaaaaggaaccaaatcaatcgatgtgaactgcggaagcggggacatcgacataaactttttaaacaatatataaggaggggcttgttatgagcagtaaaagattatataaatccagggatgacaaaatgatctgcggagtttgcggagggattgccgaatactttgacgtggatcctactttggtccgcctgggagcagtgttgctgggatgttccggaaccggtctggtcgtttatattgtggcggcagtgattattccagagaagcggtattgaaaatagtaattgcgcctgatatggaaattatgctataatattatccgaaaaagaccaagtcaaaaggcttggtcttatattttgacaaagaggagaaaatcatatgaaaacaccaattctgatcgccatgatcgcttacatggcagtggttgtctatatcggagtgatttacagcaaaaagaataagacatctgaggactactttcttgggggaaggggtctgggaccttgggtgacagccatgagcgcagaggcatccgacatgagcagctggcttttaatgggacttcctgggcttgcctatgcttctggattcagccaggcgggctggactgccatcggcctgatcctgggaacctatttaaactggaagatcgttgcaaaacgactccgccggtatacggagatttccaataactccatcacggtgccggatttttttagcaaccggtttaaggatgacaagaatattttaatgttcatctcatcagtcatgattcttatttgctttactgtttatacagcatctggatttgcggcctgtggaactttatttaattcagtcttcgggctgaactaccaggcgagtatgatcgcgtgtgcagccgttattgtgatttacacatccatcggaggtttccttgcagccagtaccacagatttgattcagggccttttaatgtcctttgccattgtgaccgtactgatcgtgggagtcatcgccgtaggaggcgtcggaaacgtggtggaacacggaaagtctttggaaggtttttttgatgtcatgaaatatcatgatccggcaacaggacatgcggtgtcccagggtgtcattccgatcttatcaggacttgcatggggacttggatattttggggttccccatatccttgtaagatttatggctatcagaaacatccatgagatcaaaaagtcaagaaatattgctatggtatgggttctcatttccctgaccgttgcagtatgtattggatttacaggagcagccctctatccaaatgtacaggagcttgcagggagtggaaaccagaggatttttatctatatgaccatgcatttgtttaagggagtgatcccgctgctttttgccggtatcatcctgtccggaattcttgcagcgaccatgagtacatccgattcccagcttttgatcgcctcttcctgtgtggcaaagaatatgtaccagggcttttttaagagaaaagcatctgagaaaaagattcttgttatttcaagagccacgaccgttgccattgccgtcattggagttcttgtggcgcttgacgaaaacagctctgtatttaaactagtggaaaatgcgtgggcaggctttggaggagcattcggcccgttgatcctgtttgctctgttctggaaacgcaccaacttaaagggtgcaatcgcaggaatggtcagcggaggagcaatcgcgcttgtatggccttatacctttgcaaaacttggaggcatctttgagatctattgtcttttgcctgcatttatcatctcttcccttctgatcattgtagtcagccttttgacagaagaaccgaccaaagaaatgcaggaagaatttgaggaagccagaaagcctctttcataatttacatatttttggtatgatagggatgctataaaaaagtgaagcaacgaaaggggaagccatatgttaaatgaaaaagtagcagaattaatgaacgaccagattaataaggagttttattcttcctacctatacttagatatgtccaactactatgtggagaagaatttggatggatttgccaactggtttaagattcaggctcaggaagaaagagaccatgcgatcttgtttatggaatatctccaggccaacaacagcaaggtgacattcagtgctgtggcccagccggacaaagtgtttgaacagccggttgatccgctcaaggcagctctggaacacgaacagtatgttacatcgctgatcaatgctatctatgacgcagcatatcagtgcaaggactttaggagcatgcagttcctggattggtttgtgaaagaacagatggaggaagagaacaacacagactcccttgttcagaagtatgagatgttcggaacagatcctaagggcttgtatatgctggacgcagaacttcagactagagtttacacagcaccttcactgactgttttataaaaattaaaattcaataaatatttccgggattgcctgatatttaggcaatcctttttttggcgttcatgactctgatctcataatataaataggatcggctctgcacattctaatattgttcacataaactgatattatcagaattgaaaggagatatttcgttggaaaaatacaatcagcagagatgctcatgcggacagccggcaccatttgagatggagcgatcctgcggtaatagatcaaagatgagaagaaatgatcatatgggtcaccgtcatgacggtgttgactccatgccgatcgctatggcctatgtaccatggcagcattgggaccaggtcttttgcccagaagaaggattagcatgcggcaccattttcccggaattaaaaaaaccattttatgggaaggcggggtgtagacgatgaacaaatatgaccagcagaaacttttgagctatatcgacgcggtgagctttgctctgatcgacacaacgctgtacctggacactcatccggatgatcaggaagccatcagtcattttaatcaatatcaatgtgcaagaaataaagctgttaaagagtattcccaatactttgagcctttaaccattgattcagcggagatcacagacacatttacctgggcaaccagcagttggccatggcagagagggggatgttagactatgtggaattatgaaaaacgtttggaatataaagtcaacatcaaaaaatgtgatccaaagatagcaaaagtcatcatgactcaatatggcggaccgaatggtgagcttggcgcatccatgagatacctttcccagagattcgccatgccttataaagaagtgtgcggagtgctcacagatattggaacagaagaacttgcccatttggaaatggtatgttcgattgtccatcagctgacctgcgatctcacaccggaacagattcaggcggctggatttgatcaatactatgtagaccacacaactggtatctggcctcaggcagccagcggagtaggatttactgctgatttcttccagtctgtaggagatcctattactgaccttcatgaggacctggctgcggagcaaaaagccagaacaacgtatgataacctgttgcgcctgatcaaagatccagatgtcagagatccgatcgcatttcttagagaaagggaaatcgttcattaccagaggttcggcgagtcgctcagaagagtgcaggaacgtctggattccaaaaacttctatgcgtttaaccctgcttttgattgtggcccaaactgttaaaccaatattttcataaaaagcggcagaaaatttttctgccgcttcttttctgttaaaagtatgatgcaaggcatttatttttcatgttgttccaaaaatttttctatgttatatacggtctctttatttataaagtgttcgattttttccacctgttccaattcatcttcactttgattgatgagacacaaaaaccggtttaggatgtcatgccggaataaaagataatctcctgcatgctttcctttgtctgtcagacggatatagccgtatctctcagataagagatagccgtcatcctttaggtttttaaccatcttggaagcggaagaaggctggacatgcagcattaaggccagctggctgacccgcacgacttcctctgataaaagcaggcggcagatcatttccagatagtcctccatggaggctgtcatgctctctggttctcccttttgatagcccttcagtgtataaaaccctttctttttttccatctgaccattcctttttcttagttattgtaacgtttcattttgtccctcaatataatagcattgtgaaataaagtttccctatcctaatttctattaaggagcgtatcggtttatgagtgagaattgcagtttaaatgaattaaatccaggccagacggccgtggtggaagaattgaagacaaaagggagcatcagaaggagacttctggatatcggcctggtgaggaataccatggtggaatgtgtgggcaggagtccggctggagatccaacagcctttctgatccggggggcagtgatcgccatccgttcagaagacctgaaagatatcgttgtaagaaggtaaaaagagaggacttagagtatggaactgactgtgaaaaaacagaatccaaatgacaggatcattgccatcgcaggaaatcccaacgtggggaaaagcacggtgtttaacaatctcacagggatgaggcagcatacagggaactggcccggaaaaacagtggcaaacgcacagggatactgtagtacacaaaacaattcctatgtgatggttgacataccggggacctattctttgatggcacattcagcggaggaagaagtggccaggaactttctctgttttcagaagcccgatgcggtgatcgccgtctgcgatgcctgttgtcttgagagaaatatgaacctggtcctgcagattctggagatcacagaccggacagtggtgtgtgtaaatctgatggatgaggcgagaaaaaaaggaatctccgtggatgttgaaaaactgagtgaaaaactgggcattcctgtggtgtcggcagcggcaagaagtggggagggactggatgagctgatggaagcggtggactgtatggcagaaggcagatggaaagcggcagcccttcagacacgatacgaaccttgcctagaagaggctttggatatgatggagcctgcacttgcagaacatattcccgagaacctcccaagccgctggatcggaatgaagcttctggagggaacatcatcccttttaaaagagatggagcagaggagcggaagaccattctcagaggatccggcggtcgccggggctgtcgacagggcaaacggcattctatttaaggacggagggccgccggaaaagctggaggatatgatcgtgtcgggtctggtaaatactgcacaggacatctgctcagatacggtggtataccacagaaaagattatacaaaaaaagaccggaagctggattacatattgactagcaaaaggactggatatcctgtgatgatcgggcttctggccgtggtcctctggctgaccatcgtgggagccaattacccgtcggaacttctttcaaagggactgttctggatcgaggaccgtctcagcgaggtatttcaggccgcaggtgtgcctggatggatcaatgggatgctgctgtctggtgtttaccgggttcttgcatgggtcgtatccgtgatgctgcccccaatggcgatcttttttcctttgtttacgcttttggaggatgccggttatctgcccagagtggcctataatctggaccgtcattttaagcgctgctgtacatgcggaaaacaggcactcaccatgtgcatggggttcggatgcaatgcggcaggggtcgtgggatgccggatcattgactcgccaagggaaaggctgatcgcgatccttaccaatgcctttgttccatgcaacggaaggtttcccacgctgatccttctcatcagtctgttttttattggaacaaagcagggagcggcagcttccgttggatcagccctgctgttgaccctcgtgatcctgcttgggatttttatgacgctgattgtttcaagactgctttcaaaaactgtgctgaagggaataccggcttcttttaccctggaactgccaccatttaggagacctcagatcggaaaagtgatcgtacgttctgtatttgacaggacactgtttgttctgggccgggcagcggcagtggctgccccggcgggactgctcatatggatcctggcaaacgtgtctgtgggaggagtcactttgttaaatgggttcacttcaatgctggacccgctcggaaggctgatcggactggacggagtgatccttgcagcctttattctgggctttccagcaaatgaaattgtagttccagtgatgatcatggcgtacctctcccaggggaccctggctgaaccaggaagccttgagaccatccgcagcctgttggtacagaatggatggacccagaccacagccctttgtatgattttgttttccttgatgcattggccgtgttccacgacccttctcacggttaaaaaagaaacaggaagcatcaagtggacattggcggcatttttaattcccacagctgccggatgcctggtttgtttcgccgcaaagagcctaatgcagatcataggatatcttttgtaaaataggggagtttttctttaggcctctttccggcaatgaagaaaaactcccctatacggcttttactggcggccggtttttaaatacttcctctgaaaaacatttttcccaaattctatgttacaatgatagaaataatagaacgtaaacgcatacgcattcgggaggagagcgcttatgaagaagcagaggagaagaaacattgtcgtttttattttgctggcaggcctttgtctggcggtgaccgcagcaggaaggtttttatggaaaaaccacaaagaaaccgttatttcctattccgagaacaagaattttaacacgaaagattatctgcctttttccgaaaattctaagatcgtacgccttgtggacaagccaacactgcgccttaagaaaaatctgcctgtgctagacggggcggctgcattgtttccggtctattcagccgtaatcaacgcagtatacccatccggtacaaggcttaaagaagtcgacgataagaactgtgcctttgtttataacaatacagtggagggatattactatctgctttatggggagacagacatttttttcggtgtatgcccgtcagaggaccagctcgctgcatttaaggaagaggggaaggagtgtaaactgaccccgattggaagggaggcctttatcttttttgtaaataaggataacccggtggacaatctgacccagcgtcagatcaaagatatctattccggtaagatcaccaactggaaacaggcagggggcaaggatgagaagatcactgcctatcagagaaatgaagacagcggcagccagactgctttcctcaggttcatgaaagatgaggtcgtgatggaaccgcccactcatcaggtggaagacttgatgtcaggaatgatagaggaggtggcaaagtataaaaacaataccaaatccataggtttttctttccgttattatacagaggagatgattgcaaatcctcaggtgaaaattctctctgtagacgggatcaagccgtctaaggagaccataagggacggaagttatcctctgggtgtttctatatatgccgctaccttaaagagcaatcgcaagaagaacgtgaaaaagctggtggactggatgttatcagaacagggacagtatatcgtggaaaaaacaggatatgtgggcgtgaaatagctgattttgataacatcttattttctatgttgtaaaatgaaccgattgttgttacgatactgatatctgattaaaatatagaacgaattttgggaaagaagagggaagtatgaatattattatcgtaggctgcggaaaagtcggccgttctctggtagagcagttaagcagtgagaatcacgacatttcagtggtggatccaaaggctcatgttgtccagtcattggtcgatatgtatgacgtatttggcattgtgggaaatggggccagctataatattctgaaggaagtaggagtggaagaggccgatcttatgatcgctgtgaccaattcagatgaattaaatctattgtgttgtctgatcgcaaaaaaggcgggcagatgtgcgacgatcgccagagtcagcaatccggtttactttgaggagatcaattttatcaaggaagagatgggcatttccatgatcatcaatccggagcttgccgcggcttcggagatgtcaaggattttgaggatccccaccgctatggagatcaattcatttgcaaaaggaaaagtggaactcctcaagtttgttctcaggaaaaattccattttaaatgggatgggaatgaaggaaatcggtgagagaatgcacggcgaagtgcttgtgtgcgcggtagaacgccagaatgatgtctttataccttctggggactttgttctgcaggaaaacgacaggatctctattgtagcttcaccgggaagtgccagcaggttttttcataagattggtgttcagatgaacccggtcaggaatgttatgatcgtggggggaagcaaaacagcgtactatctggctaaaaagctgctcaagatgggaatctccgtaaagatcattgacaaagattttgaccggtgcgaagagctgagtgttctgcttcccaaagcagtcatcattcacggcaacggaagcgaccaggaagttttgttggaagaaggccttttggagacagatgcttttgtcgcgctgaccaattttgatgaggaaaatgtatttctctccctgtttgtaaagggacagacgccggcgaagctgatcacgaaggtcaaacgggtcagctataatcatattattgacggccttgacctgggaagcctgatctacccggaatatatcacggcccagtatatcatccagtatgtaagggcaaagcagaattccatcgggagcaatattgagaatctgtataagatcgttgacggccgggcagaggcgctggagtttcatattgaggaacacgcaccggttatcggtatcccgctacagtcattgccgctgcgggaccagattttaatctgcagtatcaaccggaacggaacagtgatcataccaaagggacaggacacgatacggatcggggacaccgtgatcgttgtaacgaccaagaccggacttcatgatatcagtgatatcttgagaaaagaataagaatgatgggagtaaaaagaatatgaattatggtgttatccggtacatattgggactggtcatgctgtttgagggagcgtttctctccctgccgtgtatcgtggcattaatatacagggaggcaagaggaatcccgttttttgcggtcatgctgctctgcctcttcgtaggttttcttatgagccataaaaaaccgaaaagcatgcagtattatgcaaaagaaggatttgttgcggtagcgctgagctggatcatgatgagctttttcggctgccttccttttgtatttaacggggatattccgtcttttaccaatgcgatgtttgagatgatctctggatttactactacaggagccagcattctggacgatgtggaggtgctggctaagtgcagtctcttctggagaagtttcagccattggatcggaggcatgggggtgctggtctttatcctggcaatccttcccatgggaggaggacaaaatctccatttgatgaaagcggagagccctgggccgtctgtaggaaaactggtgccgaaggtgcggcagactgccaagatcctgtatgggatctattgctttatgacggtggttgagattgtaattcttatgttcggaggccttcccctctttgattccatgctgctgtctttcggaagcgcgggtaccggaggcttctccatcttaaactctggatttgcggattattcgcctttcatccaatatactgtgacggtgtttatgattctgttcggcgtaaattttaatgtctattatttcatactgatcagaaagtttaaggacgcgttcaagtttgaagaattgaaatattatctgtttgtcatcgcggcagccattgcctgtatcacctacaatatcagggatctgtttcctacactggaatctgctttccgccacgcttcctttcaggtgggatccatcatcactaccaccgggtattcttcggttgattttaacacctggccggagttttcaaaggtgatccttgtcatgctgatgttcatcggggcttgtgcaggaagtacgggaggcggtattaaggtatccagggtgatcctgatgttaaagaccgtaaaaaaggaaatgtatttctacatacatccaaggagcatccggaagatcaaatttaaccagcatgtggtggagcatgaggttatgagatctatcaatatctttctgatcacttatatgatgatcctttcgttttctactctgctgatcgccctggacggatatgatctgattacagattttaccgcagttgcggccacgctgaataatatcggtccgggacttgagctggtgggtcccaccagcaactttggcatgttctcagacttttccaaagtggtcctgatgtttgacatgctggctggaaggctggagctgttcccgatgctggtgctcataagccctatcacatggagagataccaaagtgtttaagaaaatccctaagtataagggacgggcttcggatatatagaaagtgtgatcatcacctgggacggcaggtaaaagatccacatcccaatctgtgcaaaggaaagcagagattccgggactgacagaacagccagggacgggagattggtaaggccaacacagaggtcgcagcagacaaagaaaaggagaccggctgaaaacaaggtatagtgaaggtttatgcggcggaggaaaaggctttctgccgcatttaacaacagctggagaaaataaaaggcggctgctgccgagagagagtcccagatatggaggactgccagtatgggaaagatgcatccgctcagaagaaagcggacagggagaaagggcagcaaagtaaaacctcctgcgctgaggaggcggatataatacaagatctgtacacctaagaagcatagaatgccggccagatagtgtctgtctaagagcagcagaaaggcatcagcgatgacggtaagccccagggcagacgccaccaggacgcggtccggagatctttcaaatatcaggctgaagccaaaacacagcaaaacggagcagtatttcagtgccgtgctcaggccgtttaatgacgacgtaagatccaatattataaaggtaagataaaacacagcctccataaaaagaaaagaaatcagaatggacccgcaggggtctgtttttttcattttaacctgcctttctgaaaacgccatggatttttttgctgttttatagtattcttattaaaatgagaatttatacaaggaggtcgattatgagtcgagtatttaagttccacaacgatgtggatacggaccagatcatagcatctcagtatttgcttctgccgaatattgaggaaatgaaagtatatgcgtttgaatccattgatccggatttttcaaataaggtacaggaaggcgatattgttgtggccggtgagaattttggctgcggatcttccagagaacaggcaccgagtgttttaaaggcactgggcgtgaaggccattgtcgcaaagtcatttgccaggatcttttaccgtaatgccatcaacatcggtcttccggtcgttgtgagcggggatctgtatgacaaagtggaacagttagatgagatcgaacttaatctcactgagggagtgatcataaccaaggatgagacattgccttgtacaaagcttccgccttatatgcagaatattttggaccacggcggattgatcaactttttgaatgaaggcgaggtataggctatgggaatgacgatcggagaaaagattattgcaagggcggccaaagtgccggaagtcaaggcgggggagatccatacagtggaactggaccgtctcatgagcaatgacggaactacacacttgaccattgatatgtttcacaacgatctgaagcatccaaagatcgcggataaggataagctggtctttatcatcgaccacaacatcccggcggagaatcccaagactgcggaggctcataggaaaatgagaaactttgccagagagcacaaaattgctttttatgagggcaagggggtctgccatcagatcatggtggaggactatgtttgtccgggagaacttattatgggagcggattcccacacatgtacatacggcgcactgggcgctttcggaacagggatcggctgtacagactttttgtacggcatggtgacagggacttcctgggtcatggtgcctgagacgatccggtttgaactgactggaaatttaaaagaaggcgtttatgccagggatctgattctttcaatcatcggtatggtgggggccaacggatgcaattataagatcatggaatttgcaggagagggcgctcacaacctgagtatcaacgaacgtctggtgctctgtaacctggcagtggaagccggagcgaagacagggatcgtggagccggatgaaaaggttgtggaatatgtggaatccaggggcagaaaagcagagaatctgtttatcagcgatgaggatgcccattttgaaaaggtgtaccacattaatctggatgagattgaacctgttgtggcaagaccgcatttgattgatgatgtggttcctgtggaggaagtgaaggatgtaaagattgacgaggctttcttagggtcctgcaataatgggcgcatcgatgagctgcgtctggcagcagagatcctgaaagggaaaaaggtccatgaggatgtgagatttcttattgctcctgcttccaatgaggtgtacatgcaggcgctggatgaaggtttgatcgatgtatttatggatgccggggctatggtcatgaacagcaactgcagtgtctgctggggaagctgccagggcgtcatcggcgaaggagaggtgttgatctctaccggaacaaggaactttaaaggccgcgcgggacatccggattcttatgtatatctgggatctgccgcaacagtgaccgcatcagccatagcaggaaaaatcgtgagaagataaaggagtttacatatggaaaagtttactgggaaagtatgggtccttggagacgatatcgacacggatatcattatccccacagaatatctggcacttccgtcggtggaagatatgaaacagtacggattctccccgctgcgcccggagctggcgtcacagatcggggagggcgatatcatcgtcgcagggaagaactttggctgcggatcttccagagagcaggcgccggagattatcaaggcattaaaaataaaatgtgtcatagcaaaatcttttgcacggatctttttccgcaattccatcaacaacggactcctgctcatagaaaatgatcagatccaggagcatgtgaaggaaggggatatgctggatgtgtcactgggccagtcgatcatccatgatggaaaagaatatccggtccagtcactaccgcagaatctgatggatatcattgaagccggagggctggtggaagccatgaagaaaaggaacggggtgaaatagatatgggaaatacaatcattgaaaagatcattaaaaagaatacaaaagcggaggccgttgctccgggacagattgtcacagtaaatgtggaccgtgtcatgatccatgatatttttattccgtttgtcgctgaaaagtttgaagagatgggatttacgaagctttgggatccagataaggttgtgttgatctatgaccatctggttccggccagcgcagtggaggacattcgacattttaagatcggggatgcatttgttaagaaatacggtcttaagaatatccatcgaagcgacgggatttgccatcagcttatgacagagtgtggttacgcaaagccgggggatatcgtattcggaaccgattcccatacgacaacctatggatgtgtgggatgtttctcatccggcatcggctatacagagatggctgcgatcctgggtaccggagagatgtgggtgagagttccggagacgatcaaggttgtcattgacggtaaactgccggaaaatgtttcatccaaggatattattttaaggctcatcggagatctgggagctgacggagctacctataaggcccttgagttttcaggaagcacggtggaagagatgagcgtggcatccagaatgaccatttccaatatggccatcgaggcgggagccaaggcagccctctttgcttcggatgaaaaaacagcggaatattctgaggtagacctctctgatgtggattggatttacggagatgatgacgcccagtactgcaggacagtggtttacaaggcagaggacctggtacctgttgtggcctgtccgtcccaggtagataagatcaagccggtatctgaagtggaaggaaccagccttgaccaggtgtttatcggctcctgtaccaacggaagactggaagacttgaaggcggcagcagaaatccttgatggaaaaaaggttgcagactatgtgaagctgattgtcacacctgccagcagaaagatctatatggaggcatccaaagccgggtatctgaaaactctggccaaagccggggcgatcatcactcagccgggctgcggtctctgctgcggcagagccggcggaatccttactgacggggaaaagatcctggctaccaacaacagaaacttcctgggaaggatggggacttccaaggtggagatttatcttggatcgccgaagacagcggcggcatcggctgttgcgggaaagattgtagcggcaaaatagtgttggcagatcagtttcgttctatcggctatgtggagggatcttctgcgggctatctggtaaaagatctcatcttaaacgggatttggtctgctgtctgttgatacataaagtctatgctggcagaaaacattgagatccttattcttccaagatcaaaaagctcctgtaagaacggcggtattttagctgtccttacaggagtgtttttattcaataggaaagttctgcgaacctccctatggaataaaaaagccctgcgggcattatgcacacaaatgcgtgaggaaactatttgactgcgtcaaatcgcatttggtgcgcaaagttgccaagcccctcaaagagtgaggggttggggtgttgaagtgggcttgcccactttgttctgtctggaatgactaatagatgagcagcccgatgatccctgtaaatatgatcacgaacaccggaggctttttaaactttctcagcaggaccacagcggctccaaatagaatcgccgcaggcagctggaaagaggaaagcaccacatgctcgtcagttccgaacagagtcaagagcaggatggaaaaggcggctgccagcacaagacccagggaagaagccttcaatccgtctagtacagcagacatataagaagaatcgctctttttctggaagaaccggtacagcaggatggagatgacaaaacctgagatcacacaccccacagttgccaccacagccccggggattcctgccacacggattcctacaaaagaagatgtgttgactgcgatggggccaggagtcatctgggagatggtaatgatatcggtaaactcctgtccagtgagccaatgttttgccagaactacctgttccttgatcattggaagaatggcataacctcctccgatgctgaacaggccgatcttaaagaaggttgcaaacaggcgggcaatatttaagagcatgtttcacacctccttttctcatgaagccatactctgaacagacagagtgcggaacaaacgatcaggatcagcatggcatttatatggaacagaagactagacaaaaatgcagcaggcaccatcaaagtgagaaagatggatctcttttttagtatcattctgctcatatcaacaatatagtcgatgatcagagccgccgcgccggcctgcataccaagaagaacagcggatacgatatggctgctcctgaatacttcatatcctgcggatataatggaaagcaggatcaaaggaggcaggatcgcggcggtacagctgatgactgcgccgggaagcttcccgatcttatagcctgtgagagcagagagattgatcgcaatggctccaggagaagactgtgcgattgcggcgatatcaaaaagttcttcttccgagataagttgccgttttgtgacaaagtatttttttaacatagggacgaccacgtagccgccgccaaacgtaaaagcgctgactgtcagattgacccggaacagccaggcgtattgttttaataggtttttattcataacggaaattcccccttttgtatagtatacgttcttatcatatataaataaaattatattattttatggataacatgctaaaatagtaatgataggaggaagactctatgacgataagacggttatatatatttaaaacggtatgtgaggaaggaagtatcaccagggccgctaaaaagctttacatgacccagcccgcggtatcccacgtcatccatgagctggaggaagagctgggaacggttttgtttgaccgcatatccaaaaaggtatttttaaatcagacaggaaaactgttcctgaaaaagacagtgaggatcctggagttatatgaggacttggagaaaggaatctatgacttggagaaacaagctgtactccgggtgggttcaagcattacgatctcgaacttctggctgccgggagccatgaaacagtttaaggaaaaatatccggataccccggtgagtgtccaagtaaacaaggcatccgatgtactgtccatgctgcagaataatgagattgatctggcattgatcgagggtgctgtgtcagagggaatggtggacagcactgtcttttcttccttccgcctgtttgccttttgttcttcaaagcatccgtgggcggacacggaagaagtggaattggcgaagcttttagaacagccgcttttgctcagggagaagggaagtgcgaccagagatgtgctggacagtgtacttctccttcatgatctgaaagctgagccattctggaccagtgttaattcccaggtactcatgcaggcagccatggaaggcctggggatcacggtactgccggaacgcctggcggaggacgaagtttcaaaagggaatctaaagaaaatcaggatcaaagatatcgagctgaagaacgataatcatatcgttgtccacaaggataaataccgaacagaaccaatgaaagaatttattaatattttgttgaacggaaatgaaaataattgtaatttgtgatacaatgaagaatatttcatgtaaagggatgaggaattatgacagacttattaatatcattatttattaaaaataaagacgacctgaaaaaccataaagtccgccaggcctatggaaccatgggaggagcggtcggaattttctgcaatgttcttttattttcgggcaaactgacagcagggatactgacgggagccatttctatcgtcgcggatgcgttcaacaatctgtctgacgcggcatcctccatcattacactggtgggattccgcatggcaggacgccccgcagacaaggaccacccattcggacacggaaggatcgaatatatttcaggattgcttgtatctttagcgatcctcctgatggggtttgagcttttaaaatcctctgcagagaagatcttaagcccggaagctattatgttccgtccactttccatagggatccttgtcgtgtcgattttggtgaagttctggatggcaggtttcaataaaaaggtcggcaatctgattgattcagagaccatgaaggctacagccacagatagtttaagtgactgcgtggccacaacggcagttctcggcggaatgctcatcttccggttcgcaggaatcaatgtggacggttatgtggggatccttgtagctggatttgtcatgtgggcaggattcggagcagcccgggatactctctcgcccctgctcgggacagcaccggatattgaactggtggaagacatacaaaatgaagtgctgaataatgagctgatcgtgggggttcatgatatcattgtacatgactacggcccgggccgccggatgatctcacttcatgcggaggttccctataatgtagatattctggaggcccatgacgtgatcgacaatattgaataccgcctgatgcacaaattcaactgcgatgccacgatccatatggatccgattgtcaccgatgacaaggagaccaatgaggcaagagaactggtggagcggattgtcaatgagtgcggaagtgagctgtccattcacgatttcaggatggtggaaggaaaaacgcacaacaatttgatttttgatctggtggtgccgtatgagtacgaccaggaagtgggagatatcacgacgcatatcagaaaggagatcaggaagcatcgggacaattactttgcagtgatcaaagtagaccggagctatatctgagggaaaatatgagcgaacaactgaccaatgacatgagtgtgggaaatcctgcaaagaagctgtttttctttgcggtccccattgtgctggggaatctgtttcagcagctgtataacatcatagattccatggtggtgggaagatttgttggggcacaggcgctggcggcagtcggtgcctccactgcgatcgtatttttatttgttgccgtggctacgggctcaagcatcggatattcggttgtcatatcccagctgtttggcgcaaaggaccatgaccgaatgatgacagccatctatacggccctgatctctacctttgtgctgggctttttattgatgatcatcggtgcagttggaacagaagcaatcctggtgctcatgaggacaccggcagatatctatcaggatgcggcggattatctgaggatctatatgttcggtcttgtatttttatttatgtacaatactctgaatgcggtctataactcccttggtgcctcaaagatcccactgtattttttagcaggatcctccgttttaaatattgttctggacttgtattttgtcattcagcttggaatgggagtcactggcgttgcatgggcgacactgatcgcacaggggcttgcggcggtcatttcttttatcaatcttctgttccgtctgaaagctatgaaaacggaaaaaaggccggtgctttttaattataagattcttctccagatgggcaggattgcagttccgtccatggtacagcagtccattgtctcttttggaatggtgtttgtccagagcttggtcaacagcttcggctctgttgtactggccggatatacggcagcgacaaagattgattccatcgccatcatgccgatggtgaacgtgggaaatgcggtatccacctttacagcacagaatatcggggcaaagaagccggagcggatcagagaagggctgaaagccggaagactgatggcggccggcattgctgttgtgatcactgccattttgttttttaaaggagatgtgctggtggctcagtttgtggataaagcggtcaatgcccaagtcattgccgtgggcgtggactatctcagagtggtttccgtgttctatgcactgatggggcttatgaatgtggtcaatgcagtcctcaggggagcaggcgatgtcggtgtttttatggcggggaccctgtgtaattttgggtgcagagtggcttttgcatatattctggcccactttttgggggcatccggaatctggtggtcgatcccgatcggatgggtcgttgcgttcatgatcggaaccataagataccggagcggaaagtggaaggaaaaaggaattgttgagtgaggaaaagattgtaaaggatctggaaacgagatataataacaaaaaggtgccctttatagtatgacattttctacatgatttccgttcggctcttaaaatgcctcactccaatcatgtagaaaatggacgtaatgtctgctggagaagggcttctgtcaaaaaggagccacttttcgaaagttattcaccactattggaggagcgcatttcaaaagcgcaacggaaatagtggtgaataactcatgacatgttccacatgatttccgttcagttcttagaatgcatcactccaatcatgtagaacatggacgtagtgtctgctggataaggatgacagttaaacagaaggtgacatactaccagtagaagaacagttggaggcaatgaatgatggaaaatcgcattaaaattcacagagaaaattttgagtatttgccgaaacggtttgtagataagatagagatggatcttgagtatctggtaaagtcacaaattccaggtttaaaagctgtttacttattcggaagctgcgcgcgtggagatttacggagcggaagtgacgtggatttactgatactcacagagaaaaagctggaagacaggacattggctgctgatatcagatggactttggatgaggaaatgtcaggtgttgccacagacgtagtttatgccaatgaggaatcgataaaagagaatacagtctttaaaaatattatgaacagggataaaaaattaatattggaggtggttaaatgataaaaaacaattatttggacattgcgaaaaatgatctggcttatcttgaatctgttcttgccagcggtaacacattttataatcagctcgcagtacagtgccaacaggtggcagagaaatatttaaaaggatatttagaagcatgttttttggatgaagatgtgtctgatctattgaggaaacataatatgaaaaagatcgcatccagaatgaatagctggaaaccagaacttagtctcgataccgttggacttgcatatttaacagatttttattatgatgcaaggtatccgggggatgatttttatactgtcacaaaagaagattttgaaaaatgccagagtattatgtacgacactatttcgaaacttaacgagcttccaatcaattagcaaaatagaatcagggggagaagatgccaattatattaaaagcctatcaggatatttcaaacaaacaggtgatcgcaaatgtgttttccaatctgttggcagaccctgccggagaccggataacaaatgattatgtattgactttgaccgatgaggaactaatgatcgagcagatcggatattctgaatggggtgctgtgccggaagtccgtcagacaaaatgcctgaaacgggataagattgagaatgtcaggctggaagatgaaaataaaattgtgatcaagacaacaaatgatccaaaggagatggtatttctttataaagcaccgcagaaagagtttgcacagaagctctgccaggaatttttgaaggagtgacaaggggatacggccaaaagggagcagatattagtttatctgctccctttttctattgttatattaccataaaatgactgttttttcaagtcttgtgatcccatagccgcagcagtataataagtctccaagcaaaaggaaggggggcaccttatggaagaaaatatttatgaactgctgacaaagaaaaaggaatctgaggaactccgggccatggaagtctgcaatgagaagacttatgagaaatttgggctgagtttgtcacaagaacaggcaaaagaattgatcgcaggaagaaacgcaagtcttaaaaagtatcaacgggtggagtttggcaagggaattcttgacaaactcatgtatgtattctgtgattcccagtatatagaccaggggaattacgcccaagtactggaaagactccaggatatcttttaccgttttaaaaatgaatctatggaccggttgacagatgatgagttgctggaattcatgagggagcagtacgagaatgtgtgtttcggagatctggactatctggaaaatacctgcctggagagattttcacgggctatacgggcaggatatgacggctgcaggaaaagcgggggaaaaggtgaatacggacagttcagcgaggagcagcgctgggacagtgaactctatatggatgtgctaaaggaaatgttctgggaataaggggaaaagatataggaagggagcagctatggaatatcagttggaagaattacttccggttacagccggattggccgaaaagttcacgtcaaaggaaagcagttctgtcacctatgagacagcacagatgctgatggaggcagtgatttattgtatcaacgaatgtgaaagagacggaggcttcgcgctgcggtccggtaaggggcttcgtgccatggaagcctatcaaatagggtatgaaaaggtggtaaaaaaagcaaagaaagcgaaggctgtctacgaccgcctgactgcggactttgaggactacgggtgcagcaattacagggatacattgatcatcggcatgccggaattctttcttcgctatgacgccagattctgccctcaggaccacatcctgacactggattatccggccatgaacagcagcagggaggacagcggggtccgccttatttatgagtatctctgccatgtggaagcagagaagcggtttttagactgctttgacagacgggcagtaacagatctgatgagaaacctagaagagaagcaggagatctattatatgggcaatatctgttctctggtcctgttccagtccattggatgttttgtcacaaaaaagcagctgtcgaacctgatcctgacaagaacagacaccgaagaaatacgcagattttttctggatgacaccgtggaacaaatggaagataaattgcgggagatgatcggttttatggtcaagcaggcaggactttcaggacagcagaattattttcaaaaagagggaaaagaatttgccgtgcgcatccataatgcgatagagtacgatgtgatggatacgttgtttttaatttaaccagatttttaggacactttttttaactgcctgcatatattagcaaaaggaagttgattagaggaattttatggcaggcgtaattttagatgctgggcacggcggatttgacaatggtgcccagtttaatggaagaagagaaaaagatgatacattgaggcttaccctggcagtaggggaggctttgagagaaagaggagttccggtccagtataccaggcagaccgatatctatcagtccccgacggaaaaagccaggattggaaatgagagcggagcggatttttttgtgtctatccacaggaactccagtccccttccaaatacttatagcggtgtggagacgttggtgtacaatgacagcgggatcaaggcagagatggccaggaatgtaaaccgaagactgagtgaggtgggatttaatgatttgggagtgaaagaacgccccggacttgcggtgctcagaaggacgaatatccctgcgattttgatcgaagttggtttcatcaacacagaaaaggataatgaactgtttgattcaaggttcaatgacattgcgaatgccatcgccgacgggatcgttgatacgatcggatcagggcagcaggagcttgccagcacctatcgggtacagatcggactgttccggaacctttccaacgcacagtatgcgttaaatgaagctctgtcccagggatttgacggggagattgtgtaccaggagcccttttatgccgtacagctgggagaatttaagacattagatgaagcagtacaacttgaaaatgaattgaagcgaagaggatatgacactctggtcattaaaaaataaggaggatatgatttgttttatgtgagatcaacggacggaataaaaatatcagtttacgattataatccatttggtgaggaaactgttgttttgatccacggatggcccttgtcccacctgatgtatgaatatcagatcgaacttttatgccaatgcggctaccgggtcgtaactctggatctgagagggtttggaaactcggatactccctgctttggctactcctatgatcaaatgtcacaggatattttccaggtggtcagaaggctgaaattaaagaattttacgctggtgggattctccatgggcggcgcgatcgtccttcgttatatgagaagattcaaaagctttggcgtgaaaaagctcattctcttggcagcggcggcaccgtcctggacaaaaagaaaagacttcccatatgggctgaccagagaatatgtcaacgagctaatcgaactggcagagactgaccggccgcagctgtgctataatttcagccatgaacagctgtttgcaagtccccagtcagatcctgccataaactggtttgagcaaatcgctctctccgcatcgggtttgggaaccattcaagcggcagtttctttgagagacgaagacggaagagaagatctgaagactgttcatgtgcctacttggattatccacggtaaaaaggacgttgtggtgtcaaatgatctggtaaggatccagcaggaaagtatctgtgattccaagctgatacagctggatgacagcggacacggtattgtgtacgatcagctggagttatttaacaagtattttatgaaggcgatcagagcataagcggcggatggaaaggctgttataaaatgaaatgtttcatacaggttatcagagcttgttgaaatcttacattttgtaacagccctttttcagtgttaaaggcggaatcaaactgtgatatatctagtctgtttaactttttttaagatgattcaaaagtaggtttcgcagctaccctgatttgtatccttcttgtcctgtttgagattaacttaaatttaaaacagatacgctgattatcgcctaaacactagggttataagcaatgatgtagagttttagagcctagtttactactaatttaccacttacgaaagaactttgatatgactacacaaattagacaccttattggtgtctttttatttgggaaaagcggtcaatcatatagactaaccgctgtggtacattgcatatttagctgacaaactgaaagttgtctattgtttatttcttctacaatatgtaccagaagcgacaaaaactaatagcaataatataagaatacatggtaatcctacacgaacagcaaatgcttctgtgtcaatatatcccgttattccaatcactattgccaccccaaaacaaaacacggaaaaacacctgttcaatcttttttcatcgtactttgctttatcttcattactcgcagtattatatccagcgataagatagccacctttaccaaacgcaaacactattcccattattgcaaataccactgtaagaattattatcacaatcattttatttgtccccttctcaacttcaaatttatagagatattatacagctattatgtaacactggcaatggtatcatagtcatattaaaaatttctttttacttatcttcaaatgcggattcgtttatttctggaaacgcttcttgggggctgtagaacctttgaagctccatatggaaacaccgtacaacaccctattggaaacccagcgctggctcaaagaggatggcgtattatctgcagtcaaggcgtttcatttattagagttcaacaaggcgttggacgatttagaacggatggaagataagctgaaacaggtcagattcagttctgcgctcggcaacaagctgacaggtcatttacagcggatagatcatgaagaattgatattcccatgtgcagtatgatataaagaaagattaggtggttcttatagaaaaaagcaacagggatattccagtataggagcgttacacgctgaccatagaagaagcgtcacgctacttcctcattggagaaaacaaaatgcggaaactggtggaagaaaatagaaatgcaggcaggctctttcccatgcggaaaggagcatgatagcatgtcagaaaagagaagagataacaaaggccgcattttaaagaccggagagagtcagagaacagacgaaagatagttatacaaatatatagatacctttggagtaccgcaatcggtgtacttatggaaacttactgctacggacaccgtaccgaaagggaaacttgaatcctaagagcttacagtacatcatgggtcattccaatatcaatatcacgctgaatctgtatccccatgcgtcactggacggtgcaaaggctgaaatgataagtatgatagcttagggaatttacaacttatttaccactttccaaaggcaaaatatgagaatttatgaaaagaaatgtgaagtatctaccgatagtaaaaatgcccgtaaagccgatagaataaggctttacggacatataaaaagttataaagagataaatacttgttttaagtttctctttaaaacaaaaatataaaaaagcagaagagaaggagaatcggaactgatggctgttttttgtcccataggaaagttctacgaacctccctatggaacctaaaagccctgcggcactgtgtgcatcaatgcgtgagcaaactatttgacaacgttgttcctttataatgaaaatagatgagttgcaatattaaagtaaatcaggatggagcaggtgtccaccagcgtcgtgataagcggcgccgccataatggccgggtccagcccgatcttttttgccagcaggggcagacagcagcccacgatcttggccaggatgatcgtagcgatcagggaaaggccgatgagtacagccatccttaagctgtggtacatgagcataatgcgcagcccattgactgcagccagcacaaaaccgactaagatagccacccggaattccttaaatacgaccttgaagaaatcgtggaaacggatttcatccacggcgattccacggatgatcagggtggaactttgagaaccgcagttgcctccggtgtccatcagcatggggataaaggataccagcaggggaagtgtctggaacgcatcttcatacttggtgatgatagccccggtgatggtggcggacagcatgagcactaggagccatagaatcctgtgcctggcatggcttaggacagaggtaccaaaataggaatcctcattgggctgcatagcggccatgatggacatgtcttcttccacttcgtcctgccatacttccatcgcatcgtcaaaggtcacgatgcccaccatacagtgttcacagtctactacgggaatggccagtaatccatatttatggaacagtttgctgacattttctttatcctcatgggtgtttacatagatcaggttggtctccatgatatcctgaatcagtacatgttcctcattgagtagaagacttttggcagtcacgatgccaagaagtttcttttgttcgatcacataacaggtataaatggtctcctggtcaattcccacccgcttgatctttttcagcgcctgttccacggtcatgtcctttttcaggtcaatgtattccaccgtcataatgcttccggcactgtcctccggatattttaaaagccggttgatggtctggcgggtctccttgtctgttacatccagaatctgttccactacattggcaggcatctcctcaatgatatctaccgtgtcatccatatacatatcatcaaacagttctttgatctctgtccgggtaaaagcattgatcaatgtctcctgcatgtgagaagacatttcagtaaagacttccgctgctttttctttttgtatcaggcggaataaaatagtgtattctttttctgtaaagttttctaataaagatgctaagtctacgttgttcatagaattgagcacaacttttaaggcaggatactcccgccctgtgagcaaagctctgatattctggtctctcatgtttctttctccttttctgaagttttgaagattaaaacatgaacgaaaatcccttccctgtatctaagaaacaaaaggcaggaggtttggatttttcattcatgtcgtattgacttcggggcgaatccattctctcacatcctttctttaatcatagttttggattttcaccatccttatcaggatacctttccgcggaaaaactgtcaagaacaagggaagaaagttgacagtaaaacagaaaaagtgagataatataaatactggaaaatcattcaattaaaggaggtatttctatggacagtatcgactacaggcaagagataggattttatctaaatggaaggaaatgtgactttaccaaagatgtgatgaattcatttccacacagagatgcaaatgatctctgccatggcatcagctttcactgtatggcgcaaggtctggtcaatgccatgaatttttataatttttatatccggtcttctgaccatgaacgcagtgaaacccgggcgatgacgctcagatttatcataggaatgatcattagtactaagcgcatgaagatgaaggaggaagaaattcagaattttgttgtgaacggtatcaagtcggatacaggaagtctgttgaatgattaccgtccccatctgagagggctgatgtatagtatggaattgctggatcagactcagcaggccgcagaatgggtgatcgagacgcatatgcaccattgtacatactatgtgaatcatattttagatcttctttataatgaaaagacaaatctggactatggatactccgtgtggaaccgttcccttcaggatgcgtttgatgcgtctgcatgtaattatgacagagctagtcaaagatttgtcataaccaatgaacaggattgtattgctgtgagcaatctgttgacgtacacattgggagaggcagatggattggagaacacggagaatgcacttttcttctatatgacagtcattggagaaaacgctatgttgtatagcagccggaatgatccgggactgttccagccggcaacggcagtgggaccatgcagtgtgcagatttcgtactataattacataacaaatcaaatggaagatatcccgatggcctgaaatgacattttctaaatgatttcaggagggattagacggaaagatagaaagcagtagactacggtagtttttctccattgtcggaaggaggcctttccagagtcgactggagataatggagaaaaactcatgagacaatctttcttcccatataattagtacatagaagatgaacaggggatggacagattgaacaagaaaaaactgatcacaggttttatatgtatcatagttttagggctgtcattgctcggtggaggcaatgcggccctttctgtctggaatcaaaatgtgaggatcttaaatccttcagacaacaaggaattgcctatttactgtgtggatacgaagaaaaaggaaatcagtctgacctttgacacggcatggggaaatgaggatatagaccagatcttaaagctgctgaaaaaagaaaatgtaaaggcttcttttttcttctccggtgactgggtgcagcgttttccgggagacgtaaaaaagattgccaaagcaggccatgacatcgggaaccatggagataaccacaaatatatgaccaagctgtcttccgatgagcagaaaaaagagatcctgggggcacacagtaaggtccaggctgtcacaggggaacagatggtgcttttcaggccgccttatggggattatgacgagactgtggtgaagacggccagagaactgaattatgaagtgatccagtggtctgtggacagcctggattggaaagatatctcaaagcaggatatcataaagcgggtatgtgataataaaaaaatggaaaacggagcgatcatcctgatgcacaccggtacggtttataccaagcaggcgctgcctgttattatccagcgtttgaagtctgagggataccgttttgtcccggtttcccagatgatcttaacaaaaaacttctatattgacccggagggcaaacagcgcagaaaataaattcttataccaatttaatgtgaaatatgataacatctaggtatcgcagaaacactgtgaaatacaagattagaaggtgacttagatggtatttcggtttgatatgaatgatttgaatcgggtcaagaattttaaattcggaaagatgaaaaagaaaacaattgtcatgggagtgctggctgtacttattttagccggactgtatttttacgttgcacttcctgcgcttaactttcaggagactggtatctggatggcgttgatcgctgtgttgggagtgctgacggcgtgggcggcagtaaaagggctgggtcagaagtccaaggtatttacgctgttttctactctgcttgttgtcgtcattctcatatttgtggtgggaatgatcctctcaagccagttggtgtcctccaagaagtatgccagcagactgaaggtagagaataagaagtttgagaacgatatgaaagagacggaaacgatcacggatattgccctgatggacacagaaggtgcaaggattatcggtgaccgtgccatcggttctctgtccgatgtggtgagccagtatgaagtcagcgatgactatacacagattgattacaacggtcagccgatgaaggtggcgccgcttaactatgccagcttcatacggtacattaacaaccgcaaggcggggatcccgggttatgtccaggtagatccgatcagtaacgaggcaaaatacgtgaagctcaaaaagcctatgaagtattcgccttccgcttatttttcaaggaatcttcagagacatctgagattccagtatcctactgcgattttccagggatactactttgagatcgacaatcaaggaaatccatattatatctgtccggtgttgaagtcaaacgcgggattgttcggtgccaaggatgtaaagggtgcagtcatcagcgacccggttaccggaaaaagcacctattatgatgccaaggatattccgagatgggtggaccacgtgcatgatggaaagctgctcctccagaaatataactggaaaggactgctgtcaaacggatatattaacagtgtattcgggaaaaagggatgtaagattgccacagacgattacggctatcgatccattgacggtgatatctgggcttacacaggcgtcacttcggtaaacggcgaccagtccaatatcgcgtttgtactcatgaatatgagaacggccgagtctaagtattacgcggtttctggtgccaatgagcagtcagctatgaaggcggctgaggggcaggtgcagaaccttagatattccgcagcgttccctgcgctgatcaatgtaaacggagagccaacctatgtcatgatactgaaagataagggcggactggtgaagatgtttgccatggtcaatgtacgaaagtacaatatcgttgccacctccacgactcagaacggggtccagaaggaatataagaggcttttaaaagagcagggcattatttctgccaaagaagccgcagccgcagagtctgtgacgacaaaagagatcacggttaagaagattgatttcatcccgatcgaagggaatacctatgtctatattacagataaggacgggaatatttataaagaagagttttctaaaaatgagaaagcgatcaagtggagtgccggggacaagatcaagatcacttacgaggaagacgagagcggcatttatcagataacacaatagctggcggctttgtatttgacaaaatacaaaaaaatacttgatttttcaaaagaatcattgtatcttatacctagcggagtaatgacaaaggcgtcaaacgattcgaggattgtttggcgtctatttttttatataccgcaggttttatctagtgtagaacgttctgtgcagaatgcacattcgtataccttatcgcgcggagcgcgccaagccctgaaagggcataaaatacggtgtgccctgtgggtataatttgaagtccatatcaggaaagggagaaatatcttatgagcgaaaaaagaagtgtttcagaaatgttcggatgtaacgtgtttaacgactgcgttatgcgggagaggcttccaaaggcagtgtacaaagacctgaagaagaccatcgaagaaggaacagatctaaatcctgaaatcgcagatgttgttgccaacgagatgaaggagtgggcccttgaaaaaggtgcgacccattttacccactggttccagcctatgaccggtgtgacagcggaaaagcatgatgcttttatcactccgacagaagacggaaaagtgcttcttgagttctccgggaaagaactgatcaaaggagagccggatgcatcctccttcccgtcaggaggcttgagagcgactttcgaggcaagaggatataccgcatgggattgtacctcaccggcatttatcaaagagacaccggattctaccatcctctgtatcccgaccgctttttgttcttatacaggagaggcattggataagaagacaccgcttcttaggtccatgcaggccctggatatccaggcgacaagactgctccatctgttaggaaagaaaaatgtcaaaaatgtcaatacatccgtaggaccggaacaggagtattttcttgtagataaagaaaaatatttacagagaaaagacttgatctttacaggccgtacactgttcggggcgatgccgccgaagggacaggaaatggatgaccactattttggtattatccgtgagagaatcggaaagttcatgaaggagctcaatgaagagagctggaagctgggaatcaccgcaaagacccagcacaacgaagtagctcctgcacagcacgaactggcaccgatctatgcgtccaacaacatcgctaccgaccacaaccagcttctgatggagaccatgcgccgtgtggcagaacgtcagggactcaagtgcctgctccatgaaaaaccatttaagggtatcaacggctccggtaagcacaacaactggtctcttgtgaccaatacaggaaagaatcttctggagccgggagaaacacctcatgacaaccagcagttccttctgattctttcagcgatcatcaaggcagtggatgaacatgcagacctgctccgtatggcagcctccacacctggaaatgaccaccgcctgggagccaacgaggcacctccagcgatcatttccatcttcttgggagaacagcttgaggatgtggtaaaacagctggtgacaagaggagaggctacaagatctaagcacggagacaaactggcatccggggtacatactttgcctgactttgaaaaagatgccacagaccgtaaccgtacatcaccgtttgcatttaccggaaacaaatttgaattccgcatggtaggatccacccagtccatctcagatccgaacgtggtgctaaataccatcgtggcagacgcactggcagaggtctgcgatgagttggagaaggtagacggagatcttcaggatgtgatgatggaagcccatgagattacgaaaagaatgctcacagaccaccagagagtcatcttcaacggggatggatactctgacgcatgggtcaaagaggctgagagaagaggacttccgaacatcaagtccatggttgaggccatccctgcattgatccaggataagtctgttaaaatgtttgaaaaattcggtgtattcacaaaggcagagttggaatctcgtgtggagatcctctatgagcagtatgcacagaccattaacattgaagcgcttgcgacgctggatatcgccaagaaacagatcgttcctgcagttatgaagtatcagaagactctggcagattctgtggcagtcttaaaacagacaggactggacacaacggtacaggaatctcttttaaatgatattacggaaaatctgaaaaaattatatgcagccatcggtgtgctagaaacagagacagataaagctcagtccatggaagatgcagccgagcagtcttgctattatcacgatgtagtatttgcgtgcatggacagtgtccgtgaacctgcagataagctggaaatgcttgtggcaaaagaagactggccaatgccaagctacggagatttgatctttgaagtttaagaattacatttaacgatgtcctgccggaggagatttacgccggcaggatatttttttctttataggattcgggtgtcaaaaggtcatcgatccttgatataactttgtaccttgaaagcttaacacgatattcaagttctacttcctttttgatataatggacttatcaaaaagaggaggtggtttctatggcttttgttccaaacaagaatcagcaaatgatactgaccgaccatctgtttcatctgacagaacacgaacagcgttttctggatcaatcatgggcaaaaactttcgctgaccatgtgtttccggcgattgatgaaaatattttttccgtactttatagtgacaaggcttcacgtccgaacacccctgtaaatgtcattgtgggagctttgatcctaaaagaagcactcggtgatacagatgaggaactggttcaggcactcatgtttgatatccactaccagtatgcactccacactacaagttttcaagaacagccgttaagtgaccggactctgagcagatttcgtgccagatgccttgcttatgaaaccgaaacagaaatcgatctggtccatgagtgtgtaacaaaattggcgaaagaagtctcagaattcatgggaatcacgccaaatatgcagcggatggacagttttatgatcgcagccagtattcgaaatcttgcaatgctggaactcttttaaacctgtgtagccaatcttgtaaagatcatgaaagcgcgggatacaaaactgccggaaactgtgcagcattacacagaaaaagatgacggcaatcgttttgtctatcaccagaaggatctggatgccacacagaagacggtcctggtcatgaaggatgccgaaatactagttgggatttgtgacagcactggagattttgatgacacaagtgaataccagcttttgattcgtctgctgaaggagcgcacgattctgggggatgatggtgttcggagacttcgaaaaaagaagaagttgaagaaccatccaaagtcctgctgaatccttcggatcccgaagctactttccgcaaaaaagcaggagcaaagcatttgggctatgtcggaaatataacagagagtgttggtgaaactggaagcctggtcacggattacgcatatgaacagaacatatacagtgataaccagtttttaaaagatcatttggaagcacaaacggtttacgaagaaccggcggtcttagttgcggatggcgcatacaacggcgaacgaaatgtttcgaaagcaaaagagcataacatccggcttgtgaccacaaattttacaggatataaaccttcggatgtattcgccggattcatctttgatgaaaccggtcagacactgctggagtgtgccaatcataaaaagccgattcgcacatattacgacgaacacaatgacagatgcaaacagtttagggaaacatgcgccaaaaacaaaagcggcataaaagtgaaacaagaatctctctcaatgcaaccgtacatatctgtttctgatcttaaaaaagtcaaatcgtgtaaaattttcaaagtacaaataaaaatcaagttaattttaatggatcttttgacaccctaatctttataggaaagttcgatttttatcgaattcctgaatgaaaaaagcctgtacaaaggtaggcatgagaataagacaacattgtttagaagatacaaaagccttttacaccggcctcatcggcaaataaatcgtcttcgtttaagaaataatccatatccggaagttcatcctcgctcatattgcgaatgtccttagatgtcagtccttccgggggattatcggtgtatcttttgggtaattcctcgatatcaggtttcattgtacagctcctccttttagaggatcatatcacagacagacgttatgcagaagaacgctttccgagagatttgggcattgctttctcatagagttcttcgagggatacgctgttgtgattataataaagttccaaaatcaacatcgtatgtccgcgatcaggacattgaagttttgaatcgatctttttgtgtcttgcataaagaccaccatatcgcatctcgccgtcatattgatcaatgcgagaagtggagatgacaggatgtccgaaatagcgtccaatctatttagtcatatgtttggggtcgcatttgttaggttttgcataaacagagaagccgtatttatgatcggaataacattttgcttttacttttcaatttagattctactacaatagttttatggttatagtacatgacaaccagccgtgtctatacccatcttgttgcttaactgttagaatgaatggagcagtgggtctggcggctaaattcttggacttcgcgtccgtaaattagaatgtcagccggctcctcattcgcagtattcgttttatgcaggttgatctgctttcctacagtacgttcgagtcacaccacagtagattgaataagcaatgagagaaatggtattgatccattgtattaatccaaaggagaattattttatgaacgcagtaggtattgatgtttctaaaagcaaaagtgttatcgctatccttcgcccttatggggagattgtttctccgccatttgaaatcaaacacatttccggtaacatccaatctttgattgagcagattaaatctatcgacggtgaatcccgcatcgttatggagcatactggtcgctattacgagccattggctcatgagctttctcaggcaaatctttttgtaagtgacataaatccaaaactcattaaagatttcggagataattctctccgtaaagttaaatcagataaagcggatgctataaaaattgctcgctatgctcttgacagttggactgatctaaaacagtatggtcttatggataaaatacgaaatcagttaaaatctatgaaccgacaattcactttctacacaaaacataaaacatctatgaaaaacaaccttatcggtatcctggatcagacctacacaggtgcaaatacctactttgatagcatcgcccgcaatgacggtagtcagaaatgggttgatttcgctgctacatactggcacgtggactgtgtccgcaaaatgtctttaaatgcttttttagaccattatcaaaaatggtgtaaacgaaagaagtataacttcagcaaagccaaagctgaaaaaatctatggaacagccaaagagcttatccctgtacttccaaagaatgatttgacaaaacttcttatcaaacaggccatagaacaattaaatattgtatccaagactgtagaagaactccgatctctgatgaatgaaactgcatctaaactgcccgaatatcctgttgttatggcaaagaaaggcgttggcaaatccctaggccctcaattgatggctgaaatcggagatgtaacacgcttcacccacaaaggtgccatcactgctttcgcaggtgttgatcccggtatgaatcaatccggaacatatgatcaaaaaagtattcatgcttcaaaatgaggctcagcaacattacgtaagatattatttcaggttatgagtattcttcttaaatccatgcctcaagatgatgccgtttatcagttccttgataagaagcgtgcccaaggtaagccctattatgtctatatgactgccggtgctaataagtttttgcgtatctactatggccgtgtaaaagagtatttaacggtcttacgtaatccagaataatcacaaccattttggtattccatggaccagcgtaatgcggtggtctttttgtgatgtcaaaaaacactacataaaactttaataaatattctctcttttctattgactttttatttgcaggctaattcattaagaagggcagtgcgaaaagaatgacgtagataagtgtagttgaagtgttttatatggcgacaaaaaccatcgtcactgtaaccgccttcggaaatcaggcagtgaatatgcggattccatttgaggtcacgcccaaaggttgatgaaaatctccgagatgactttctcaaagaccgttcgcttcttcattgtctctttccctctgtcataagtgtgatttcacgtatgttttttaccatgaatcaatctaaaaattttactccaggttttattatggttctccatctttgtaagatattcataagtctattatggaggaaaaaggaacaaaaggaaactcctatctcctcaagaatgatggaaaggggagttgaataggcgaaggatattttttattttgttaaaactgcacaaaaggcagatgaaatttttgaaatacaagccaaaaatctgtaaaatagaaataaaatttttgaaacaaacaaaatatgattgattaaaagataatgatgtactaaaataaagatataacaaagaaatacttgcggaaagcaaggatataggtgaagaaaaggagagaaattatgcatgctttaaaacgttttggaacagcttttggtggttacaagatgatggaaaattatccggagccgacctgtggaccagaggatattattattgaaatcaaggcggcagccatctgtggagctgatatgaaacactggggcgttgacaatggatatgatgacacaaatattacaccggatcagcagcagtcagtaagaggacatgaatttgcaggagaaatcgtagaagtcggatctgaagtaaaagactggaaagtcggacagagagtagtgtctgataacagcgctcatgtctgtggtgtatgcccggcatgtgagcagggagatttcttatgctgtgaagaaaaagtaaacttaggattagacaacaatacatggggcggcggattttcaaaatactgtaaagttccgggagagatcttaagaattcataaacatgcgatctgggagattcctgaaagtgtaagctacgaagaagcatgtgttatggacccgatctgcaactcttataaagcagtagtacagcaggctcacttaatgccgggacaggatgtggttgtattcggaacaggtccgatcggattatttgctgtacaggcagcgcgtttaatgggtgcggtaaacatcgttatggttggtctggaagaagatgtggagacaagattcccgattgccatggaagtcggagcaacacactgtgtaaacggatctaaagaagatgttgtggtaagatgtacagagatctgcggaagagataatttaggactggtgatcgaatgctcaggagcaaacattgcactgaaacaggcgattgaaatgacaagaccaaacgctgagatcgttcgtgcaggtatgggattcaaacctctggaattctctatcaatgacattacatcatggaataagagcatcatcgggcatatggcatatgactctaccacatggagaaactgcttaagactgttagaatccggacagattcaggtaaaaccgatgattacacatcgtcttggattgtcagagtgggaaaaaggttttgatttaatggcgaagaaacaggcagtaaaagttatcttccattatgactacgaagactaaaaaatccaaataaagaggaaaatcagatgaaaagaaaattaatgattgcaccttccatgggatgctgtgatctgtttgatatggaacgtcaggtccgtatcattgatgaaaaatcagattttttacatatggatatcaaagatggtgtttatgtaccgagttttggtatcggcccggaatttttagcggcgctgaaagacaaggtgacaacaccgatggatgcccacttgatgattaagcatccgcagcagtatctggagacttttgcgcaggcaggggcagcttatattacgccccacacagactgcattgagggagatgcctttgtgacaatcaacaagattaaagaacttgggtgcaaggcgggaattgcattaaatccatccgttcctttggaaaccatagaatattaccttccgctgcttgacaaggttaccattatgattgtagacgcgggaatttcagggcagaaggtcattgagcagacctatgataagattcgcagactggtttgtttaagggaggaaaaaggacttcatttcctgattgaagcagatggatctatgaaccgtgatgtataccgtccgctgtatgaagcaggggcagatatggttgtcttagggcctccggctctgtggaacaaagcagatgactttgaggaagcatggagcatcatggaaaacgaattgagagatgttatatagacttagttttatacaaggaaggggaaaacaaatgtcaaagagaacaagtgcaaatatcggagcaaggcttgaccgcctgccgaattcaagctggcatgtaaaaatgtggctgatcacagcctttgcattattggtatgctggtcaaacggtattggaggagcggtacaaaatatcctgttaaatgagattcactggcttgagcctgggtccagccttctggcaatgtggggaacgacctacacagctggtcagttattcggagcattgatcggcggaccgatcggtgacaagatcggtcgtaagaagagtattttattatatgaagcaattcacattgttgcaatgatcggcggagccgctgctccaaatgtatacgtattgtatttattccgtctgattcagggattcggactgggagcgctgctggtagtattatttgcaggcttcacagagtatgtacctggaagaaaccgcggtacatggtccagccgaaattccttcatcggaaactgggcacatccgatttgtaatggtatcgcacttttaattgtatctacaggaatcagcatgaatatgaactggagagtacagtatatcattccttctgtattatccatccttgcatgtatcttcatttacacaaaattcccggaatcaccaagatggctggaagctcagggaagagtggatgaggcagatgaaattttaacaaacattgaaaaagaaatcgaggcggcaaccggaaaacctcttccagaggtaactgaagagccaaaggctgtaaaacagcttccgtattccgcattgttcaaaggaaaattgttaagaagaacgatcgtaggatctctggtattaatcggtatgaatacaattcagtataccttaatgaactggatgccttctatgttatcttctttaggctatgatacttcacagtcacagtttatgacgatgttcggtctgttcggagcgccgtttggaatctttatcgcatctttgattatggataagttccctcgaagagttatgggtgttgcgctccttgtattgatggcggctctcggaattgtcacaggacagcagacgacaatgaatggattgatcctttggactttcctgttaaacactgctatttacatgtatgtatgttacgcatctgccgtatatgtaccagaaatgtggccgacttctgcaaaactgtctggttctggatttagtaatgccatgggtcgtgtcagcaatatcttcttcccattccttgtaacttatgttgcaaacagtgtgggagcaggcggagttttcgtattaatctccattgtggcggcaattatcgctgtcagcgtcctgatctttggtgtagagacaagaggagaatctgtagaggacatcggaaacattgattaaatcgtacgaatagaattatgaaacattccggtatctccgatgaggtacctgaagcgaaaaataggaggtttttcaatgaaaaattcagaagcaattctggtgacaccaaaacaattcgaaattttagaatgcccggttccagatccgaaagaacatgaaattttaatgaaagtcgagtatgtgggaatgtgtggatctgatattcatggattcgaattcggaccgtttatccctccgaaagatccaaatcagaagatcggtctcggacatgaagtggcaggagaggttgtaaaggttggagccaaggttacagatttcaaaccgggagataaggtattgatcgagccgggagtaccggatgattcctgtgaatactgccgtaccgggcgatataacatctgccctgatgtagattttatggcaacacagccaaattacaaaggcgctttatgtgaatatatgacgcatccggcagagtggacctatcatgttccagaaggaatgtctacgatggaagctgcattggtagagccggcagccgttggtatgcatgcggcaattatgggagaggcaagacttggaaagagcattgtcatcttaggagcgggaacgatcggactgatggtacttcaggcttgtttaagcttgggagcaaccgatattaccgtagttgatgttatggataaacgacttgagtttgcaaaggaactgggagcagcgagaacaatcaacggagcgaaagaagataccgtagaagttctccgttccaaagagttattcggagatcacggcgtagaacttgtatttgaatgtgcaggatcagcatttacggcaaatcaggcagttcaggttgtggcaagaggcggaaagattatgatggtcggaacccagtcgaatcctgttccgattgatttcttaaagatcaaccgtgaagttacgattcagacttccttccgttactgcaataacttcccacagacaatcgaggcgattgcaacaggaaagttcaatgtcaaagacatggtaacacatatttatgattacaaagacgtacagcaggcatttacagacgccattgatccggaaaagaaactggacatgatcaaaggtgttgtaaaggtagcagagtaaaaattaagacaggaaaaggagaaaattatgatttcagatatcagatattgggaacagaaagcatccgaaggacattacgcaattcctcactttaatgtatggaatgcagaaatgttaatgggagtcattgacgcggcagaagaactccgcgcaccgattattatttccttcggtacaggatttacaggaaacacttcctttgaagattactgctatatgatggaatctatggcaaagaaggcaaccgttccggtaattcttcactgggatcacggacgcaatatgacgatccttcaaaatgcggtaaatcattgtatgaactctgtgatgagagatgcttctgctcttccttatgagcagaacatttcggaagtcaaaagatgtgttgacttctttcacgcatataacattccggtagaagcagagcttggacatgtgggaaatgaaacagtctatgaggaagcattggcagaatatgcctacacagacccagcacaggcaaaagatttcgtagagcgtacaggatgtgactctctggcagtggcaatcggaaatgttcacggagtttatacttctgagccaaaacttgcctttgatgtattacagaaggttcacgaggaagttgatgttcccttggttctccacggagcttccggaatcggtgatgaagatattaagaaagcgatctctcttggaatcgcaaagattaatatacatacagagctttgccaggctgcaatggaagccattaacaaacataaggatgaaccgttcttagcgctggaacgtgaagtgagacaggcagtgaaagaacgtgcaatgtataagattaaattatttggagatgacggaagggctgatgaataaagtggagaagaaattagatgtagtctgccttggggcagcgattgtagatattcctcttcagccggtatccagagatatttttgatattgaatcctatccggtagaccgcattgccatgacggtaggcggtgatgcaatgaacgaggcgacgattatcagccgcctcggattcaagacaggaatcataagctgtatcggagatgatgcggcaggtcactttattctcggttcctgtgcgaaagatcacattgacacagaaggaatctgtatagatgaaaaaattgacacttccatgaatgtgggactggtaaccggagacggggagagaacctttgtcacaaaccgtaacggaagtctctggaaaacctgtatagatcatgttgattttaacaaaatgaagcaggcgaggattctttctctggcaagtattttcaacaacccattgttagacgggaatgctctggtaaagatttttaaagaagcgaaaaaagaaggaatgatcatcagcgccgatatgatcaaacctcgtcttggagagactctggatgatatcaaggaagcattgagctatgtagattatttcttcccgaactttgacgaagccagtttgatgacaggaaaagacaaggtggaagatgtggcacaggtactctttgactgtggcgtcaaaaatgtcatcgtaaaaattggaaaacgcggatgttatattcagaataaagaaggaaccatgattgtgccggcggcaaaaggaattactgccattgacacgatcggagccggagataactttgcttccggatttatcagtgcggttcttcagggaaaagatatccgggaatgtggaatttacgccaactgtacggcggcagtatccgtacagcatgtaggcgcgaccacaggtgtcaaaaacaaggaaatggtagaagaaatgcttgcaaaataccacagtgattatggcttataaagagatcaagaaaggaaatctgtaatgaaaacaatgaaattaggaaaaacaggaattgatatttcaagaatcggtcttggaacatggtccatcggcggaggttctgcctggggaggagaccatgagcttcagggcgtggtagatacgatcagagaagcgccgaaggcaggagtcaatctgattgacactgctccgggatataatttcggaaacagtgaaaagatccttggaaaagcactggaaggcatgaaacgtgaggatgttgtaatcatcacaaagtgcggtgtaacatgggatcaagaaatgaagggggatctgtttaacaaagtaaacggaattcagttatacaaaaacttaaacagtgaatctgtaaagaaagaaatcgaggaatctcttgagcgccttggcacagattatgttgatgtatatatgacacactggcaggcaatcgagggaagtgaatattacgttccgattcaaaagactatggatgtgttaaatgagttaaaagcacagggaaagattaaggcaatcggagctgccaatgtggacatcaatcacattcaggagtacttaaaatggggagatttggacattgtacaggcgaaatattctatcttagaccgtggaatcgaagatgaaatcatcccttgctgccgtgaaaatggagtgactattcaggcatattctccattggagatgggattattatccggtacattcccaagagattaccagccggtaggagctcagattccgaaaaaatggttccagccggaaaatatgcatgctgccatggacatgatggatgcctggaaaccattgtgcgagaaatataattgtaccattgccaatctggcacttggatggattcttgctcagggagacttcctgaatctgttaagtggttctacaacggtagagcagatcaaagaaaatataaaatctgcggaattggaattagatccaaacgatgtggcagatatgcgtcagatggcagaagatattgacaaatagtttcaatgcctcccgccgtacaggcgggaatcttctccaaataaaataaaagagattccctgagacaaaaagtgtggaaaatcaaaaaaatttagcaaaaaattagcaaaaggtctttgaagtccacgctcgcaatgatagaataaagaaaaaaggaaaagtatttattctatgaaattgagaaaaggggaggagtcccgatgaagaatcgattagaacatattagagaacaagtaaaaaatgaaagaaaagtcacagtatcccagttaagtaaaatatataaggtaacggaagagaccatacgaagagaccttgaaaaactggaggcggaaggatttttgactcggacattcggaggtgcagtgctcaacagtacgtcccagaaagagcacattcacttttaccgaagaatgtccatccagcaggaagaaaagaaaaagattgcgcgggcattctatgacattgtcagtacgaagaggtcgatctcggcggatgcgagtactacagttatggaaatgacaaggcttttaaaaaatcactgcaatctgacgctgcttagcgtatcaacagaaattttccgggagatggcaggatcaaaaattggtattatttgtgcaggcggtgtgttcaatgagggctccctctctctgcaggggaatctgaccaaggaaaatattagaagatatcatgtggatcttgcactcttaagctgtaaagggctgaacatggaaaacggcattatggataccagtgagagagaagcggatgtaaagacagagatgataaaacaggcaacgcaggtagctcttcttgcagatcataccaaatttgacaggacagcctttgttcagtttatggactggaataaggtcacatatctggtgacagatgagaggccatcagatcaatgggtagagttttgcagacagcatgaaattcagctcatctattagaagaaaacaattcgtttagtaagaatctgtgtttgcatcatgaaggagatccccgtatgataaagcggaggtacccaaatgagtgaaaacggaaaaaagaaaatgccgattatgaaaaagatcatgattgcgatggctggaggaattctggtaggaagcctttgtctctggtttcgtgagacgctggtggcaaacgggaatgaagaagtctggaaatggatcaaccggattctcttccaggatatcagtgcagagaagggattttattcccttggattgttatatattatacagcagttgtttatgagaggattgcagctggccattgtgcctctggtattgtcctcattgagtcttgccatgtgcagtatggcagatccgaaaagacttggaaagattgcgggaaaaacaattctgaattttgttgccttttattgtgtcggggcattcttaagtgtatgtttctcctttttcgtaaagtctatgggatggttcaatgtgaaccttcctgcggccagtacgtccggtgtggcaaccatcgaggcatacaatccgctgacaacgattgtggcggcggtgccgtcaaacattgtggaagtgcttggttccaataacagtattattgcggttgttgtcattgccgctgttctcggaatcgctatgaatgcactgggagagaaagcgtcaaccatgaaaaagctgatggaagatctcagcagcattattcagatttacatggattttctgatcaacaagatcagcccggttgcgattttttgtatgctggcaaggacttttgccatctacggaattgagtatgtaaaaccaacctttacctatatggttgcgacaattatcatgagtctggtattggttgttacaatctatccgatcggaattttcctgacaaccagattaaatccattcaagtttgcaaaaaagatatttaaagtaggaatgtttgcggcggcgacacaatcatccgcggcgacacttcctctgaatacaaagacctgtgtggaagagcttggatgcagcaaggacatcagcagttttgtgcttcctacagggatgaccatcaacatgaacggtaccactgccatgcatatagtatccattatgtttattgccacagcagccggaattacactgacaccggcacaaatgattacagccgcatttttatctatttgtgtggcaatgggaacaccgtcaattccggtagcggggacaaccttgatcttcgttattatgtcaggcctcggtctgacttccgaactttgcatggtgggatatgccctgattcttgcaatcagctatctgccgggaatggcagttattacgctgaatgtagtcggggatgcggcaaccaacgtaattgtatgttacaaagaacacgaattagatttagatatttacaattcctgagtacatttgcttatcaggaaaagaaaactccatataattcttgcagaagtcatacatatttgtatgacttctgtttttagtttgcgcgccatgggcgcgctctaacgggtgcaagtcccaaacatgcccaggtagtgggaaatgtatagccgaacggcaagggtgtccatcgtgaggtgaaatctgaaggaagccgaaggcaaatctctggtccgacggacagaaatcgcatataaggctaggtttcgagagatgagttggctagaagcaacaaagtctattaactaccacatttgtagaaacagagtaaatgcggcggacatatggagagaaagagcgtgcaccttaagcgtggaggtctcacagcggtttcattagccgagtaacaacgaactgtgagaagtcagccgagcccatagtagtggagaagtttctgtaatggaaatggagtgaaggggggggaacaatcaatcagttttagtagagtctcgattgcagaaaagacaacatctgccgtaaccaatcgggttaaggatggtcaattcaagcgagacagaaaggaacgaacgcatggatacaagtagtctaatggagcagatattaaataaggataatcttaatacggcatatctgcaagtcgtacggaataaaggtgccgagggtgtggacggaatgatgtacacagaactcaaagaatatcttgaaaagaacggcgaaatcatcaaggagcagttgaggtctagaaaatacaccctcaaaccaatacggagagtggagataccaaagccagacggaggtgtcagaaacctaggagcgccaacagtaacagatcgatttgtacaacaagccattgcacaggtattaaccccaatctatgaggaacagttccatgaacacagttatggatttagaccgaacagatgtgcacagcaagccatcattatagcacttgatatgatgaatgatggaaaggattggatagttaacatggacttggagaagttctttgacatagtaaaccatgataagttaatgacactcatcggcagaacgattaaggatggagatgtaatctcaatcattcgaaagtttctggtaagtggaattatggtagacgatgaatacaaggaatcagtaataggaacactgcaagggggaaatctatcgccacttctagcaaacatcatgctgaatgaactcgatgggaaaatggaagaacgagggctcaactttatcagatacgcagatgactgtatcataatggttcagagtgaaatgtctgcgaggcgtgtaatgaggaatctttcaaagtttattgaagagaaactagggctcaaagtaaatatgacaaagagcaaagtagatagaccaggaggtcttaaatatcttggattcggcttctactatgacagcagagcacatcagtttaaggc

SEQ ID NO: 16 - DNA, 74569 bp, Anaerostipes rhamnosivorans
tgaccgtgtagaagaagttctcactgaaaaaggaatcagtgtgcacaaagcatatgtaggaaattattttacttctcttgaaatgatgggtgtcacactcactgtcatgaagctggatgacgaactgaaagaatgcatcgacatgccttgcgactctgtcggcttgaaacagttgtaagtccggtgtattccaagagaatggagcatcgctggacccaaaacaaattgaaaagtaaacttcctgtgttacaataaatagcagtaggaagcagtctgagtttaaagtgaggagataattatgtcaagttttaaaaacgcggaagcaggagtcattgtagataagcttattaagacaatccaggaacagagagattacttaagcgagattgatggaaagatcggtgacggtgaccacggcattaatatgaataaaggttttaccatgtgtgaggaaaagctcaaaggccagacttacaacatgagtgaaggcctgtgtacccttggggagactcttttggaggatatcggaggttctatggggccgttatacggacttttattcgatgaactttctgcagcaagtgaagataaagacgacattgatgtagaggtattcggagagatgatcaccggagccgtggaagggatccaggagatcagccctgcaaaggttggagacaagactcttttggatacactgatcccagccaaggaagcttttatagaagcgaaggatgcaggaaaggactttgccgaatgtctggatgccatgaatgaagcggcgaaaaaaggatgggaatccaccaaggatctggttgcgaaaatcggacgtgccagccgccttggagagcgttccaggggagttctggatgccggagctacaagttgttattttataatcacaaccatcggggcagctgcaaaagaactgttgaactagaaattggaatgattgacttgaggctttttccgtgatatgctatagcaaatgatattagttatcaataaggaggaagcctatgagtctgacagatgggatcatcctgtttttggcggcggggattgttctctttgtgatatggagattcatctcacgcgtccggcggggagagacagggtgtggctgcggatgtgagggctgttccaaggcctgtccatccaaacaaaaaaaggaaacaaagtgagcaaagagctgtgaggaagtttatcacagctctttgtaatttattagttgacatgtaaaaatatgtatgctatattataaccatagaaagcaccacacagtgcctcttttctggacctcattcagtaagatctatttcatatttcctttggcgttcgccaatcataccccagtgatagacctttagaaccaatagtcagttaagaaagcaacgattccttatttatttttcatcaagagaagaggaatactgtacctggtgctttctttttgtgttataatatctataactgaggaaaaatctatgacattttctacatgatttccgttcggctcttagaatgcctcactccaatcatgtagaaaatggacgtaatgtctgctggagaagggcttctgtcaaaaaggagccacttttcgaaagttattcaccactattggaggagcgcatttcaaaagcgcgacggaaatagtggtgaataactcatacccaaaagggcacaccgtgtctcataccctccgggtaggcgcgtttcgcacgataaggtattgttttgtttataaagaaatgtttttggcccacaaagtggacaagtccctcaacatgagggctgagagaatgaaagtgggcttgcccacattgtttagatatggtattataacattttgtaattattagaacttaggaggaaaaatcatgccagtaaaatacgtatttgtcaccggcggtgttgtttcaggccttggaaaaggaatcactgcagcgtctctgggacgattactgaaagcgagaggttatcacgtaaccagccagaagtttgatccatatatcaatattgacccgggaaccatgaacccgatccagcacggagaagtttttgtgacggatgacggggcggagacagatcttgacctgggacactatgagcgattcatcgatgaaggcctgaacaaaaaatcaaacgtgacaacaggaaaggtttactggaatattttacagaaggaacggcgcggagattacggcggcaacacggttcaggtgatcccgcatgtgaccaatgagatcaagagccgtttttatagaaatgaagaggcaacggaacaggaagtggcgatcatagagatcggtggtactgtgggagatattgagagccagccatttttagaggcgctcagacagttccagcatgaagtgggacatgaaaactgtatcctgatccatgtaacgctgatcccgtatttaaagagctcaggagagttaaagacaaagccgactcaggccagcgtcaaggatctccagggtatgggaatacagccggatattctcgtgtgcagatcggactatcctctggatgacggcatcaagaggaagatcgcgcagttctgtaacgtggaaaaagagcgggtaatccagaacctggatgcggaagtgttatacgaagtgccgttgatgatggaaaatgaacgactggcacatgaagcctgcgcatgcctgcgccttccatgtccggagccggatctttctgaatggcgcaagatgatcgataactggaagcatccgaagcacaaagtggaagtggctctggtagggaagtatgtatcccttcacgatgcatatatcagtgtggtagaatccctggaacatgccggagttgcgaattctgccgatgtgagcatccgctgggtggactctgagagagtcagctcttataatgtggatgagatgctgggaggcgtccagggtattattgttccgggtggtttcggagaccgaggtattgagggcatgatctgttcgattcaatatgcgagggagcataagatcccttatctgggactgtgtctcggtatgcagcttaccattgtggaatttgccagaaatgttcttggctacgcagacgcacacagcaaagaatttaatgaaaacacggaacatccgatgatccatattatggcggatcaggacggagtggtgaatatcggagggacactgaggcttggttcctatccgtgtgtcctggcagacggatccaaggcagaagaactctatggaacgaaagaaatctccgaacgccaccgccaccgctatgaagttaataacaagtatagggatgtactgcaggaaaacggtatgatgctctcaggatgttctccggacggacgtatcgtggagatgattgagatcccgtctcacccattcttcctggcaacacaggcacatccggaatttaaatcaagaccgaacaaggcacatcctctgtttaagggattcattgaagcatcacttaaaaacggaggtatgatttaagaaggaggtaccgcagtatgaagcacgaaatgattggcgctactgtgccggcagtggaagtagaactggaccgaggagaggctatgtttacccagtcgggggcgatggcatggatggatcccgcgatcaagggagattccaagatggagggcgggctgctgaaaggcatcggcagaaagtttgccggagaatctctttttatggtgacttacacatcggagagagacggggcgaagattgcatttgcatccacggttcctggaacaatccttccgcttcagtttcagggaaacggcggcatgatttgccagaagaaggcatttttatgtgcacagcgcagtgtttcattggagacgatctttacgaagaagctttcaacaggagcctttggaggagagggtttcatactgcagagactttcaggaaacggaatggcatttcttgaggtagatggggacgcagtgacgaaggtcctggctcccggagaaacgattcttgtagacaccggaaatgtcgtagcctttgaagatggtgtaagctatgagattgagagaatcaaaggcgttaaaaatatcttcttcggaggagaaggattattcctgaccaaattaaccggccccggaaagatcatattacagactcagaatttcaatgattttgcaggaaggatcgcgtcgcttataccttccggcagctaatttaaagagaacgaatgataaaagaactgtccagagataatcgggcagttctttttggcgtttatagggatgtgatccgagagatggaaaaattttaaatattgttaaaattgtattgctaaatgaaaataaaagtggtatgatattttcataataaaaataaatgaaaacacatgaaaattccaaggagggcattatgcaggtaaaaggtgtaagattgtacggggtggacgacattagattagaagaatttgaactgccggagatcaaagatgatgagatcttagtgaaggtcatcagtgacagtatttgtatgtcaacatggaagacagtaaagcagggagcaaaccataaaagagtgccgaatgacgttgcggatcatccgatattggtgggacatgagtttgcaggcgatattgtgaaagtaggaaagaagtggaaggatcagtttaaacctggacaaaagtttgcccagcagccggccatcccgggtcagatggaatcccctgggtattcttatcagtactgtggcggtgcggcaacctactgcatcttcccgaacgacattatcgagaagggatgtgtatggacatttgagggagacagctactttgacgcatctgtggcagagcctatgtgctgtgtgatcagcggctaccacacaaactaccatacagttccagggaactatgagcatgtgatgggaacaaaagaaggcggaaatatcctgatcttaggcggatgcggacctatgggattaggtgctgtgagctacgcgcttgcatttgagaataagccgaaacgtgttgttgtgaccgatatcagcgacgaccgtgtggaacgcgcaaaacaggtgatttcaatcgaggacgccaaagcggcaggcgtggaactccactatgtgaatactgcagctatggatgaccaggaaaaggaactgatggatatcacagaaggacacggatatgatgatgtattcgtatatgttccgatcacaggcgttgcagaacttggaaataagcttcttgcatacgacggatgcatgaacctctttgcaggacctacagatccgaagttctcagcaaatatgaatctttatgactgtcattactccagaactaaaatcttaggaagcacaggcggaacgattgacgatatgaaagaggccatcaacaaggcagcttccaaggagatcaaacctgcagtcatgatcactcatatcggaggaatcgacgcagttgctgagacaacaaagaatcttccggacatcccaggaggaaagaagcttacttatatgcagtttgacatgccgctgacggcgattgctgatttcagaaagttaggagaaacagatccgttgtacgccaaactggctgacgcatgtgacaaacacaacggattatggaatgtagaagctgagaagatcttatttgagcactttggggcataacaacagatagtgaggtgccaatgtttgcagaggaaagaagagaacaaattctaatatatttaaaaaagcacaaacgggctgaagtgaaggaactcattgaagagttccaggtcacaggggcaactctgagggcggacctgcgggcgatggaagaggaggggtcgattgtccgcacccacggcggcgcactgctgaaagaagatgttctgcagaaagaagacttcttatcactcagaagagggcacgaagaagaaaagaaagccattgccaaaatcgccagagcttatgtgaaagagggagacgcggttatcttggacagcggaagtaccacactggaacttgcgctgctgttaaaagacgcgaaaaacatcaaggttatcaccaacgatcttcagattgcgttggaacttcaggaaaatccgtggattgaactttacattgtcggaggaaaggtgagaaataactttcgtctgacccagggagctattggcactgactttataaaaagcattgcggtaaacaaagtatttctatctcccaacgccctgtccattttcggcggggcaactacgagtaatgaagagatgaaggagatcaagcaggctatgatggaagcggccggcgagatctatatgctctgcgacagctcaaagataggacagagagctttctgtaagtttgccagactgagcgagtttaaactgatgctcacggattccggaatttccaaattagacaaaaatgcaattgaagaacagggacttgaagtaaagatatgcaaatgagggggaatgtttgcatgggaatgaaggagatgaatatatgaaaaacgcagtacaaagatttggaaagtttttgagcgcaatggtcatgccgaatatcggcgcatttattgcatggggattaatcacggccctgtttattgaaaagggatggttcccgaacgcaaaacttgcaactatggttgatccgatgctgaagtacattcttccggtactgattggttatcagggaggtaaactcgtagccggagaccggggcggggtcatcgcagtcatcgccatcctgggtgtgatctgcggaagcaatgaggtcatgttcatgggagcgatggctatgggtccttttgcaggatgggtcatcaagaagtttgacaaggcagtggacggacatattccggccggatttgaaatgctggtcaacaacttctccatcggtatcatcggaatgatcctggcgatcatcggctactacctgatcggaccggttatgacagccatcctgaccgtacttacggcaggagttgatttcctcatcggacacagcctgttaccgctggtatctgtttttgtggagccggcaaaagtattgttcctgaacaatgccattaatcatggtatctttactccgatcggaggagagcaggtacaggcagccgggaaatccatcatgtacatgatcgaggcgaacccaggcgcaggccttggagttctgtccgcatactgggcattttccaaagataaaagaacaaaggattccgcgccaggcgcgatcatcatccactttttcggcggaatccatgagatctatttcccttatgtactgatgaaccctgttgtcatcattgcatccatcgtaggttctgcctgtgcggtattctattactctttgtttaacatcggacttaccggaccggcatcacctggatctatcatcgcttttctaacaatggcgccgaaaggatcaacgctggccgtactgctcggagttgtgatcgctgcggttgtatctttcctcgtagcggctccgatcatcaagatgtccaacggaaagagcctggaagaggcctcagacagtgttcagaatatgaaggccgccagcaaaggtattgcaaaaaaggcaggagagatcaagaagatcgtattcgcctgtgacgcaggtatgggctccagcgccatgggagcgaccaaattcagaaacaggattaagcctttggggcttggcattacagtgatcaattcctctgttgatacggtgcctgccgatacggatgtggttgtatgtcaggaggttttagcagaccgtgcggccaaaagcgcaccaaatgcacagcttgtaacgatcaagaactttctccaggacgaggccattgacggtctgtacgataaactggcccagggccgggaagaaggagccgtctctgtgaaagaacagacagaacaggcgtcttcagggacagaggcaaaaccgatggtcatggtgagggaaggaatcaagctcggacaaaagagtgtctccaaagaagaagccatagaggcagcaggaaaattactttatgagctgggttatgtagaaaaagagtatattgaagccatgcaggagagagaacgcacagtcaccacctatcttggtatgggagttgcgatccctcacggaaccggagatgcgaaaaataaagtcaagaaaaccggtatcgtccttgttcagtatccggacggtgtggatttcggagacgaaaaagcctacttagtgttcggaatcgcaggaatcggcaacgaacatctggaactgcttggaaagatcacacaggtgatcgacagccaggataatcttgacaaattaaaagcagcgggcaatgtccaggatgttctggatatgctgaaatagagtgaaaaagagtgcttttgcagggcaggccggagaaaggactgccctgtagaagcttttgttttgaggaatacatatcatttgacaaataacaaaaaacggtttctttcagagttcataaataagttccttttataaagtcagaaaaaagtaagaaccctggaagggtttcttaaagcggggatgttatgctgtttacacagaaaaatcatgtgtgtaaaaggagggagccgctatggaaacccagttaagcctatttgaatcaatcaaagacctgttatatttaaagccgttgttttttgtgggactggcagtgatcattatattgctatatctggtgtccagggcagacaagacatggcttaacataaaggtattgtgcggttcctgtctaatgtactattacctgtgtattgttttaaagcatattgttggggtcccgacagtaaaagatctagtctggagagctgggatcggggaggcgatttttaatccgaatatcagtctgattccactggctggcggtatcggaatggattttatcctgaacattctttgttttatccccttggggctgctttgcccggttataagcaagagctatggacggatgaaaaagacggttctgtttggactgtggttttcgctggccattgagataagccagatgtttacactgtacagggcaacagacagcagtgacctgatcgcaaatgtcttgggaacagccctaggctggttctgttttaagatggccgcacggcttagaaagactaggaaaccgtacggtgacagcggctccgcgggaaaagatcctgggcggtttttccctggcctgaccttaatgactgcttttatgtttacttttataagctaagataaacattttatgtacgctaaaaatccggagagggatcagagatgatccttttccggatttttaagttttatgaattgacggttgccaaacaaaagaatgcgtggtatgatatttgtgaaatgaaaaaaataataaatttttaaaaataattaaaaatttttgcaaagccaggagggacattatgaaggcaaaaggtgtgagaatgtatggggcaaaggatattcggctggaggagtttgaactgccggagatcaaagaagatgaagtgcttttgaaggtcatgagtgacagcatctgtatgtctacatggaaggaagtaaaacttggaagcggacatatccgtgtaccagacgatatcgcagaccatccggtcatcatcggacatgaattttccggagtgatcgagcaggtcggatctaaatgggcagatgaatataaagaaggggaacgttttgtagtactgccgggtattccggaccagatgggtgcgccgggttattcctatgagcattttggaggtgcagtgacttactgcatcgttccgaatgatgttattgaaaaagggtgtctgctccattatgacggtgatgctttctatgaggtttctgtgtcagagcctatgtactgcatcatcggcggttatatggctaactaccatacaaaacctgagacccatgaacattttatcggggcaaaagaaggcggaaatatcgcaattcttggaggatgcggcccgatggggctgggcgctatcagctatgcgctcgctatggaaaataaacctaaaatggttgtagtcacagagattaatgacgaccgaattaacagggcaagagaagtaatctcagaagaagatgccaaggcgaggggcgttgaacttcattatgtaaatactgcgaagatggacgatgaggtcaaagaactgatggatctcaccggaggagaaggatatcatgatgtgtttgtatacgctccggtaaaagccattgcagagacgggcaacaagatccttgcgtttgacggatgcatgaacctttttgcagggcctgcagacagtggattttccgcagacatgaatttatatgactgccactatagaaatacaaagcttcttggatcttcaggcggcatcaaagcagaccttctggaggcattggatctaatagccaagaaggaagtaaatccggctgttatgatcactcatgtgggaggtatagattctatcgttgatacgaccctgcgtctgccggagattccgggaggaaagaagcttacttatacacagtttgaaatgccgttaactgccattgatgatttcagaaaactgggtgagacagatcctctgtttgcgaagctcgcggatgcctgcgataagaatcagggattatggaataaagaagcagaagagatgttattagatcatttcggagtataatatatgtttgcaagagagcggaaagaagaattgctcgcctacatgaggatacataaaaaggctggcatccatgaattatcggaagaattccatgtgaccggcgccaccataaggtccgacttgagtgaattggagaaagagggacacttgattcggacccacggcggtgcactgttaaaggaagaagaagtcaccaaggaggcatttcttgcctcccggtggaatttaaatcccgataaaaaaaggatcattgccgagggagcaaaggaatatgtcagtgagggtgatatcatcttgatcgacagcggttccaccatgctggagtttgcaaaggttctgacagacttcaacgacttgaaggttgtgacaaacgatttgaacatcgctcttgaactgcaaaaaaaaccttcgattcaggtgatactgattggaggaactgtaaggaaccagtttgattgtacctttggttctctggggattgaattccttgagaggatttctgtggataaattgtttttgtcaccgaatgctttatccgtgtccaaagggctgaccacgccaaatgaggagacggcagcgatgaagcgtgcaatgatgaaaaccgctacggaagcatacatgctgtgcgacagtacgaaaattggacggaaaaccttttgccggtttgcgaggctttgtgattttcagtatctgatcacagatgatgggattggtaatgctgacaaaaaggaacttgaaaaacagggaatgaaggtaaaggtgtgcaggatgaagaccgggagctgactcggtctttatctgaccaccggtaataaatcaaaatttattaaaaaaaaggggagaaaaataatgagaatttttctcctcttttttgtgttgggggaattagtaaaaccaccattttatgcggtttaggagggatctataaggagaaatatgtaagaaaactttgtcaaaaattcttctgcaaaatttaccactggcaatagtggacgtatggaaatacaatcaatataatggaattatagataaacgtttatcaagttaataccattaaccgcagcaacaaattataccaaaaaagaggagaaaaaaggaggattattatggcaagtagttttaaagctaaagtccaaaaaatgggcggattcctttcaggaatggtaatgcctaacattggtgccctgattgcatggggtattatcacagcattatttattcctacaggatatttcccgaatgaaaagatgaatgaactcgtaggcccgacacttaagttcttgattccattgttgtttggatataccggaggtcacacagtatatggaagacgtggtgccgttgcaggtacacttgcaacaatcggtgttatcattggatcagaagcaactatgatgatcggtggtatggtcatgggaccgcttggtgcattgatcatcaaacagtttgacaaattattagaaggacgtgtaaaaccaggtctggaaatgttagtagacaacttctccatggggtatcattggagcactcatgatgatcgcaggattcgttgtgattacaccgctttttgcaggtatcacaaatatcttaacagtgggtgttaactttgctattgatcacagtatccttccatttacaccaatctttgttgtaccaggacaggtattgttcttaaataatgcgatcaatcacggtatttttactccgcttgcgattgaacaggctgcacagacaggaaaatctattctgtatcttgttgaggcaaatggtggtaactgggcaggacttgtacttgcgtttatgttctttggaaaaggtatggcaaagaaatctgcacctggcgcagcaatcatacatatcatcggtggtatcggtgaagtatctttcccttacgctttgatcaaaccagtaacaatccttgggccaatctgtggttctatcgcagcattattctggttccagatcatgggtggtggtgctgttgcagcagtatctcctggatctatcattgcattggcaattatgtctccgaaaggcaagctgctcgtcaacttggcgggatatgtcatagccgctgtggtatcgttcctcatcgtagcgttcttccttaaacgagataagacaccggaggatgaggttgaagaagtaggcggaattgacatgagtcagtttgtggaaagccacagtgctcctggagaagagaaaaaagcaacagcaggagatacaactcttccgaaaaaagaagttaaaaaagtagcatttgcgtgtgacgcaggaatgggatccagcgcaatgggtgcttctatgctgaagacacagctgaacaagattggaatgtttattgatgtcaatcatgtatccatccatcaaatcccagcagatattgatgttattgtaacgaacgaaaacttatatgagactgcgaagaatgcggctcctgcaggagtaccggtcatagcgatcgaaaacttcctggatgcggcagaacaggcagcaatcgcaaagaagattaaagatatgtctgaatagtcaggctgcggcgccataattgaatgattatggcgccttataagtaaaggacctgcaaagatatgctgatgtctaatcgtgtaaaagatataatacagatagtcttaagcagccgtggattcgtgacgatgaaggatattgccaataaaatgaacatttcagagaggacggtttaccgggagattcccgaagtgacagaggtcctcaggcagtatcagattacgctggaaacggtgagcaaaagagggatccgagctatcggtatgccagaaaacatcaaaaagattcaggatgaactgggagaacagacaaagtaccaggtagtagaccccaaggaacgcatgtatttcgtacttttagaactgcttcatcaagaggactttataaagacagaagcattggcgattgatatgggcacctccctgccgacaatccggaacgatcttaaaaagatcgagaaactgcttccggagtacaacattaaattaatctctaaaaaaggagacggaatatgcctgagcggagagcaggttgccagggaccatttgatggtcaacattgtaatgaaaaatacagatgttgacgtgacggtacattggcttgcaggaaacgtcagacagtttcatccgtttatgcagaagttagctgaatacggctatatggaattattccagacttgtgagggaatcttaagagagatcagccataagctgatccagaagaattaccagatactggatcagaattatgctgaacttgtaatgctggttgcactgctgattcgcagacataagctgggcaaccggaaatacagcacagactttgtggtaggagaagttgacaagaaccagagaaaagtgagtgcggcactgatccgtatgctggaaaagaaatattctatttcattggatgaagcagaaaaagaatatatagcatgggtgttaaatatcagtgttggcaagaaaaagaatgaagatgtttttgtcaaaaattttgtgctgaagcctaaaattgaagaatttgttgagctggtggaagggcgtatgggtatatcactcagtcaggatacaaagcttatggacgggctgctggcgcatattgataaggcgctgatacggacgagaagcggaatgagtatatcaaatcccattatccgtgacattgaaaaggattattcgcagctgtttaccatcataagggatacaatcaagaaggtttttccggaggactattttccggatgacgagattgggtatctggtattatattttgcggtatcactggacaacattacaaagaagaccttccgggtgctggtggtatgttccagcgggatggggtcctcaaagatgctggccagccgccttgagagggaaatacctgagatctatgtgagaaagattgtgtctttggtcggactgggagaagaagacctgaatgactatgacttgatactgtcaacgattcctctgtatctaaaggacagagaatatctgaaggtatcgccgctcttaaatgacaacgagttggagattgtcaaagaaaagataagaaggcacaagcatcagactttaaggaagatcgaggaagaggaaagaaaggcggcggagttagaaagcataaacagtattgtatctttaaaacaattaaaacaattaacaacgtgggcagtagacttattaactgaattccatgtgtatgagatcaacaatctgaaggatgaaaaccatctgttttctcatttggagcatacgatctgggaggcgggcatttttatcggagagcaggagatcaaaaactatgtgatccggcatggaaatgaatgcaggtttaccataccgacaacggagatcagttattttgaatgttatttaaagaaaattaaaaaaccgcttcttttcgtctatcatttaaaacaaaaacgaatgatcgatcctcaggagggagatgccatcagtaatatcatatttttcttctatccggcagaaatggatgaagtgcagagaatgttcctgcggtatattaccgaattaatcatcgaagaccgggatatcatgaagttaatagaaaagggtgacgaagaagaaatcaggcaatgctttggacataggttcagacattatataggagaatcaatttaggaggtttcagttatgggagataagaaaagtatttttaacgcggacaacatcagattaaacgcatcttttgcgtcaaaggaagaagcaatccaggcagcaggacagatcctggtagacaacggctatgtaaagaaagaatatattgaagatatgctgaagagggaagaagtggtctctacctatatcggcaatcatatcgcgatcccgcacggcatcgtaaaatccgaagaaaggattatggcttcaggaatttcctttatccaagttcctgagggtgtagactatgaaggaaaaacagccaatgttatcatcggtatcgcaggaaagaacaatgagcacattgaaatcttaggagatatcgcagtggcatgctcagatcttgacaacgtggaaaaacttagaaatgcaaagaccaaagaagaaatactaaatgtatttgcagacgtggtccgctagaataagacggagggaataaaatgaaagcagtacactttggggctggaaagatcggccgcggattcattgcagacttactgcatgacacaggatatgaaatcgtattcgtggacgttaatgagaaagtcaacgaggaactgaacaaataccataattactacttatatgtaattgaagaagactataggagaaaagagattgacaaggtttctgctctttctccgatcacagaagaagacaaagttgtagaggctatcgtggaagcggatgtggttaccacagctgtactggcagataattttccgaaaatcgcaggaacgctcgccaaaggattaaaggccagactggaagcgggaaaagacaggatcaacgtgatcccttgtgagaatgcgttgttcaacggagacctgctgttgaaggagctggtgaacacaggaatcgcatcggaggaagactttttaaaggcagccgcattcccgaacaccgctgtggaccgtatggtattcggaactgacaaagatggcagggacggtattgatatcggtaaggatcatgaactggctgtggaagtcaacaagctggtggacccggaaaagcttccgatcgatggggcagagtatacagacaaccttcaaaagttcctggagagaaaactttataccatcaactgcggccatgcgtggtccggatatatcggaaagctcatgggctatgaaatcatccaggattactttgcagtgccggagaacattgagatgaccagagaggtcatgagggaagtggcagcccttatggtggcaaaacacggatttacggaaaaggatatggaagactatatcacttttgccctgaaccgtttctgtactcctggaatcaaagataccattacccgtatttccagagcgccgatcagaaaactggcgccgaatgaccgtcttgtaggaccaacagttcagtgtgaggaaagaggacttaagaatactctgctgcttcggggaattgctgcaacgttcctgtttgacgtgaaggaagatgagcagtctgtggaactgatgaagtacgtggaggaacatggcattgaagatgcggtaactcactttaccggcattgaatcaggaaccaggatgtttgacgagatcatcaaggattataacgaattaaaggaagggaagtaaaaaatgaaattacagttagcattagacgaaatgaatcttgtggatgcactgcgttttgccgataaggttgcagagcatgttgacatcattgaagtgggtacgccgttcgtcatggatgagggaatgcgtggagtgcgcgaattccatcgtttcttcccggacaaagagattcttgcggatcttaagatcatggacggcggatatctggaagccagctacgcttatgaggcaggggcagcatatgcaacaattctgggtgtctctgataatctgaccattgaaggtgcattaaaggcagccagagattatgacagaaagcttgtagtggatatgatctgcgtggaaaatctcccggcaaggatcgcaaagatggaagagatcggggtggatatcctggctgtccataccggagctgaccagcaggcagccggaagagagccgattcaggaccttcaggttatgacagagcatgcgaaaaaggcccagattgcggtagccggtggcatcaacagcaagaccattgataaatatgttgctctgaaaccagagattatcattgttggatcagcgattggacatgcggatgatcctgtggcggaagctaaagcaatcaaagatgcaatgctttaaattttaaagcacggactggaggaaaagattatgacagaatgtaaaaatatgatggctattctcggcgagttgaccgataatgcaaaagaagtagacaacgatcagatcaaagaggtagagaaactgatcacagaggcaaaaaggatttttgtcggtggtgccggacgttccggatttgctgcaagaggattctcaaaccgtctgatgcatcttggatataccgtatactttgttggagaaccaacgactccatcaattcaggcaggggatctgctcatcgtgggttctggttccggcaatacggcaagccttgtatccaatgcaaagaaggcaaagagtcagggcgcaaaggtagcgaccatcactatgttccctgagaataccatcggatctatggcggatgcagtgatcacacttccgggagttacaaagaaatgtgacaaccatgagggcgcaggaactgtgcaggccgcaggttctggatttgagcagttaagctggattacatatgactgtatggtaatggatttgatgaggatcaccgaccagacggacgacgatctgtttgcgagacacgcgaacatggaataaaaagacagaaagataaaagggggctctttttggggcccctttttaaaaatataaaaccaaaatacatgacagtagggaggaaactttagactatgaaacaggtaatgattgtaggagcgggacgtctcggaaaaggattctttggagaaacatttgacaatgccggttggaagattgcttttttggacaaagatccaaaggtagttgaagagctgaagaaaacaggaagttatcatgtggaagtccacagggtagattccatcgaggaccggacggtgtcaggctatgaggcttatgtctgtgacgaagaatattcctgtatggaagcctttttgaatacggacgtcatcatgatgccgctgtacccgaaagattttaaggaagcagggcattatttatcaaaatgtttcatcgaattctataaaaagcagccagaaaaaaagctgacagccatctgtgtcacaaacaaaaattatctgatccctggcattgtggagaactttcgcgagaagcttcctgaggatgtaaaggcatggtttgataccaacgttgccatcagggattccatcatccgtagaggtacagacgccgcaacccactattctacagatattgtgaccatggcggtggcttcactgttgattcagacaccagtttataatgatttcagcgatgtggaatggctggagttaaacgaccggatcgagatgctcaaagacttaaaagtgtttgccattaacggcccgcatgcatccaccgccttctggggttacctgaaagggtacaagacgattccggattctgagaaagacgaggaaattgcacagattatcggacaggtgcatcaggagatccttgatatgatcggggaagagtatgatatcaccaaggaggaactggataatctggagaatcttccgactccgatgggagagatcccggattccatctaccgggttgcttttgacccaatccgtaaactgtcaaagggagatcgtttgacaggtgcggcagagaactgtctcaagcacggactttcttatgctgcgattgccaaaggaatggcagccggatttgcttactctgatccaaaggatgagaacgctgtggttctccagaaggatatcaaggaactgggtattgaagaggtggtgaagaaatacactggccttgagactgagaatccaattttcaagaaagtagtggaagagtatcaggctctggaaaccagaggattcattaaataacatgtgatgaaaagctgtgcccggaattggtgcacagcttttctttatggggttcattcatcttccagttcttctaataaacgcattcccgcagtgctggtcactgcggatggcagagacaccgataccaagggccatgataaaagggacagtcatggtaccataaaaaccgatgaagaaaaatatatcaaataaaaaatcttatgttacaataaagctgtgttttgaaatctagaagcagtggaaaaagtattggaaagggcgtgtgtgttgtggataacaagtttgatgtcatcattatcggggcaggaccttctgggattttctgcgcctacgagttgtcacagaagaaaccgaaattaaagatactgatgatagaaaaggggcggaggatcgaggaccggttatgcccaaaaagaaagacgaaggtctgcgtgggatgcagaccctgttccatcaccacgggctttgcaggtgcaggagcattttctgacgggaaactctccctgtcgccggatgtgggaggaaatcttccacagatccttggctatgatgagacagaaaagttgttaaaggaatcggatcagatttatctgaagttcggggcagatacaaaagtctacggcctgaacgaagaaagggagatcgcaaggatcagaaaaaaggcgatcagggccaatttaaaactgatcgagtgtccaatccgccatctgggaacggaagaagggtacaaaatataccaaagactccaagaacatctgctcaaagaaggtatccggatggaatttaacactatggtggaaaatattctgatcgaagaaggacaggcgaagggagttgtgacggataaaggggatactttttatgccccagagatcgtggccgcagtgggaagagagggatcagagtggctcagcaatctgtgcagggagcataagattgagacagaggtaggcaccgtggatgtgggtgtccgtgtagaggtgcgggatgagatcatggaagaactaaacaggagcctgtatgaagccaagctggtttactataccccaactttcgatgataaggtccgggttttctgtacgaacccgtcgggggaagtagccacagaatattatgaggacggtctggcagtggtaaacggacatgcatataaggcagaaaaatataagacaaagaataccaatttcgcgatcttagtttcaaaaaactttacgaagccttttaaggaaccaatacagtacggcaaacatattgcacagctgagcaatatgctctgtgacggaaaaattcttgtccagagattcggagattttgtcaggggacggaggacaacggaagaacggctgcttcgcaacaacatcacccctacgctaaaagatgcggtaccaggggacctttccctggtgtttccgtacaggatcatgaaagcaatcgaggagatgatttacgctttggatcaggtaacaccgggtatggccagcgatgagactttgctctatggggtagaagtgaaattctattctaataaggtagtcacagacaaagcatttgaaactaacattaaagggcttagagccatcggagacggggcatctgtcaccagaggacttcagcaggcatctgcaaacggtctgagtgttgccagaagtattttgaaatcgcagctataggataaatgaataaaaatttcaattcttttttgtatttttctattaaaatgaacgaaattctaaaaaacacttacgaacatgattttgaacctgatatactgaaaatgtaaataaaatagaagacagaaatggaaatggtagcgagattataagactctaatcgcagcgaaagttacggtcttatactcacgctgccttttttctgcaaaaatattgtttggagggaattatggaaagaaatcgttttatggaaaaagaaagtgtggggaaattaatgctgaaattctccgtaccttgtattttgtcgctgctggtgtcatccttatataatattgtagaccagatatttataggacaagggatcggctatttagggaacggggctaccaatgtggtattcccagttacgatcatagcacttgctatggccttgatgatcggagacgggtgtgctgcctgtctgagtctctgccagggatgcaaagacacagagagggcacacaaaagcgtcggcaatgccgtggtgatcctcactgcagccggaattatctttactgtgtgtcttttcatttttaaggaccaatttctatatgccttcggagccacagaaaataattttgcatatgcgcaggaatactttctttatatcatgatagggattccgttttttatgttttctaatggtatgaactcgatgatcagggcagacgggagcccgcagttcgcgatgatatctaccctgatcggcgcggtcatcaatgtgattctggaccctgtcacgatctttgtatttcactggggcatgatgggagccgcattggcaacgatcaccgggcagatcgtatctgctcttctggcggtttattatctatgccatatgaaatctgtggatatgaaaaaagagagcttcagcctgaaagctgcaatttccaagaaggttctgtctcttggaatcagcagctttcttacgcagatttctattgtcgccatcatggcagctatgaataatatgcttgtgatctacggggccaggtccagattcggagcagatataccgctcacggtggtggggatcgtcatgaaggtattccagatcgttatcgctttctctgtcggtattgcggcaggctcacagccggtcatcggcttcaattacggtgcaggacttcatctgcgggttaaaaagatatttaagctgatggttgcggcagaggcctgtgtgggttttgtgtctatgatactgtttgagtgctttcctatggagatcatcaaactgttcggaaatgaaaatgcgctttacaatgagtttgcggtcatggcgttcaggacctatctgtgtacgattattttatgctgcattcagaaatcaatcagtatttttcttcaggctttgggaaaaccgtttctgtctatggggctttccctgctcagggactttgtgctaagtgttccgctggtgatcctgctgccgagactgttcggattaaaaggaactttgtactcagcgcctgcagctgacatcatctcctttctcgccgtgatcggcgcggctgtttttgtcttcagacacttaaaagatggcagggacgaaaacaaggaggcagtattacagaaaaagaaagatagagtaaacttagccgcggaataaagataagttttattctattattggacatcacttaaaaacaggttcccgttaagtaggaacctgtttaactacgtcaaatcgagccattcaaagagtgagggagtggaaagaggagcgggcttgtccgctttgttattgatcttcggtgtcttgctgcctaggtgattcaaagtattcccggtttgccttttttcctgcggctttcagccgttccagtccttcctccgggcacagaaaggaaccaataggataaggagttttggtgtaaagtccatgaaaatctgtaccgccggtcataaataagtcatgctctttggaaagtgactctatatgttcttttgtgtgtctgccatttctaggatggtttaattccagtccgtctaacagatgttcttcgatgagcatttccatgagcattggattcttatattctccgggatgggccaggactaccacgccgccgcaggagcggatcagatccactgcttcccgggtggtcatatccttttgggccagtttatatttagaacctgaggaaaagagctcccggtggagttctccaataggagtgccggtatatccaagggaggccagcacctgcatcatatggacttcataaagagttgtgctttcgctggcagcctcaaaaagctgttccttagtgatgggataatcctccatgagtttttcatacatggaaagttttgtctccctctgatattccagataacggtctagctttttttgaagcttttttacatccgcggggtaatagcacagaagatggggttttgtgtctgaagcctcatgaaccgagttaatctcaactccggggatcacatggatacccagctcttctcccagtgccctggcagcagggatagaatgagtggaattgtggtcagtgacggcaatatagtccaggccggttcgttttgcctgagagatcagctggtcgacgttcagagctccgtcagacagcacagtatgtgagtgaagatctgctttcatttttaaattcctcctagtaatttagctgaatatattatatcatgaagataaagcaaaataacacaaatacttacgaaatctaagttttcaggtgctgtggcagtgagagctgaaaggggctgtaaatatgaatttaaaacaattttatcagggaagagatgaggattatccggtgatcctgggacggtttatgggaaatgaaaatctgcttgctaagtttgtcaggaattttcctgatgatcctacctacaaactgctctgcagtgcgatggaagcaagggattgggaacaggtggaaatgtcagcccataccctgaaaggtgtagcagcaaatttaagctttacaaagctgtttcaggcatcggcagatcttgtcaacaccatcagaagcaaagagttggataaggcagaagggttattccaggaagttaaaagagcatatgaagaggtagttcaggatatatccgggctggattaaggttagggaaacgctatggcagaagagaaacggacgctcttgatcgttgatgatgtagaattaaacagggcaatcctgaatgagatattctgcaagagctatcatataattgaggctgtcaacggaaaagacgcccttgatattataacagataaggagaaaaaggtagatctggttctgctggatttagtcatgcctgtcctggatggtttcggtctgatggagattctcagagaaaaagggatattggaacatcttcctgtcgttgtcattacggtggacggctcggaacagattctggaaaaggcatattctatgggggcggaagagatcatcattaaaccgtttaaccccgatattatcagaaggaaggtcaggaacattctatcgatgtacatgagaatggagctgatcagcaatatagggaagctacagcatttgccagaaggagaggcggaagattatggatctgtggatgtcggttctaaagctgagatggaggctctttccagtcgtaccttataccttctggaactggagagggagaagaacagagtcctggccaatctatccggggacattatgtttgactacgatgtcaagtcagacactttgtctttctctgaaaaatactatgaggtgttcggccgggatactatgatcgagaaggtcagcaagaaggtcagcggtaccgatatcatttacgaagaagacaaacaggtgctcatagagaatttaaagggtctgagcatcaataattcaaccatgagggcgcagatccggcttatgacaaaggacagcggatatttatggtatgagtgttttatcaagtccatctgggatatggatgacgagacatgtctttctctgatcggcaagttcgtcaatattgacaagcatcggaaggaaatttcccgttggaaagaggctgctgacaatgatgccctgacagggatcaacaacagaaaaggactggaagagaagatcctcaatattatgaaaagcagctgggactctacaggtgtactgctgtttctggatctggatgactttaaacagatcaatgacagcaaaggccatgcgtttggagataaagtcttgaggactgtagcagagaagatcaaaagctgtgtccgctcaacagatgtggtgggcagaatcggcggagatgaatttattgtctttttaaacgggatcagcggtagaaatgccgcgctcaaaaaagcagaggaaattgaccggaagatccagaatagctgcattggttatcccgttactgtaagcattggcattgcacaatttccagaagatgggtcagagtacgatgtgttgatcaaaagggcggatcaggcactttattattccaagaataagggaaagaaccgatacacattttacgataaaaaaacgaaagacatgccgtttcagtctctgctttccaagaaggacagcgatgaagaagggtgaatgttaatttgagatcatcggaaatcaacgggcaaagaacgtttgatttcctttggtctcatttttttgcgaatcagatttttctctgatacattttcttgatgaatccagtcagagcgtagagaagcatagcgatgatgcacaaaatcacgatagacattaatacccaatccattttaaagagaatggagcgccgaaagagaaaaatgatcggttcagttcatgttacagggatctgtctcatataatgaattaatcaaattgtacggggcatgtcaatggagcatctgaaacgattgacagaagaggaaccgctgcagcggacaaatcaggttttgatgtatgtggcagaacttttgcagcaggaaaacctgatcaccattgatgagagagtttttatgacggaggctctccaggatgaaatataatacagaattacagcgggcggtcctttacgcccgctgttctacggaggaggaaagccagaaagatgccctgcagaagcaggttagggaagggagaaattgtattgagaaaaacggctggctattgtcggatgtctacgtggaggcagtcagcggcacggttgcgggcaggagaagtgagtatcaaagacttttaagagatatgaagcatgacagatacgatattatcgtgatcaaatgcctggaccgcctgatgagggagacaaaggagtggttttatttctgtgataagctgaatcaggagggaaaacggctgtatctgtatctggacggccgtttttttgaaccagaggaagaccaggcgaaccttgtgtcagggattgaagcgatcatggcggagcagtacagcagaaatctgagccgtaagatcaacaatgcccacaaaaacaggcagagatccggggaatcggtagtcctgacctcccgcacatacggataccggaaggagcacaaaaagatcctggtcgacggggagcaggcggatgcggtaaggaagatgttctattactgcagggaaggttttggagggcgcctgatctccaagatgctggagcagcagggcttccgaaatttgaatgggaaacccatcggggaggcaaccatccgccgtatcatcaggaaccctttatataagggagtggctgtgatgaataaagttcattatgattttaacagaaaatgcctgataaagaatccgccggaggagtggatctatcacgaagaagcagtgccggccattgtagatgcgaagttgtgggaggaggccaacaaagccatggaccttcggaccaaaaaagcaggacatggggaagcacgttcaacgggaacttcccatagatcctcccggctttctggaaaacttgtctgtggtttctgtgggtgtccatattataggagtgtgagaaggtgcggaaaaacaggcagaagggttgtagagtggaagtgcagccaatatctctccagagggagaaaaggtcctcagggcgggtgcgataatgtacatgtggatgaaaaggttctcataaggatactggaagaagtaggagaatcatatttcaaaggggacttaccggacagggatgtggtcatagagcaggctatctttattcttcagaatatttttcaaagagaccaggagcagtctgggaagacaaaacagatagagagggatattgaggcggtaaaacatcagcagagacagctgctggatctgcttttgagaggagtggttgatgaggaactctatgtggaaaaaaacaagaagttaaaggagcggatgaagcaaagggaatcagacttagacatgctgagagaatctgaaatccccacaaaacagggagagaaacggctggagcatatcagacatcggctgcaggagaatatcgcagaaacagccgcagcttatgtggccgcggacagtattgaaaacataaaggtatacccagaatatttagaaatccagttttcctcaggcaatgacgttaaaaaggctgaattttgcagtacacggatcccctgtgtcttttcctcatcgtcaaagcttagaagagaacaggaaaaaggagagatcatgcgcttaatggatgagaatccaaggattacggcgaaagagatcgcgcgggagatggagaaaaacatttctttggtcagaaggaggatcgaccagctgagaaaagacaataaaatacggtttgtgggaaagggaggacacggatactgggagtccaagtaaggaatataataattttccccagcccggatgcaaggattccgggctggggaaaagaaggaattgatcacaaggttatcgttttcccttgtcgtggcgcctctttagaaggatggcacacaaaaggctgatcagcgcaatcactgtggaatagattccaacgtagatggtatctccttttccgtagttgatcaggagagtacaaatagtagggactaagcccgcaaccaagaagcttggtacatgatatacaaaggagatgccggaataacgaacctcagtctcaaagtaagaggaccataaggaacttaacacagcccagatcaggttatatgcaatactccatcccaggacaactccggtgatcgtaacaaacaagtttccattgctgagttcaatcacttttaaggttgggatgctcaacactgcagatgcaatacatccgatggcgaaggtttttgttgttccgaatttctgcgcacaccagcctccgaacagtgtgaacggaatcttaaagacacaggcaacgatggtgatgatgtaagtctggatcagcggcattcccagccatcctgtacagtaggataggatccaaacaataaaaatattataaaatgtcccgtcaacccagcgggtaccgcagcctaagagcagggttttccagtagtcttttaccatcgggataaaaccgactttatgtttgattccttccgcttcttcagcctcaagctttgcctgggcttttttatagtcttcggtttccatcatcttccctttctgccgtatgacgatgatggttaagatgatagctgctaaaaatggcactctccaaccccatgagaagaaaatttcttcaggaaggagcagggtaggcacagcgatcaaaatggaagacaaaccgaacccgatgggcaatccgatctgaggaatagcagagtaaaaagcccgcttgttttctggaacgttttcatatgccatcaggatacttccgccccatgtgccgccgcggccaaagcactgtgccagacgcataagctgtaagatgatgacgactccgactccggctgatgcggcggaggggaggatgccaataatggaggtggaaattcccatcatgagcagggatgcatacattgtgaccttccgccccttttgatctccgatatgtccgaagaagattgcgccgaacggaccggcgatataaccgatcgcaaaggacatgtaagacaagatcaaagcggtggtgccgtccccggttgctgaaaagaatactttgttaaagactgtgccggctgccgtaccgtacagcaggaagcagtaccattggactgcgctttcaaataaagtgatggcagcgatttttctaaaatcatttttcttattttccatatgagtttctccctttctcatccatacttttcatgactagtgtccttctccgtcatagtatttaaagggccacggaccggaataatcagcttcggctggaatggtcacataatgggtgttgatcgtatctccctgtaggtcatgaatcaggtaagcagggtttccaaggaagaagcggtctccaccgcctttgaaattgtcttttaattcatccggcgtcacatctggaccgtcttttcttctgaagtctacctccatctgcatggagacagaaggacatgtaacgcatggaatcccgttccacatggtaaaaatactggtgtgcatatggccgcagcacaagcgcacgtttttgtgttttttcagaatctctgcaagccggtccgcctggtcaaatccttcatccatggccggaaggcctgttacaaaaggaggatgatgggtaaaaaccagagttggtttgtcaggatattctgttatttttgtctcaagccattgggctgccttgtcagtcattcctccggaatgacagcctggcttgctggtgtccagcacgatcgtgcggatcggatcatcatcgagggtataacaaatgtaaggtttgatatcttcctttacaggcgtttcagccggaaacatctcaagaaagaaatcgcgtttgtcatgattgcccggcacaatatagcagggacggggaagctggtgtatcttttctcgtatgatctcgtagccctccctggtgcctccgtccgcaagatcacctgtgacgacaaagtattctggcagttcatattccttgagactgcagaaataggctatggtcttgtttaaggctgcgatggtatctgctttttggaaagagagctttccgtcacctctgagatgaaagtctgagatctgaatgattttcatataaatatacctcctgcttaacaatggttttcggtactccggagttaaaaagaaaaatgattcattaaaattttaatgaaaaaacatatcgattgtttttaatatagtgcaattttaactcaataatgcgtttatagcaattatttttatatgttttaatgaaaaaacattaaatttaataaaaatatatttgtaatttgaacaaatataacaaaggaaaagagaataaaattaaaattttaataattagaaaaaggagaaatagtagtgaaggaaaatttagaaaaaatagggattaaatattgcggagggtgcaatcctctctttgatagaaaggagtatgtacagaatttggagaaaaatatgacaattccggtggaacttgcggtggaaggccgggaatatgacttgatttatgttgtgtgtggctgtccggtatgctgtgcagatatttctggattaagatccaaagagtttatttttgtcgctgaaaacgggcgatacataaaaaggacggtgatgactcagtagacagaatctgtgtgctgttttttggatgttgtttgccgcagctctgtttttcaagcatttctcttataatcagtaaagctttgtgctagagtcaaacgagataatatacaaagaaatgaatcaatcagagggggaaggctcatgcctggattaggaacagtcataaatgtcagtctcatactgcttgggggaatctgcgggcttatgttcggagaaagactttcagataactgtagagacagtctgatgaaagtaaacggtgtagcggtatttctcatcggagtctccggagccttaagtaagatttttgtgatccaggatgacacgctggccacacagggtactgtgatgatgaccgtttccttggctgcggggacggtctttggcgagctatgtcatattgattaccagatagaacggtttggaatatggctgaagaaccggtcaggaaacgcaaaggatgttcagttcgtggaaggatttgtgacggcagcatttactgtgtgcataggagccatggccgtcatcggatccattcaggacggggtgtccggtgatcattctattttgatcgcaaaaggggtcttggactttgtgatcatactggtcctggctgcggctatgggcaagggatgtatcttttcagccattcctgtggcggttttccagggaacgattactttactgtcaaattatcttgcgctgatgattacggacggagccatggatcatatatctcttgtgggatctgttttgatttgttgtgttggcattaaccttgtatgggaccaaaagatcagagtggccaatatgctgcctgcggtggtcattgcggcggcatggagctacatattctgaaagagattgaggtagtttatgagggaaaaaaataacgatttaacacaggggtctatttttagggggctttttctttttgccctgcctctgctgggcagcagtctgattcagcagatgtacaatactgttgatctgatgtttgtgggaaatattctgggaaaggaggcctcggcagctgtcggctctaccagtctgcttactgtatgtatcataggattttttaacggtatgggcaccggcgtgggagtcatcacttctcaatactttggggcaaagcagaaacagagtcttacagataccattcacactgcggcaggtctcaccattgtcttatctgcggttgttattgttttcggatggatcgcctgtccggttctgctgaaatggattaacatccccgacaatattatggggctggcgcttacttacatccgtatttattttctcagtgttttttccattgtaagttacaatatcagcgcagggattctgcgggcactcggcaattcccgctcaccaatgacttatcagctgatcggaaggatcgcaaacgtttttgcaaacgcattttttatgtgtgtactaaagctggggatcgcgggagcagcgcttgccaccttgctctcccagaccgtagctgcggttttgaccctgcgccacctttgcatgctgaacgaagaataccgcctgaagttaaggaagatccgtattataccatccatagcgagaagaatatttatcatcggtattcccgaggcggtccgttctatgctgatcacattagccaatctgatcgtacagtctcagatcaacatgttgggagtggacagtatggccgcctatgctgcgtattgtaaagcggaaggctttttatatctcccccagtgggcggtagggcaggcaaataccacttttgttgggcagaatcttggcgctggcaaggtagagcgtgtagagaaaagtacgcgcaccgctttggtcatgggaatcggcattactatggctataagcgctgttgtgctaattttcccacatcaggtattccgtctattctccaatgagccggatatcataagccttggagcgaagattgggcagatgacctttggtttctacttcctatatgcgattgtggaagtactgtccggggctatccggggagcgggaaagagtacgccgccgatggttgtctctctgatcaacatgtgcggtgtgcgtctgatcgttttaaaggttgctctgatgtttatacctacggtcaacggcattgccattgtgttcccgatcacctgggttacaacgagcttatctatcgctctctattataagagtgggcgatggaaaaactcatctgtagtaaaccataataaaatagaagctgtaaaagcagaagagtgttgaaaataaagtaagaaggaaaagatccggcaaagcgtcggtttccgggctgtcgatacagaagtgtcgacagcctttttcattccataggaaagttctgcgaacctccctatggaagaaaaaagccctccggtttgatgaggttgggtaaatgaaaagtaggatcggcgcaaagagaggcggcagagccatatttagaatgcactggtttgatagatgagctagaaagggtttatgtaatatggagtgtgagatatacctgatgaatacagaaaagttctgcggtttttgtaggagtgaagcgaaatgtcaaaaaccgcagaacaggtaaaaagatatatataaatgtaatcgagatgatatgttaagcagaaggaggtttaaagtgccattctgtatatttccatagcgatttcttttgtgagttttacgaagtttccgtgatccggagctccgtggaacatgctgtcggcaagtttaggaacatcttcttccttgcctccgatctcgctgatggtggtcggcattccgatctctttgataaatgcctggtaacgttcgataccttccaaagctgtcttttcaggattctggaaatccatctcgcagccccagactctgacagcaaactgtgcgaatctcataacgtcttctttcatagcgtatttcatccatgatgggaagaggattgccaggcctgcaccatgagaacatccgtaagtgctggaaagctcattttccatgtggtgtgttccccaatcctgggcacgtccggtacctgtgatattgttatgagcaatggttgcagcccacatgatgttggcgcgtgcttcatagtttgctggatcattcatggctctgcggccttctttgatcatacacagcataacgccttccagcatacggtctgtcagttctacatccggagtttttgagaagtagcgttccatacaatgagcgatgatatcagtgataccgctggctgtctggtatggaggaagtgttgtggtgagttcaggattcatgatagaaaacttagggcggagaatatcgccgtcagcgcatctcttgtacataccgtcttcatgtgtaacgacagtatctgtggaagcttcgcttccggaagccgcaagagttacaatggttcctaccgggagagcttcctcaacagcttttccagtgtagaagtcccagaaatctccgtcataagggacgccaagcgcaatagccttagcagagtcgatgacactgccgccgcccagtggaagcataaagtcaacgttttcttttctggccatttcaatgccttcatagacaaggccgctctttgggttagcctctacgccgcctagttcaacatactcaatgccttcagcgtcgagagaagctttcaccctgtccaaaagcccggaacgcttaacggaacctccgccgtaatgcagcataaccttatgtccgccgtatttttttactaactgtccggtctggttttctgtctcttttccaaaaacaaaatatgtagggctgtaaaaagtaaaattatccattatggaacctccttatatggtcaatcattatcttaaaatcattatagatcaaataccggaggaaggttttgctgttcatcttttcttctttgccaaacctcgttttatcgtaatgagtgctgttaattacggaaatctttaatgtcaattttatagcgcttgatgcggtactggaggttctgtctgctcatttttaaaacctgtgcggactttgagatattgccttcattctccattagaatctggcagagtgtattccgctcaatatcctgcagcttgttgtgcagagagtgggaaggctcaggttctgcggcagctgcggacagggaggagatatcttcttctgtcagtaggttctgggggatatattcggaggtgatcaaacactgatcctccggcagcatgatcacggcgtgttccatggcatgctgtaattcccttacatttccaggccagctgtatgtgttgaagatctccagagtgatcgggtcaatacccttaacacacttcaacagcttgctgttaaaactcatcataaaatgcgtggcaaggagagcgatatcctctttccgttctctcagcggagggatattgatattgatcaccccaagacggtaaaataagtcctggcgcagcttattttcggcaatggcctgatggggaggaatattgatgcaggaaagaacccgtacatccacttttatctctgtagatcctccgatccgccggatgatgccgtcctggaggacacgcagcagcttggcctgcagtgagatattcatggaattgatctcatccagcaggagtgtgccgtggtttgcctgttcaaaaaagccgggcctgttttccgcaccggtataggcgcctttgacggagccgaagagcaggctttccaaaagattttctggaagggcggcacagtttatcgccagaaaaggcccgtcagaacggttactggcattatgaatactctgtgcgaacaattcctttcctgttcctgtttcaccgtagatcataacggaagagtcagtcttggcgacctgtctgcattggttgatgactgtccgcataggagagcttacaaaaataatgtcatcaaaagtatatcttgcggacaggacacttttcgttttgttattgccggaagtataatggagcagtttttcccgcaggtcaatgatctgtttgtggaggtcattgacggtgctccagtcttccacaatattaaacgcgcctaaaacctgtccgtctttgatgacaggatgggtatccgcaaccgcatccacctgtttgccgtactttgttgtgtagcggtggcggtggttgaggatcgggcgtctcttttggagtgtttctggaagtgcgcagttttcttcgccgttcatagtatatacatcattcacacattcgcctaggacattttccgccacaagggaatccagcctgactgctgggttgttgaagaaacttaagcggctgtcagaatcacacatgacaatgccctctttgatctggtcaatgacactggtcatcatttcaagctggtaatcgtttgtcccgtcgcggaagacgatgagtcttgtgtgttccggcaggcttatgttctgcggagaaggctggcggagcagatattccccgaactttatattaatataaatagaatcatccttttgttcacagaggggaagcgcaaattcagggacagagttccctgtaagtttcccatttccgtggagaagacggtcaccggtcatattgattgacagtattgtattatcctcagaaatcaacatagctcccaagccatactgagacaaaacctctattaattcctcatggttcatcggtgtacctccctgatttataaccctgatcaactggaaaaaggacaggatcaacaaacgatgcgagcttgatcctgtcacttttgtttatgctattattttaaatatttgagaatttttagtcaatagccgaatcggattttttaataccggcaatgatctttgctaactcttttttattctggaggttgctctgacgggaaatcataatgcgctgagcctgcggagatcctgcgccgtgcatggattctgtacggtatccgacagcggctgcgccaaggcatatgttctcaaggaaacgcatgattttctggcggtcttctgtggagacaccctcatgggccgcaaagtacttgttgcagatctctccaatggtctctccattgcggcctgcaacagtagctgacttgaagtctttttcggaaggcatggtcaccatcagaccgccggcgatatcttctgcaaggcgcacgatctcatatgggaaacgggtaacgttctgtttacagacgtttgccaggagaaggttgatctgataatttccggattttgtcggacagccttcacaggaacatgcgataccgcaggaaaacagtgtctcattgagatgagtcatctcgatcagtttatctttgatatgggaagccttctcagcgccgttgtactctgcggctaaggcagcggcaccgatcaccacatcacctacaccgactttgcatccgccgtagctctggcggtggtatccggcgaagcgttctaccatcataccggagaagtcatattctccgtccataaaaatatattcattcgggataaatacgtcatccaggacaaccaaagcctcctggccgccgaatttagggtttcctacgtcgatgcagccttcttccatttttctcgtatcacaggactggcgtccgtataccatgtagaccccttctgcgtcacttggacatgcaaaggaaacggcataatctttatctgcctctctcatggcaatggtaggcatcataaggtgccagtgagaattgatggaaccagtctggtgaaccttagcccctctgactacgataccgtccggacgtcgttctaccacatggacaaacatatctgggtccggctggtcatgaggtgcctttccccggtctccttttggatctgtcatagctccgtcgactaccaggtcattgtcctggacgaaagtgagaaactttttaaaattgtcgtgataatgtgtgccgtatttttcatccacttcaaaggttgtggaaaatacagcgttgaaagagtccattcccacacagcgctggaaacaggaagctgtcttctgtcccaggagacgctgcattttcacctttttcactaagtcatcggtggactggtgaagatgattgaaccggttgacttttttcccggtgagattggaagtggctgtcatcaaatcttcacattctggatcatgggccaggtcataagtcatcatgatgctgttgatagatggtctcaccatagggtgatctacccagttttctattttctccccaaacatatatacacgggtgttcagttttcttaagctttcaacatattcttgtcctgtcattaatgccataatggaacctccttaattaaatcggttatttggaacatacatctttgcagaagaagcctcctgcaaagatgcgataagtagttattgattatctgccatggcaagataagattcgtagcgttccattgcatctctttctgccttgtcatacagttcctgggctttctcagggaatgcaagtttcagagacgcgtaacggctctcgcccatgaggaattcctggaaatcaccggtcggttttttggaatcgaggatgaatggattctttccgtccttctttaaatccggattgtaccggtacagatgccagtatcctgcgtcaacggctttcttttcttccatgatgctctgacccatactggctttcatatggtgttcgatacatgggcagtagcagatgatcaatgagggaccgtcatatgcttccgcctcgcggattgcctttaaggtctggtttggattaccgcctaatgcaacctgggcaacataaacatatccatagctcatggccatcataccaaggtcttttttcttcgtgtcttttccgcttgccgcaaacttggcaatggcagaggcagctgttgacttggaagcctggcctccggtgttggagtaaacttcagtatccagaacaagaacattgatatctttgccggaagcaagaacatggtccagtccgccgtagccgatatcgtatgcccatccgtcaccgccgaaggcccatacacttttctttgtgaggaattccttgttgtcccggatgaattgtgcttcttcgctgttgttatcctgaatagcggaaagaagttcatcacacacttcacgggtcacttccgggtctttgcctttctcaaggtatttcctgcaggcatccgccgcaaccccttgttccattaacgtctgtactttatctttcagctggttcttgatggcttcctgtcccaacagatatccgtaagcatactctgcattatcttcaaataatgacattgcccaagcaggaccgcagccttttttgtccacacagtatggagaagaaggagtggaaccgccgtaagcagaggagcatccggaagcgttggtgatatacattctttctccgaacagctggctgacaagtttgatatatggagtctctccacagcctgcacatgcaccggaaaattcaaaataaggttttgcgaactggcagtttttgatagaacagctgttgactgcatcctttttgatctccacttcctcaaccgcataggtccagctgtctgcttctttaagctggctgtctaacggtttcataacaagagccttttcctttgacgggcagacattcacacagcttccgcatccggtacagtcatacggagatacctgaatacggaactgatagctttcaagtccttttccaatggctttctttgtctcaaatccatggggagctaaagccttttccgcatctgtgacaaggattgggcggatcgcagcgtgcggacatacgagagagcactggttacactgaatacatttttcagcttcccactgaggaacctctactgcagcaccgcgtttttcgtatttggatgtggcagcaggccatgttccgtcttccagaccgtatttcaccatctgggaaacagtgaggacatccccttcctggcggttcattggttctacaatctctttgataaattccggtacgttcttttcgacagcctcatcctgtgctgtaagccagctttcagggatctggatctcattgagctcattaataccgtgttcaatggaagcggtgttcatatcaacgattgcctggccttttttcttaaagtaggatttataaatcgcatccttcatctcagtcacagccttatcaatcggaatgacaccggaaagtttaaagaaagaggcctgtaaaattgtattggtcctgtttctgagtcccaggtcacgggcgatactgatggcatcaatggtatagaatttcgcatgtttttctgcgagagagcgtttcatggacgcaggaaggtttttctcaagcccttcaagatcccatccgcagttcagtaggaaggttcctccatcctttaagttatgtaccatgtcgtatttatccacataggaaggattgtggcaggccacaaagtcggctgcctggatcagataaggtgatctaatcgggttctttccgaaacgcaggtgagactgtgtaagtccgcctgattttttggagtcatatacgaaatatgcctggcagtacaggtctgtggaattaccgatgatcttaatggagttcttattggctccgacggttccgtctgatcccatgccccagaactccgcactggtctcgccttccggagttgtatcgatttcttctggaactggtagggaagtgaaagtcacatcatccacgattccaacggtaaagttgtttttcggtttatcctgtttcagattctcataaacggccaggatctgtgcaggtgtggtgtcttttgaactgaggccgtagcgtcctccgacgatggtcatcgggatgtcctcttccttaaagattgtacagacgtcctggtacagcggctcacccatggctccgggttcttttgtcctgtccagaacagcaatctttttcactgattttgggattgccttcaggaaataatctgctgcaaaggggcggtacaggtgggcattgatcattccaaccttttctccgtttgcgttcagataatcaatggcttccttagccgtctctgcgccggagcccatcaagataatgatgcgttctgcatccggtgctccgtaataattgtatagatgatagtcacggccggtcagcttgttgatctcctgcatatagtgttcaatggcatccggcatctgagcaagctttgtgttcagagcttcacggcactggaagaagatatccgggtttacggtggttcctcttgttgccgggtgttctggattcagggaattctggcggaatgcctttaacgcatccatatcaaccaacgggcggaggtcttcatagtcaagtgcgtcaatcttctgaatttcgtgggatgttctgaatccgtcaaagaaatgcaggatcggcattctgcagtggatcgtagccagatgtgcaactgcgcctaaatccataacttcctgaggagaagaggatgccagcattccgaaacctgtacttctgacgcccataacatcggaatggtcaccgaaaatagaaagcgcatgggcggaaagcgtacgtgcggaaacatggaatacactcggaagcatttctccggcgatcttatacatattcgggatcatcaggagcagtccctgggaagcggtgtaagtcgttgtcagggctccagactgaagggaaccgtggactgtaccggcagcaccgccttcagactgcatttccaccacttcaaccggctggccgaagaggttctttttaccattggcagcccattcgtctacgaactcggccatcggtgaggatggggtgataggaaagattccggcaacctcggtaaaggcatatgaaatatatgcagcagcctggtttccatccatcaatgcgatttttttggacattatagattacctccttgtgaatcattattaaaaaatagtaatattgacagttccttggccctgtgtaacaggaatttaatgttaaaataatgcatgtataagtttgaaatgcatgcaatttaagtgattacatacagaatagattatgagattcaaattgtcaatgatgaatataaataatctttaagctgaaaatttggtaaagatgtataacagaaataatttgatatgtaaaattttgaggtgtatacttaagcttaagaatgtatataaggaggtgctactataagttcgcaaagtgaaatagcctatgagaagattaaagatatgatttttcacatggaattcctgccagggatcaagatttctgaaccgcagatatccgagaggttatccatcagcaggactccggtgcatgacgcactgcgcagactggctgcggagggattggtaaagatcggtacgaaccgaggagcggcagtggctcagttcaccgatgaggaagtgagagagatcggaacgatccggctgtcccaggatatcctatccgcccagctggcggcttattatggcagtgcggcggattttgagcagctctgccgtctggccgatgtctgtgaggaggcagctgtgaaaggtgatatctatggccgtattaaggctgacaacgatttccacctggagatatccagagtatcagggaattcccatctgtataaacagcaatatgccatataccagcaggttcatttgatacagatctcaaagtatacggatattgaggacagcctgatccagatccaccaccacgtaccgatcattgagtccatccgcaatgcggatcttaaggaagcggccaggctgatctgtgatcatattaaggacttttaccggctggacccttatcttatgaaatgttatgggtacagtcaggatgctgaatgatatccatagttcaacaatgtactgtcaacaatagaagaatttaagaagtgaggcatttgagagatatgtcaaagatgaacagccagttggaagaagaaaacggctccaagctgacaaaccgccagcttcaggcgctggagacaaaaaacaaaatatataatgcggcggtcactgtgatcaatgagaaaggatttcataataccagcatcgaagatatcaccagttacgccgatgttgccaaggggagcttttatacccactttgaatcaaaggaagccattgtcttttatacgtttcagcagtccgatgaaatgtataataaggcatttgcccagattaaggatgaagatttcctggatatgatgattcattttgtaaagatctcttatacagaatatgagaagagaggcaaagggatcatcaaggccattgtctcaagttattttacctttacagactataatttctacagtaaagaccgtgacttgatgaagtgcctgaacaagatcatagagaagggaaaagaacaggaagttctggatatccacattcccacggacagatatgtaaacctgctgctttcaactttagtcggcgttgaggtgatgtggtgcctggatgaccaggggaacagtcttgcggatatgatcgcggacgccgtcaggatcaccacagttggaatgatggcaaaaaattagggttatgattagaaataaaatcgagagaaagagaaagctgtgaatcagaacaaaaaatctggttcacagtttttttgctgttttgcacaagaaaatatttttattttggttgtttttacgctttacaaattggataaaaattaatacaatgaattcaagtcaatgaacttaagtcaataaattaggttcatagaaaatgtatcaagttaattatatgcactggaaacaaaattaaaggaggaaaaacaaatggatatgagttatttaaaggataagccgatcgcgatccttggctgtggcggagttggtaaaacaatggcaggtgactgtgctttggcaggggcaaaggtgcgtatctgggagcaggaagcctttaaaaagaactttaacaacatggagagaacagggatcaaattgacaggtaaccagttcagctactatggctttgaacgccgtggtacagctcatgttgaccttgccacaacagatatggcagaggcagtaaagggagcaggtatcatcgtgatcgctacagtagctatggctcatgaacctattttccgtgaattgatcccattgctggaagacggacaggtaatccacattctaccggataactgtggtacatttattttcagaaaaatcatgcgtgaactgaattgtacaacaaaagtgattgtaggtgcatggtatacagctccttacggtgtccgtattgtaaaacgaggtggagtgacaacgaatgaatgtaaggtagaagaccgtatcacaaccatccgcggtgctgcgcttcctcatacagatacagaagccttcattgaatccgcaaattacataccagctctcgacgcagtgcgcacaggagacggattcgttacaggtgagactgtcatcgatgtaaacctttccaatgtaaaccctgtcatccacgtaccaggaactgttctcggagcagcagttatgcagaactttgatacagtactcggacaggataagaaaaactactctctctacggatttgctctctgccctgccatcgctgaagtgcaggcagtgttctgggaggaagaaaaggccctggccaaagcaatgaacgtaggtttatgtactgttaattatgaggacttcttctcacggacaacaatgtacggcaaagaatacatgggaccggactttgcagtgccgtttgaagaaaaatatgaaaacttctatggtgacggaccattcgacttagagaaccgttatattacagaagatgtaccggtaggctgctacctgatccagcagttaggtaaaaaatacggtgtggctacaccgactgttgacagcatgatctatcttgccaatgttatgatcaaacgtgacctgattgcagaaagcaaatatactttggattaccttgatatcggacatatgaatgatgaacagctccagaaatatatccgtgaaggtgtctatacagaaaaataattagagtcacaattgagaaataatgtgaggcttgattcgaatattgattgattaaacaagggcgcatttcacatatgctggatgtattcggtagaagcaggcagaaagaaatgcgcttttgtcatttgagtaggaagttgttttgcagatccggtgcaaaatagtttgcagcctatggaactggtgcaaaataaatttgcaggcaggtgccagtacagatttctaagccccggcatcgggaaaagcttttgatcaattcgtaaggtttttactacagatttccacttgttgtacccagaagtgtgaatatgaagtggtttggcacgggttttgctatgttatgaagtaaagcgatatcatgtatctcatattttcagggagggttgtgaaatcttatggaaacaaactatgaaggaaaagataaaaagggtatgattctccggttggagagaagctctatctatgacggagatggattccgtacagtagtttttctaaaaggatgtcctttgcgctgttcgtggtgttcaacaccagagagccaaaattttcagatggaagagactgaaaccaagacatatgggcaggagatgacagtagagcaagtcttaaaggaaatacgaaaggatattccgttttactttcattccggagggggcctgtcagtttccggaggcgaaatgctgtgtcagccagagttctcccgctgtttactacagcaggcaaggaaagaaggcatagacaccgcaattgaaacaaccctttttgcaccgtggaaaacggtcgaaccgatactggggcatgttcgtacagtgtttgcagaccttaagtttatggacagtgatttacataaaaaatactgcggcgtagataacaggctgatccttaacaactttttgagaaccaatgactgcagcacacaatttgatctgattgttcggataccagtgatacctggggtcaacgactcaaaagaagagcttaacagaatgggagatttctgtgcacagttaacacatcttgaccatgtgcagctgcttccgtaccatcggcttgggagcgatacctaccgcaaattagggcggccgtatgagctggaaggcctgctttcgccgtcggtagagcatatggaaacatgcagggcagtgatcggacaatatgtcagcaaagtgatttgagagtgataaggaggaaattatgatggatcaggctatgaatattcaaatgttctatgagtgccggggagaacattcacatgattatatgcagattcttgttccacttcaggaatctatgagaattaatatagaagacacagagttcaatgtgacttcccaggagctgtgttttattccagagggaatgaagcatgagtgtaatttttgtggaaaaatgctggttctcaacatggaagattcatctaataacaaggatatgttattcttgaccaatccagtcattgtaccgatgcagggtcagatcctgcagctggtggaactgatccagacagagatcagacagaatccccagagtaaatcggtgcactttctttatgattttctttacagcaagctgatggagaatcatgcaccaccctctatccaatacataagtgaacattatgatctgtctatcacagtaaatgaactggcggagatcgagcgatatagtgtaacatattataatgattggtttaagcaacagaccggtgtatctccgggaaattatctgcgccggatcaggattgataaggccaaagagttacttaagaatacggaattcaacgtgacaaatattgcggtcatggttggatatggcagtaattcaacgtttacaagagctttccgaagcatcacaggaatgactccgaaagcataccgggagagtttttccatcagactctgtccggaaaaacagctggaacgacgcagcagttaatgtatacggagggaaataaccactcaccacgaagggaagcttttatataacagtgggaggtttatatggagacagataaacaaaaaggcaagatttataaagaggttttaatcgttttaggggcactattactgatcgagatcattttaggcgtgttttttacaaaacagttcggagccgttatgtcaaatatgatatatttggttggagataatttcggttggtggatcaatcttttggcagtcgtcatcgtagtcctggggattgtatttgtgatctttaagtatggtgatgttgtgatcggaggaaaggacgcaaagcctgactttacaagatggcagtggtattccatctctatctgcggaggtattggatgcggcttgctgttttgggcaatgggtgaaccgatcttccactttatggaaccgccgatcgcagcaggagttacggcacagagcagaggagcggccatatttgcagtcagtcaggctatgtttgactggtcatttgtgcagtactttatttatgcacttcctgcggtagcttttgcactgctcacatttaattatcaaaaagcattatcgttttcaccggtagtggaggcaacatttaagaaaaataagagatggctgaccacactgcttcatatcctctgtggttatgctgtagccagcggattgtcaaattccatgggagcaggattgatgcagatctccggaggcatcaatgcggtatttggcatcaagcagactcctgttttgtatctggccattacgattatggtagcgggatttttcattttttcctgccttaccggaatcaacaaaggattgacctatgtgtcaagtgcctgcatggtggcatttatcggtcttatgatctatgtgctggtcgcaggtgatgcacagtttatcggcaagatagggacggagtccatgggagatatattaaataacttctggtccaagatcacgtttaacaacacgctggtcccatcggatcaatgggcaaacaaatggagtattacttactggaattcatttttcatctatgctcctgtgatcggtatgttccttgcacgtatgggaaaaggacatacggtccgcgaatttatcttagttgagattcttgtaccatccttgttctgctgtttatttatcgcgatcttcgcaggtacgattatgaatatgcagaccagcggtatcgtggatgtctggggcaaggttcaggaactgggaatgcagacggcgctgtatcaggtgcttggggcaatgccgggaggcaagatcgtacagttcttcttccttatcacagtctgtatgtcatttattacactagcagatccgaatacttcagcgttatcaacactgtgtgtacatggacaggaaattgattcagaaccgccgaagctgttaaagatcattatcggcattgcggtatccgcagttgcttatctgctggtggtgtcgggcggaatggatgcggtaaaaggcctgttgaatgtaggcggcctgctgatgaccataccgaccatatggctgtgctttatgatatttaagctatgtaagccgctgctgaattccaagagccacaggatgaaagatataccgtgctgtgatgaggtcgaaccgccgacaaaaacacttacgacaaaaatgaaagggctgggcctggtggtagatgacagtcccgcagagagtcaacagggaactgaataaataggaacattataatgatattcacgaaaggagcatttaggaatgaaaaaaatgacgaaaaaagcggcggacagaaagtttaaactcggcatgcacagctacacgcttcatctcagtggactgggagagagctggggatttcagagtgaggggaagacttatgcctttgaaaaggtgattgatctggataaattcatggatctggcggtggaggaaggacttgaagttttacatattactttggtggatctggacaaggacacttcaccggaacatctggaagcggtaaaagaaaatgccaagaaacacggcctggatttagaactgaatgtatcgtttaatgcaccatctgatccgagagtcaacgcaaccattgaagaagcgctggaaataggacattccatcggagccacgctggtcaaattcagcactgacgtagagcatccgcacccgatttcccattcctgcatgtgtccggaggctatgactcagatggctgagatcgtgaataactttaaaaagaatatcccaactatcgagaaatacggcatgaagattgccattgaaaaccactgtgatctgttttccgacgaagtcatctggattgtggagcagttgaaccatccactgatcggtgcctgctgtgatacgatcaattcattggtaatgtctgagggtgtgaaagagtgtgtggataagatggctccatattgttactgtgtgcatttctgcgataaccgcgtatttgctgacccggacggaacccattccctgggatgtgccatcggagacggagacattgacgtggttgagatcatgaagattctccgggaaaaagcaccggaagaactggacaccattgatctggagatcgaactcccattgtcaggttatactctggaggacggacggaaagaagagatcacagcaatgcgaaagagtatcaagtatatgaaagaggttctgggaatcggcaccacagaaaaataataaaatcttaatatataaatggagagcggttggtggttacaccggccgttttctatgctgtaaatgatttaaaaattggggaaattaaagtgaaagaaagatctgagaagagcaagtatctgaaaatagacctaaacagagaggcaatcaaaatactggcacttacactttcagctgtcctgacagctgttgatacgaaaacctttattaatacaggacatttgtatccgggcggtgtgggcggagtcacgctgctaatccagagggtggctgcacagtattttgatgtgagtatcggttatatgccggtcaatattttattaaacgctgtacctgtgtacataggattccgtttcctgggaaaacgatttacagcttactcctgttatactattgtgctggcatctgtcattacggatatgataccgtcctacgtggttacctacgatatcctgctcatcagcatttttgggggattgatcggaggatttgccagtgtgctgtgtctgtgggtggacgcaacggcgggaggaactgattttatttccatctacttgtcagttaagagaggaatggatgcatggaatattcttttgggatttaatattatcatcctggcggcggccgggctgctgttcggctgggataaagctctttattcaatcatattccaatatgctttcacccagatcatacaggctttgtatcacaaatatcagcagcagacgctttttatagtgacaaaggaaccgtataaagtcagccaggctatttatgatgtgagttgtcacggggcaaccgttttaagcgggacgggttcctatgaacaaaaggagcggaatgttgtgtactccatcgtatcgaggggagagacaaaacagatcatgaatgccgtaaggaaggtggaccgggaggcctttgtgaatgcaatccggacagaacaggtacggggatatttctaccagaaaccgatagagtgaaattagataatacgaaaaatataaaggcggataatattatgaaggaatcaaaaacggacagcggcatgttacataatttctatgagtcccttaaccagtcctatcggacaggagatgtgcaggggattgagaaatttttgatggattatgaggaatgcctcttggaaagcaaaagaaacaggggaatgcttgtgacagtatataatgaacagggatctttttaccggcagaccggcagataccaccattctatagaagctttccgtaaagcgcaggacgagattgtgttcagtctgggcacaacttgcacggaatatgcggccttggtcaataacatggcaggaacctaccggcttgccggacggcacgatgaggcaatacggttatttcaggatgcggtccgaatctaccgggaggctggggaagaaggcagttatgcctgtgccaatgttcataagaatctctcgctggcctatcaggagacaggaaagacggagcctgctgtcagccatttgagactggcccttgatctggtcaaagacacagaagaccacaagcaggagtccgtggtgatctacagcaacctgacagccctttaccacaaagcagggagcactttaaaagctatacagtgtatggaccaggcgctgcagaattttgagcgatactgtggcataaaaaatgcatactatggagcatcactgaacagcctgggaggatttttgtgtgggctgggcgagtattcccgggcaattgaggtctataaaaaagcggctgactataccttaacctgttttggcccgaatgcagactgcatcagttcttaccagaatatgtactgggcctatatgcatataggagagaggaccaacgccgttcaggcactgactgcttcggcggaggtctgcctgaagctgtttggccctgaacatgagcacaccataacgatccagaacgaactgatgaggatcacgggcagagaatattcagagtattgacttagatgcaaaaactattgcggtaactgcaaataaacaactgaaaattttgcacttttattatttaaaattgactattcgtggagatctataaaaatgtctgataaatagactggtcaaaaagtaaggaaacatcccattttacggccttctctaatttatcttcaaaaaaatatactaaaattctaagattggcacaggttttgctctttaactgagtgtaaagaaaaatcggagaaaacagataaattttattaggaggtaagtaaaaatggcaaaagcatatttaaacaggattgaagctttaagaaaacgttattttgaaacacgtgtagatatggacgtatataatgcaaaatatttgacagaaggttttaaggagtcagagggacagccttggatcattcagaaagctgttggatttaggaatcagtgccttaagaaaaatatttatattcttgacaatgaactgctggtgggcggtgccgcattcaaaccgcgtgcaggcatcctatgtgcggacagctcctgttctatattagaccgtgagcttgatacgatcagcacacgtgagtttgaccccttttatctcagtgaagagggaaagaaaatatttaaagaagaggtttccgactactggaaaaataaatgtctgctggaccgctggcgtgccatggctccggaagacatggagatcctcagggacagcggaatgatctacatcgacagaaaagcggtacgcggctatggcgagactacaccgggatggaccacactgctcaaaaaaggtgtgggcggcatcaagaaagaggcagaggaaaagcttgcacagttggatgactcaaaagttggtgatctggaaaagatgatcttcctgaaagctgagatcattgctgcggaaggtatcatcgcattggcaaaccgtcatgcggatcttgcggaagagatggccgcagaatgtacggatgaaaaacgaaaagcagaactgttaaagatagcagaagtaaaccgcagagtaccggaacatccggcgcgtaacttctacgaagcggttcagtctatgctgacctatgaatatgcgatctatatggaacagaatgcgtcctcttataatctcggaaggatcgaccagtatctgtatccgttctacaaagcagatatggaggcaggcatcctcgatgatgacggagcacaggagcttctggactgtatgtggattaaaatagcggaactttccctgttccaggatgaggtgaccgcacaatttgcggccggctactgcatcactgtccaggttacggcaggaggaatcgaccaatacggcaatgacgcggtaaatgagctctcttataaggtcattcaggcaaccatggatgtgcgcttaaaagagccgaacatgtccatccgctataatatcgctaaaaatccagattccttccttcacaaagcggcagaggctatccgtatgggtctgagcatgccggcagtataccacgacgatgcgggaatccgcatgctgttaaacaaaggcgtacctctcagcgaagcctgggattggaatccatgcggctgtgtggagaccaatctggaagggcgcatgaagcagtacaccgatatggcggacatcaacatgggcggtatcgtggaaatggcactgaacaacggcgtcagcagaaaaaccggaaatcaggtttccgttcagacaggagatccaagagactttaagacatttgaagaattctttgaggctgtaaaagcacacatccgctattttgtagatgttgtcgtatccggagaccagcttttagattacctgagcatgaattaccgtccggtgccgacactttccctgatgtatcctaattgtatggaaacgctcacggactatagcagcgggggagcaaaatataactgcggcggcggtgtgatcacagtgggccaggcagacattataaactccatagcggcagtaaaatatcttgtatatgatgagaaaaagatcaccatggatgagctctgcaaagcattggatgcgaattttgaaggctatgaggaaatccatcagatgtgtatggatgctccgaaatacggaaatgacgatgaacgcgcagacttctgtgtaggtgaaattttcacatatgtcaccgacgagtttgaaaaatatgatacaaaatttggcaagatgacaactggaatgcttccggtatccggaaacacaccgatcggagcatgggtaggagcccttccttccgggcggtatgctggaactcctctcaccgacggaatcggggcaacaggaggaaccgacatcaacgggccgtccgcactgctcaaatccgtaagccacatccctcatgcaaggtttacacagggaacgcagctcaacatgaagctggaaccttctatgctccagggagaagaagggctgcacaacatgatgaatatgttgaagacccagtgtacccttgatatctatcactcccagtttaatgtggtggataaggaaatcctcatggacgcgcagaagcatccggaaaaccataaagatctgctgatccgggtagctggatatacagctttcttcgtggaactaggcaaagaagtacaggatgagatcatcggacgtacagaaatcggtgcctggaatggctgcagtgcagcaagttaataaatgatagacggcaaaaaggcctcctgtaacgggaggcttttttgtgtcataggagattcctacggaaccccctataacataaaaacgctccgcgaggatgcacacgaaatgcgtaaggaaatcatttgactacgtcaaatcgcatttggtgctcaaagttgtcaagcccctcaaagagtcaggggttggggagatgaggtgagcttgcccactttgttcttacctgggaaagctctctgaatcctgccgggacagtaaaaatgcccttcaggcaaaatgaacacaaatgtgtaagagaagtattttgaatatatgtttatagttgtagttattttgttgtaaatgtgttataattgaaacatatctatttattatctagaaaaggaggcaggggaatgaggaaaagtttgaaagtgttattggcagccagcctgttcgtattcatgtttgcggcagcggccccggaaaccagcattcaggcatcaaagtcgagaacgtcagttacttataaactgaagaaggggactttgacgatctcaggtaaaggcaaaatgcctgccaggatgaaatttaggaaaaacaagaagattaaaaaggttattatcaaaaaaggcgttacatccatctccaaagaagcttttatgggatgtaagaatttgaaatcagtttctatctcaaagacagtaaaagaaatcggatggtacagtttctcagggacggcgattaagaaaatcaccattccatctggtgtgaaaaccattggacaggaggctcttggaaactgtaagttattaaaaaatgtaacaatacccgggaaatttaaacttaagacaatgccctatgatgacaaggctgaatgcattacagatgatgatatcggacatattgatatggtgacgtttaatacaaaattatcgatttccaatgtatcctatcttgccgccaagaattttactgtaaaaaaagatgatccaaattttcggagtatccggggtgttatctatacaaagaatggaaaagaaattgtgagagtcccatcggccagaacggagcttgtgattgaagacggatgcacggattttcatatgcagtccgtattatattattctgaagactctgagggcgattttgttaatggctgtgataaactaaaaaaaatcacgatacctcaatctgtcaagcggatcgacaatacaaaatataaaacatcatcttattttaattctgaagttcctgtcgagcatgttgcggtcaacacaaaacagctggacggtcatagcattagtgttctcattaactctcttaattttattggcatcaaagatattgcttcacaactgccagagcagattacatttgatcatgatatgtatattacgaaagacaaagtactgcttaaatatattggaaaaagtgcggcagtcagtataccagacggcgtaaaatctatagaggaaagggcattttatgactgtagcgaaatgaaaacagtaacaattccacagagtgtagaaatgattgagaagtgtgcatttaagtatacaggacttacgaaagttgatctaccattaaatttaaaagaagtatcagaagctgttttttatggatgttcaaaactctcttctattaagatacctgattctgtagcagtcataaaaaaagaggcatttaatgattgcagttcattaaagaccatcacattcggtaaaaacctgaaagagatcagaggaaatgcatttgcaggtacggcatggacggaactggtcattccgaagaacattagaaaaatttataagaatgcatttgtgtcatgcgaagcggcaaaaaaggtcatcattgaaggatcgacaaagaatatcagtgcaaatgcattttggctttgcccaaagctcaccatcacttataaggcatctccgaaaaattatcagacatgcattgatctttatgagagggattatataaagaatggaaaatcaaaaattaagtttggatggacaaaattattcggggtcagcggttatcagatcaagctgagcacagataagaagtttaagaagaacgtaaagacagttacggcaaagaaaactgcaaaaagtaaaacagttacggtgaaaaataagtataagacggaatatgtaaagatcaggccgtacaaagtggtaaacaaaaagaaagtatatggcaggtggtcatcagatagtttataacagcagatcgttacatgtaaaaagctgaaataagaaagcagcggatataggcagaagctgcgtatatccgctattttttgcaagcacagttgtgttatactaaaaaacaagcgacaggccaaaaagttgagagtaaaatcggtaaggaggaaatgcatgctgttaatgatgaaagaccggaaagttttagagactatgccggacggcagtcttaaaatatataacaaacaattggtgccgtttgcattgcaaaaggaagatcttacgtatgaggattttatttttaattggctggcagtacggccgttatccatgggaagaaccaatgcaaagaatattttgaacaatgcgaacataccccagactccattgacgatcgcaaggaccagccatgctctcaatctcacggactgctactgggtcagggaagaaaacgaggctattacatgggaatcaaataacttttatgaccatcctatggatgaggagtacgcagataccgcccttaccggtacaccgcatgcaataaataaggaaaggattcatacgcctgaactgaccgcacagggggtctcagccaaatgctggatacaggaagcagacggtatctacttatataaagtagggaagagagaactgcccgcatcaaaaattttacagcagcttgggatttcccatattttatatgagaaggcagagctatatcagaattatctctccaaagagcgcctagaggagatagaacaatccggagaaatcatcgttaaatcaaagcttatcacgtccaaaaaagttagtatcgtatcgtttgaggagtttgctgtatggtgtgccaatcaggagaaggacgagtttgaggaggccagaagtctggatcctgagagatattatgaaatgcagattgcagattatattttaaacaacagtgaccgccatgtgggcaactggggattttattttgtcacggatgaaaacaggatcacaggtttgtatccattgatggaccacgatcatgcctttgatgagaatgagaatctcatgtcccagacatgggaggggaaaacactgttggaagcggcggcatgtgctcaggctgttcttaaactgccgcttaaaagcgtatttaaaatggagcggccagagtgcttaagtaaccgggaatggaaggcagtgaaaacaagggttcagacccttttagagaaaagcagccgatagagggaggatgtgcggttctatctgtctgcgctcccagctgaacacctggcttccgtagatgatcaggtatccaagtccggagcgcgccgccaaaaactctccgatgatgacgcctactagggaaaggccgatgttgacattcataatactcagcagcagcgggatacagctggggatcaccgccaaggttaggcagtcttttttagaacccccaagagtcctgatgagtgtcaggcgttctctgtccacattcaggaagccgctgtataaattcaaaatactgccgaatactgcaatagatatggcagtgataatgatggtcttcatgttgttcccaagccagacgatgaggattggcgcaagcgctgatttgggaagactgttcagtacgacaagataagggtcgataattttagcagccgtagggaaccaccacaaaaccgttgcgatcagcaccgagaatatggtgatcaacacaaaactcacaagagtttccgccagcgtgaccccgatgtgaaggaatatggaatgatccagcgccatggaataaaagcagcggatgatcctggtcggactgctgaaaataaaaccgttcagtatatctttagaaacggcggtctcccaggcaaataaaagaagtaaaagcagaaggacctgggcaacgcgaatccaatatttctttcgttgaatttgatttaaatattcggactgttctttagaaattggatcagtcattgatttccctccataattgattgaaataatctttaaactccactgcatttcttgcagcttggggcgttttattctcacaggtgagatggattggcacaatggcctttacggttcccggacgtttcgacagcacaatgacccgatcagccatgctgatagcctcggacaggtcgtgggtcacgagaagagccgtctttttttcatcttttatgatacagccaatatcatcagacacctgtagtcttgtctggtagtcaagtgcagagaatggctcatcgagaagaagaatattcggagaaagtgcaagggtacggatcagtgccgccctctggcgcatacctccggaaagctggcttggataagaattcttaaaatcacggagtccgtaaagctccagcagccggtcaactctatcaaatgccccggggtcattgattttttgtatcttaagtccaagggttacattttcataaatggtgcgccagggaagaagctggtccttctggagcatatatccgatatggtcggtggattcttcgattggtacgccgttgatcctgatcgttccgccggatagggggagtaatttagcgatcaaatgtagcatggtggatttcccgcacccgctgggaccgacgactgcgacaaattcaccgcttaagacatcaaaagtgatagaggaaagagctgtggtctcttgcttgagagtatggtatgaataggatacctgctctaaggaaagggcagtggtcattctcatatctcctttcttggaggattataatatagattatgctggagagaaaaaaggtgatattattccttgacatatgaggagccagaagcctataattaaggtgtagacaagagtggattgtctcgtacaatttcatattcatgggtaaaactgtcgaaaggcagtgacacaaagccaagggtctaaagtccatcagaggactatgacagccggttgccacattattcatttaatgtgtatggatataggtatctaacttatatttgaatcgtaagcgcagccgtttgtgaaggaaacttcacagacggtttttctatttttttagaagcgttctgtatttcaatagctggatcattgtattcatcacatggttaacacatccagagcgatgaatggaacaattacatattcagtaaagctgtcgaaagacagcggcacaaagccaagggtctaaggtctggcagcagactatgacagccggttgccgcatgatggggatcatgtgcaggaagagcagagtagggaactgcttttttcaccggtgatttaccgggtttgtgccttgggatcagaggaggcgcatcagctatgaaaaaagcagtcacgaagatttttgcattggcattagcagttattataatagccgcaggtgttgggatgggggtcccggctccgaaacgtgtcgaagcatcaaacaaagtttcagttaaggtcagcacaaccagaaaagtcaaaacaaaaaagtataagttaaagaaaaaggtacgcaggaaaaagacaaccacagtcaagaagatcaaaacaacaaagaaactgacgaaaagtgtttcaaaaaaagttgaaaagatcatccgtaagaacacagtagtcaagaccactatgaaagcgaagcgtaagacggtcaaaactacggtgacgacgaaaactacgacaaagacgacaaatctggccagatcaggaagtgctgatattaaccaattgaaggggatcattgatacaagggtaatcaattcttttaagaagaccggaatgaagattgaaactaatccacgttcctccgtcttaaagggagcagacggagtgttcagcccatctaagaaacggatttatttaaaagccaatgtagaccgcgttcttgtccacgaagtgggacatttcgtagcctatcggcagggaagagctgattcaacaaaagagttcctgtctatctacaaagcagagaagaacaagttcaaaggagacaataaaaagtatgctgtatcctctaacaaggagttttttgcagagtgcttcaaggaatactccatgaacaaatcttccttaaagaagaattgcccgcgctcttataagtacatacagtctgtgatcagcagaatgtgatgaaagtaggagtttaaaaggatgtctcaaaactgtaagtgtaaactatggttttgagacatccttttttgttccattaggaaagttctccgaacctccctatggaagaaaaaagccttgcgggcactgtgcacacaaatgcgtgaggaaactatttgacttgaaaggcctgggcagttatcataagggacggaagaggagaacgtaaacatgcattatgataatataatttcaggtacatttttaaggcggccgaaacggtttctggcgattgtccttattgggggacaggaagaagaggtacatgtgaaaaataccgggcgctgtaaagagctgctcagaccgggtgtcagggtttatctgcagcagcacgacgatcccaagagaaaaacaaagtactctttgatcggagttagaaaagagaatctgctgatcaacatggattcccaggctcccaataaagctgtaggtgaatggcttagacagggaggaatctatccttatatagaagagatcaaggcggagaaaaagtatggcaattccagatttgatttttttatcagaggcggcaatcttatggaggagaccagggatgcatttgttgaggtcaagggggtgaccctggaagaagacgggacagcatggtttccggatgctcccaccgagcggggagtcaagcatatggaggaattgatcagctgtatggaagagggctatgaggcttatattatttttgtgatacagatgaagggcgtccattgtttcaggcccaatgaccgcactcacagagccttcggtgacactctcaggaaggctgccggcgcaggagtccatgtgcttgcggtggactgccttatatcagaagataccatggagatcgacgaggaagttccggtaatcctgaattgacctcagacagcatacagcggcattaaaataaggaagcagtttgtaatatagctgcttccttatttttgtgtcacagataaaagtttattctgctgctggttctgccctggggatggtctggaatattttcctggacttccaagagatcagacagcagatcaagcatgcgccatagaccataagataaggctggttcgccagtacatcgaataaaaatccgtagacagcctgccccagaggctgggaacacatggagagagccatgatacaggagatcacctttccgatcagatgtcccggtgtctgtgcctgaacaaaagaaagcatttgtacagtaaatatagtggagcatgccatcataaagaagctgcagacagtgatcacgatataagctgtcattggagctaagccaaggttcagtacaatcccgatgggaaggagtgctgctccgctggacaaaagaagaagatgtacattctggatattcagccgttttgcaaagatgcctgtgagaataccgcctaaaaggcctcccagggccagtgcaccctgtgcatatccgtagagctggctggacatatggaggatctgtgtgaggatcacgggcagccccacgatcaggagagcacttaaaaacaggttaaaagcgcagacgatcaggataccttttccaataacgggctgttccatgcggatgaaccggaaactttcgctgagatcttgttttacgatagaaagtacactgcttcctttctgaggttttttaaacggtatgtggataaacaattccattgtggcagaaaataagaaacaacctatgctcacatataaaatcgggcggatgccgtagaaaccgtacagagcgccgccggctaccggcccgatcaggttggccagagcattgacctgattgatcactgcattgccggaaagcagccggccaggacttaaaagagccggaaggctggcctggactgcaggttggtaggctccctggataccatagagggccatcagggttatgatcagcagaagtaccagggaaacgtggcccagagcagcagagaacagcaggatcagagcgctggtggcataatcaaggatgaccatgatatttcttttattcacccggtcagcgacaatgccgcctgccggtgaaagcaggatcatgggaataaaggaacaggcagtgacaatgccaaacagtgacgcggatcccgtctcttccagcagatacaggggaagagcaaatctcagaatggaatttccaaacagggaaatgatctgtcctatgactacaagggagaaatccctggtaaaaagtttatcgttcataaaaactcctttcatacattcggttggtatgtaaagatgacaaaaaaataaatagtttccaccagtccccgggagcgtactttttatgtacacatccctgggagtgatgaaaggggtcaggaattctgctccagctgttcccggtaggattccaggacaccgatgatctcatcatccatcagaggcaggcccagtctgtccagcagatcccccataaactgaatcttccgcatgaggtcctcagcggagttctctatgataaatggattcagccagaggttgcagagaatgatcagggcttcggagagttcctttgggtaatccgtttgaatggagccgtctcggatgccctctttcattaacggaagtattaaattggggacggtatcgtttaggctctcaaacagctgttgtgtcagaaaacgggggttctttagaatgtttggagctacctttatcatcatttggttcccgggattcttggtagagacaataaatagacgctttaaacggtccagtccggttccctcaccatttataatatcttgatagcttttttcatgtgcactgtagagtcgttccatgacagcctctataatatcgctttttgatttaaaatgatgatagatggctccttttgttaaatcacccagctcatcaatgatatcctgaatggtcgtatgctcatatcccttttctaaaaataacttaagcgacgcatccaggatccgttgttctgtgatctcggggtatttatttcttgccatgaaatcatcctttctcaattacatactaatggtatgtattcaaagtaacagattggaacaggaaagtcaagaaaaataaaaatagtacttgctttttctatgctaggtgttatactagatatagaacaattaagattggaggagtgaagatgaatattaataagtttactcagaagtcaatagaagcagtaaatcagtgtgagaagattgcttatgacggccaaaatcaggagattgaccaggaacatttattatatagtctgctgaccatagaagacagtttgattttaaaccttttggaaaagatgaatgtgaataaggattccttcttatcccaggtgcaggaactgcttcaaaagaagccgaaggtttcgggaggccaggtatatatgagccaggcgctgaaccaggtgctgcttgccggtgaagatgagatgaaggctatgggagatgagtatgtctccgtggagcatctgtttttggctatgatcaagaagccgaacaacgcagtgaaagagctgttccgaggctacggcatcaccagagatcgtttcctcgaggttttatcacaagtcagaggagataaaaaggttaccacagataacccggaggcaacttatgaaacattagagaaatacggatatgaccttgtaaaacgtgccagagagcagaagctggatccagttatcggaagggacagtgagattagaaatgtggtccgcattctttccaggaaaagcaaaaacaatccggtgctcatcggagaaccgggagttggtaagactgcagttgtagagggccttgcccagaggattgtcaggggagatgtgccggaacagctgaaagacaagacgattttctcattggatatgggatctcttgtggcaggagccaagtacagaggagaatttgaggagcgtctgaaagcggtccttgaggaagtaaaaaagagcgaaggacagatcatcctgtttatagatgaactgcacacgatcgtaggagccggcaagacagaggggtccatggatgcggggaatatgctcaaaccgatgctcgccagaggggagctgcattgtatcggagcgactactctggatgaataccgccagtatattgaaaaagacgcggctctggagcgaagattccagccagtcatggtggatgaacccacggtggaggataccatttccatcctgagggggatcaaggaacgctacgaagtgttccacggcgtaaagatcacagacggttccctggtggcggcagctaccctttccaaccgttatataacggatcggtttcttcctgataaggccattgacctggtggatgaggcttgtgccatgatcaagacagagatgaactccctgccggcagaactggacgaagtccagagaaaaatcatgcagttggagatcgaggaggctgctttaaagaaagaggatgacaacctgagcagggaacgtctcgcagagcttcagagagaactggcggagatgagagaagacttcaatgctaagaaagctacctgggaaaatgaaaaatcttccgtagagcgggtttccaagctgagagaagagatcgaatctgtcaataacgaaatacagattgcccagagaaactatgacctgaacaaagctgcggaactccagtacggacgccttcctgagttgaaaaaacagctggaggaggaagaagaaaaagtacgcagagaagaccgctctatggtaagagaaagcgtcacagacgaagagattgccaagatcatctcccgctggaccggtattccagtggcgaagcttacggagagtgagagaaataagacccttcacctggatgagatcctgcataagagagtggtgggacaggacaacgcagtccagcttgtgacagattccattatccgctccaaggcagggattaaggatccgagcaagccgattggttctttcctcttccttgggccaaccggtgtaggaaagacggagcttgcaaaggcattggcggaaagcctgtttgacaacgaacagaatattgtccgcatagatatgagtgaatatatggagaaacactccgtagcccgtctcatcggggcgcctccgggatatgtgggatatgaagaaggcggacagctgactgaggcagtcaggagaaaaccgtactctgttgtactgtttgacgaagtggagaaggcccaccctgatgtatttaatatcctgctgcaggtgctggatgacgggaggatcacggactccaagggaaggactgtggactttaagaatacgatcctgatcatgacatccaatatcggctccacttatctgctggaaggaattgatcagaacggcaatatcacaaaagaagcagaagatatggtcatggcggacttaaaaaaccatttccgtccggaatttttaaaccgtctggatgagatgatcctgtttaagccgttgacaaaagcaaatatcaccaatatcattgatctgttagtagctggattaaataagcgtctcagtgacaaagagttgtctgtggagcttacgcctgccgctaaaatctatgtggccgacaacggatatgatccgatgtacggtgcaagacctcttaagagatatctgcagaagagcgtggagacactggcagcaaggctgatcctaagcgatggtgtcaacatggaggatacaattttaatcgatcaacaaaacggagagctgacggcgagagttaaataggtgtactaaaatagggtatatgtctaaatgaacgagccttcaaatgttagatttttaggtctgatttggaggttcaaaaattaagacatataccctgtttttttattgaatgaaattgtaaatcgatgtaaaaaatgttataataattaacaggattgaatcgtgtacaaggtggcggcctccctattcattagagaagggaggtggtgtaaatgacagtatttgaagcaatctctttaatgatttctttcagtattttcacagttacactgcttgcctacatagataggaataacaagcataaataaataagcctaccttgttacttgaccggtacaggtaggcttatgccgtttaatggaggtcaaccaccaatgtgggcggttcactcctatattctatttatagtatatcattttggatattttttgtaaagttactttcgatacctgttgccagcacaaaactataaaaaaccgtaatgctccaatgcattccggattccatgggcatcgatatcggttgtcacatactctgccacattttttacacagtcataggcattccccagggcaataccgtgtccggcagcctcaaacatgggaaggtcattgggcgcgtctccgaatgcataacaatcatcctttggtatattaaaatattctgcaatataggtgatggcagtgcccttagaggtgccttccgggatgatttcataaaaactgtcatcatttctgatgcactttaacggaaagtccagagatttaatctgttcaataaaagcggccatattctgcggtgcgtccgggcttgaaaagcagaccagtttgtcaaaggatgcaacatggtcccagctgaattcaatcaccatgccgtcagagcttttgcacacttcgatcatggaagcataatagggatggaacgaagtatcatcgtcggtgaaataagaacagcggcttccctccaggctggcacgaatgctgtatgtgcggcatagatccatgattgccctctggatctgctctggaagctcccggtgatacaaaatgtctccgctgtagcgcagatcagtgccatttccgcagagataaccgtcaaaattcagggaaaagaagtccgtccccacatatgcatacggcctcccggtgtttaagaatatcgtgtgcccgtttgcctgagcccgctttaacgcttcccctgcactgggcgggatctgaccagtcttattgctgtacaaagtctcatccacatcaaaaaataaatacttatgttccaaaaaaattcctccctatcagatgtacaattattactgtgtcaaaagaaatgcttagaacaacaggatgtcctaagcatttcgagtctcattttaagttttattcttccacagtcacggatttcatgacctgtttttccaacggtgcgtcagaataatccgttgccacttccgcaagcttgttaaccacatccattccttcaatgacctgcccgaagccagcgtactgcccgtccagatggggagatgttttatgcatgataaagaactgggaaccggcagaatccgggtccattgcccttgccatagataaaacgccaggggtatgctttaagtcattctgcaccccgtttaagctgaattcacctttgatggtatgtcccggtccgcctgtgccgtttccgttcggacatcctccctggatcataaatccggagataatgcggtgaaaggtcagtccgtcataaaatccttcctttaccagctttacaaaattctctacggtgattggggcaatatccgggtataattctgctttaatgatatcgccgttttccattgtaattgttacgattgggtttgccataattcctattcctttctatgttttcctataccactgattatatagcaaaccaaaagaatgtcaatgaagttacaaatgtattaaaaatattaaaataaattaataaaaagggtggcttttcataacaatatcagtataatgggagataacatatgtcggattatggaggaatttatggggttaagtttttacaaaaagaaaaagaagaaaaagaagctgtggatttttctgctcattttggtcattgctgttttgggagcagcatgctggatgtttaaggtgaaaaaagaagaacgggaacaggcggcggcaaaaaagagggaggaacggacggtcagggtgacgatcccagaaggatatacagcagaacttgtcgctcaaaaactagagaagcaggatgtatgtaaggcggaagactttttgaaagctgccaatgatctggacggatattcctatgactggatcaaatccataccggaaaaggcaaagaccaattataagctgcagggctttttattcccggatacctatgaggtatacaaacatacagacgcaaagaagattgtgggtatgatgctgaacaattttaatacgaaatgggagcaaatctccaaggatggaaagaacagtctgacaccgtatgagattgtgaccctagcgtccgttgtggagagggaggccaaagtggattcagaatacgcaaagatttccggcgtaatctacaaccgtctggataagaagatgaaactccagattgatgccacagtactctatcctctcacaggaggcaaatataataagaagagaacgctgtataaagatctggaagtagactcaccttataacacgtacaaataccaggggctgccggccggaccgatctgcaatccaggggccaacgcactcagggcagcagtttctccgcagaagaattcgtacctatattaccacacagataaaacaggagagggaactcacattttctcagaaacattcagtcagcaccagaaatcattagaaaatcagtcaaaatagacaaaagacactgttattttttggacaagattttcatggagaaaaatgattcataaagtactaaaaaaaatacgaagaaatttgggtaaaatcctttaaaaacccgcctgaatgatgtagaataaagctgtatgcaggattgtatacagttttattttgttctaaacaacggtctcgttgttgtgataacatcctgtctccgctggaaggagcagggaaaaacttaagtgtagattgttaatatttgcacaagattttttaggaggaagaaacatggcaagaaaaatgaaaaccatggatggtaacacagctgcagcacacgtgtcttacgcttttactgagacagctgctatctacccaattacaccatcctcaccaatggcagaatcaacagaccagtgggcaacacagggaaagaaaaatattttcggacatcctgtaaaattagttgaaatgcagtcagagggcggagcagcaggaactgttcacggatctcttgcagcaggcgcattgacaactacatacactgcatctcagggattattactgatgattcctaatatgtacaagatcgcaggtgaattaatgccttgtgtatttgatgtatctgcacgtgcaatcgcatctcatgcactgaatatctttggtgatcactctgacgtttacgcttgtcgccagacaggttttgcaatgctttgcagctccagcgttcaggaagttatggacttaggcgctgttgctcatttatctacaatcaagggaagcgttccagttctccatttcttcgatggattcagaacatctcatgagatccagaagattgaaatgtgggacaacgaagatcttgcagatatggtagattacgatgctcttgaaaagttcagagcaaatgctttgaatccagaacatccggttctccgcggatctgctcagaatccagatatcttcttccaggcaagagaagcatgcaacaaatactacgatgcattcccggcaatcgtcgaagattacatgaaccaggttaatgcaaagatcggtacagattataaattattcaactactacggagctgctgatgctgaatctgttatcattgcaatgggatctgtatgtgagactatcgatgagaccatcgattacttaacagcaaaaggcgaaaaagtcggtgttgttaaagtaagactttacagaccattcgtagctgaaaaattactcgaagttatcccagagactgttaaaacaatcaacgttttagacagaacaaaagaaccgggatctcttggagagccattatacttagacgttgtttctgcattaagaggaacaaaattcgagcaggtaacaatcaacggaggacgttacggattaggatccaaagatacaactcctgctgatatcatctctgtattcaataacaaagataagaaagaattcacagttgcgatcaacgatgatgtgacaaacttatctcttgaaagaggagaagctgtttcttctacaccagaaagcacagtaagctgtaagttctggggtcttggagcagatggtaccgttggtgctaacaagaactccatcaagatcatcggtgaccacactgacaaatatgctcaggcatactttgattatgattccaagaaatccggtggtgttacaatttcccacttacgtttcggcgatgacccgatcaaagcaacttacctgatcaacaaagctgattttgttgcatgtcactgtgctccgtacatgacaaaatacaacatggttcaggacttaaaagatggcggaacattcttgttaaactgtagctggccggtagaagaaatcggagatcatcttccaggacaggtaaaagcttacatggcaaaacacaacatcaagttctatgtgatcgatggtatcaagatcggtaaagagattggacttggcggacgtatcaatactgtacttcagtctgcattcttcaaattatctggaattattccggaagcagacgcgatccagtatatgaaagacgctgctactgcttcttacagcaagaagggtgatcacatcgttaagatgaatcatgacgcgatcgaagctggtgctaagagtgttgtagaagttccggttcctgctgaatgggctgactgcggagaagaaagcttattacatccagtatccggagatagaaaagatcttgttgattatgttaacaacattcagaacgctgtcaatggacagattggtaacagccttaaggtaagcgacttagttccttacgctgacggtcatatgcctcagggatctgctgcatacgaaaaacgtggagttgctgtagacgttcctacatggaatccggacaactgtatccagtgtaacttctgtgcatatgtatgtcctcatgcagttatccgtcctgttgccatgacagaagcagaacttgctgcagcaccggaagctacaaaatctcttccgatgacgggaatgccagattacaaatttgtaatgacaactactgttcttgactgtacaggatgtggttcttgtgcaaatgtctgcccaggtaagaaaggcgagaaagctcttacaatggcaccactcgacagcatgagagatcagcaggaagtttacaactatggacagtctttacctataaaagaagatatctttgacaagtttaaaccagaatctgttaagggaagccagttcaagaaacctctccttgagttctcaggagcttgtgcaggatgtggagagactccatatgcgaaactgatcactcagttattcggagacagaatgtacattgccaatgcgacaggatgttcttctatctggggtggttcttcacctgcaacaccttacacagtaaacagcgaaggacagggaccggcttggtctaactcactgttcgaagacaatgctgagtttggtttaggtatgttcacaggacagaatactttaagagagcagacaaaagaaaaggttgcagcattagcagaatctacagataatgcagatgtaaaagcagcagcggctgaatacttagatacttacacagacggtaagaaaaacggagcagctactaagaaattagttgcagcactggaagcttgcggatgtgaagaaggaaaagaaatccttaagatgaaagattacttatctaagaaatctcagtggatcttcggtggtgacggatgggcttacgacatcggctttggcggtgttgaccatgtacttgcaagtggtgaagatgttaatatctttgtattcgatacagaggtttactctaacaccggcggacaggcatccaaatctacaccggcaggtgcgatcgctcagttcgcagcagcaggtaaggctgtgaagaaaaaagaccttgcagcaatcgcaatgagctacggatatgtatatgttgctcagatctctatgggtgctgattacaatcagacagtcaaagcgatcgcagaggcagaagcttatccaggaccatcactgatcatcggttatgctccatgtatcaaccacggtatcaagggtggaatgagcattgctcagtctgaagaaaagaaagcagttacatcaggatactggaacttattccgtttcaaccctgaattagctgaagaaggaaagaatccattctcattagattctaaagagcctacaacagagtacaatgacttcatcatgggtgaggttcgttacaacgctcttgctcgccagaatcctgagagagctaaggagctgtttgagcaggcagaaaagaatgccaaagaaaaatatgctcgtttgaaagaattagcagataaataaaatatctttagcaaaaatgaagaagtcgggacactgattagcagtatcccggcttctttttttgattctacaattttgttgttgataagtaaacttccatctcatccgttcgctttttgagagagggaaaagattttgaagtctgtgtcaataaacatattttgaccgcgtaaaggagtgcatcacatatggccatagaacacaaatgtgataagggttcttttgtctcattgaacaaagggtgttcttcggtgctggacagaatatgatcagagacccttgccaaaggtgaatcactgtcggaggtaatcgacatgatcgtcattccgatatcttttgcgatatcagcagcctgaagcacttgttttgaagttccggaaccagaaattgcgatcacaacgtcttctttactgccaaggctaacattgttcaaatagtactcggaaatggaactactaaaagactgaacaccaaaccgggaaagccgaaagcttaaatccaatgcaatcggtgtcgtgtttcctgtagctatgatatgaaccgcaggagctttgagcaatataagagcacattgtaacagtacatctttggacaaattggatgagaggtttcttaagttttgaatattgcgttcaaacgtataagaaacaaaatctgtatctgcatcaatgccaatatcattggattttgtgccgatatctctggataaaattaaacgaagctgatagtatccctgataccctagatgtttgcaggttcttacaaccgttgcctcactggtaccgctggctttggcaagttgggatacgttcatcatgacaacttcatccgggtgatcttttatatagtcggcaatttgcttttcctttgaaaataactgttgataaaggttgtcgatgctgtctaaaacattgatttcgcttgacatacaacctcctttcattgttggtgggctgctatgcatataagctaattatagtatagactggatagaagacgcaagacaatctaggataaaatagcagctggttgcacctgcatcaagaacaccgcggcttcgttctcctagacggcttgaccgtccaaccttagctatcatatctttggtagactcccatccttttttagcggcatccctcatggcatccagacattcagaaaaatctttccctgcttcttttgctattatgaaagcttcttttgcagggatcagagtatcaagaagagtcttgtctccaagctttgcaaggctgatctcctggatcccttccacggctccggtgatcatctttccgaatacctctacatcaatgtcctcttgatcttcgcttgcagcagaaagctcatcaaataaaagtccgtataacggccccatagaacctccgatatcctctaaaagagtttccccaagagcacacaggccttcactcatgttataggcttggcctttcagtttatctttacacatggtaaaccctttgttcatattgatgccgtggtcgccgtcaccgatctttccgtcaatctcgcttaagtaatctctctgttcctggattgtcttgatcagatgatcgacgataacgcctgcatctgcatttttaaaacttgacattatctttctccttattatcatttttatccgcactaacaggaatagctacacggtttattctggcttctcgtgtcattccctgcagctgctttaagccgacagagttgcaaggcatgtcgatgcattcttccagttcgtcatccagcttcatgacagtgagtgtgacacccatcatttcaagagaagtaaaataatttcctacatatgctttgtgcacactgattcctttttcagtgagaacttcttctacacggtca

SEQ ID NO: 17 - DNA, 73677 bp, Anaerostipes rhamnosivorans
cttctatatagtccattaaatatcctgaagaagtgcaaataagtattccctgtagtgcctctattggccacttccccttaaatttctctttttcctttatccaggcaaaaatgaatataaaaattgcaagtagcaatataatcaataacaatattttttctatttttataattgccctcaaattatcatattgactttgtgtaagatacaaatatccaaaattcatactactccctcttttttctcgccatggccgtacaaaaggtagtataagttcattcttatcacttgtaaaaatatcctttttttcactttacatcttcccttctaactagctcatgtttttttcaataactaattgttcattaaaatctttatatttagcttttggagattcaacccatgtttcaaacttctgtaactgatattcatggattaatcgctcagttgctgctttcccccacttatcattgtccaaacttattattaacttatgtatttgtggaaatcgtttcaaatagctttgaatcggaacatctgccaaacagcaaagcgccaagtgatgatctttccataattccttctgattccattttatacataaagtcaaatagctcatgaggtcaataggtgcttcataaatgtgtagagtgtctgttgttccctccatacagaaagtaaatcgtttgtcactgctttcaacttctcctttaaaaggattgtttgatactgtccctcgaatcgcacagtgcctggccacaccaaactcatcatatccaacaaagacacagctgtgatgcgtattttcatataatttttttgtctttacaaaataatctacaattctatgatcaatcccccttgtttgaatcaaataagcatatacatggcgaaaatcttgtgctgcagcgggcaatttaaattcctttttcaccgtatttgactgtctttcatgaattgtctccatatgatcattgttaagaagatacttcattgcctgtacaaaatcatatccaagaataaactgcaccaattgaataggcccacccccatatattctctcaccagagagctgtgcagcaaaacaattccattgatttctatattcatcaatatataagcctccataacctggcgctttatatgcattttttttcttttccatttttaaacccaaattttttacaagtgatagtatgctaacttcatttgccttttttatttcatcctcagaaaattttttctttttatacatcaaatcccccttttcttaattttaatcatcaaggctacttagaaatattaatggtgggagaagataaatggtgattttatagttttataatatttctaagcaccctggagaactaaaaaggatccgacacaagtcggatccagctttgtttttctctaatcaactgtaaggccagcgagtctggccaattctataatagaactttttgaaactttcttaccattgtactcaacaagatcatccatttcgcctgtaaagatgtctgctggactatacttcttcaatataattgtatcttcatcaacgaagatttcaaggggatccctctcattcacatccagattacgtctcaactcgattggcagcgtgatacgtcctaactcatcaagctttctcacaatacctgtacttttcatttttgttttcctcctttagttatatttaacgaattcaccactagcattattataccaatatttaaccgttcttccaattagatttcattccccctcttgcccttcatgaaaatacatctctagcgccttaattatgatttcttcaacttctgcctgcggctgttcaggtcggaagtatttcttaaatacttttttgttcattttatagctattctgcttttttcgaggtttcaatgtaccttctaaaatttttagcattgtatctgcattcagttttcctttttgatagtaggaagcaagactctgtgctgtttttgtatctaattttttattcttattttctaaatagaaaaagagctgctcttgcagctcctctggaaactctgctacttccaatccagaaacaaccggtaacaatttattgtccagtaattttttcaaatttgaagttaatttatgaagtttcatgtagcgggtgacagttgatctacttaaattaaattcttttgccgcagtcgttgtctctggatctttttctaaatcagtcctccggccttgagcttttaaagctgcatgtctccgatagattaattcgattttttcagactcagaaaaatgatcaagccctttttctaagtttgattcgataaaaacaagttccgcctgagtgtcatcacactcttttatgatgcatggaacagtgtccaaatcagctaaaattgcaccatcttttcggttatgcccagctaaaatttcataaacatcgttttctatcggtcttatcaaaacaggctgtagaatcccatgctctttaatggaatccgccagatcctgtagatcctgatcattatatctttttttacctatgtcactttttcgataatcgacaagtctatcaggagatatgttaacaatttcatttctattttggttttcttcgtttaagttatcttcggaatcatcaagtccaaatatagtatctatactttttagttcattaatcattttttaatacctccagagccagctgccgataagcttctgcagctttatttttatggttaaattctcttatagtttttccctgccggattgctgtacccacgtcaatgcttctaggaattctagcactgtagatatttaactttccatatgcattttctatcaagttaatcatttccttggccaatcttgtttgttcctgtaccattgtaaaaagaattccttctatttttaatcctggatttaattttctttttgtttttgcgaccgatcctaataattgttccaggccttttgcgctcaaaaactccgccgatgccggtatcaaaacactatcagctgctgaaagagcattaaccgttagcattccgagtgatggcccacagtcgattaatatgtaatcatatccttctttgtacttttgcagaatgttttttaaaatcatctctctacaagttgtattaattaatgatacttctacagcggataatgttatattggctggaattaaatctacataatctaactctaagactatatcctctttagccggcaactgatcatcgttcatttctgctagcataagatcactcacgctttgaatttcctcatcccgaacaccaagagctatagataaacttccctgtggatcaaaatctactaaaaggacatttttgtacttcttagccaactcggtccctaaattaattgttgttgtggttttccccacaccacccttttgatttacaactgcgattactttctctttcataatgcttctccttttcttttttctgtttctgtattttctctttcacaacaaaaagaggacagctgcagctgccctccattataaaagagaagcccgtttttgtttttatgggtcgatagcccaaccctaaaaattagttatctttgtctctttctaagtcagataatcttttcattttgttatctagtttttcagtggtttttatctccggtaaattgctccatgaatgatgttctccctttctaaaaggcgaattgtttaatgttattgataattcctcgatcgccaataactcttcaaaagttatctttctgtcaaaatagttatttttcatattagaagttactccttccataacagaggttaaaaatttttatataaaaaaagaaccattgattttttcaatgattcttcggattttcattatattaaagtcttttaagacaccatatatataatcttttgacaccaattccgcaccaatttcataacaagttataaaaatttataagaaactatgtgaaattagtattcttcatacctcccgttatatctcataagatgacgtataaacaagcctttcctacagatcataaggggtcgcctgataaacgtaataattcagccaattataatacatagcattggcatggcatctccaagatttcaccggtccttttttcggatcgtcatccagataataattctttggaatctcaggattaagtccccgattgatatcccttacatactcctggtgcagcgacatcacatcatattcaggatgccctgtgacaaagatctggcttccgtcctcgtttaagatcagatatggtccggtttcctctgattcagccactacagttaattctttacactgtctgattgcctctccgtccacaccagtgtttctggaatggggaacaaaaaagtagtcatcaaatcctctcaccagcagagtttttttatgaaggggatgatggcggtatacacccgagatcttttgatccagcacattttttttcactccataatgataatacaatcctgcctgagcggcccagcagatatgtaaggtggacgtaacattctttttcgtccactccatgatctccgcaacttcttcccaataatcaacatcctcaaattctttcagttccacaggagcccccgttatgatcatcccgtcaaattttttatctctcacatcatcaaaatatacataaaatttttccatgtgggattccggtacatgcgttggttcataggatgccgtctttaaaaaagtaatatcgatctgcaatggagtattagaaagactcctgagcagatgcagctctgtatccagtttatttggcatcagatttaagattgctatcctcagaggccggatatcctgtgtcactgctcggtctatatccattacaaacacattctcttcttccaggatagcccttgccggcaggtccgtatcaattcttatcggcataattacacgctcctttactcttatttcttcttttttatcacaaatccctttgttttaaccattgtacttccggagattgtattgtacttgatataaaggctgcctttaaatcctttctttaccttgacagtcctaccggtcttccagcggtacctggtactgctctttccctttttcaccagtttatactgaatactcttaattctcgtaaaagactgcggttttgccttgattgagattttcagcggctttttttctttgacattatatatatctttagaatcaacggaaacgatatccagctttttctttccattggacttcaccgacatctttttcagaagaagagaagactttttagatgaaatataggtactggctttggcaggctcatttttatttcttgaagtactgacactcaacttacttccgttggaagccacgataatattaccgttatcgcctgtagtataaatattagacttggaaagttccctagtaatcagaccagagggcactttgtctttatttctatacccattgcttataattgatattgcaggcttcaccttgtcaaaaaactttttatggttggacgaaaatctgccttttgcatccttgttacgtacatcctcatatccgtgatgtggaaccttcagcacctgggatttgagattcagtttcttatttatcatgttgtattcagtttcctgctgggtatcccctgccataagaaacgaattccttccgtaagtaattctgcacaccagtgaaaatttgttaatctgccgggaattataatcaacttctcgtccatacttaaaattgccccgtccaggtgaataaaatgtcagctttgctttgcctagataaattgaggacttcatccgtgggacgaccaccggtatctcccgctttttaatcagttgattgacagtatggtacgtttttgtactataaaaatcatcatctcccgaataatgattataaactggctgctgtgtggcatacactgttcctacagagattgaccgatctttcagtatggaaataaatcctccgatatggtccttgtgaggatgtgtcatgataacaaattccagccttcggatcttatacttttttaaatagttatgtactctctggcctacattgaccgttttgccgcccagaagctgtgtagtttgaggtcctgcatcgatcaatgcgtattttgcactctttcctgagccatactgaagcatggcaccgtctccggtgccaacctcaatgaaatgcactttaaatgcagatgcagcttctgcctgtttttcatttcccataaacgctgctgccgcggacgtgacgatcatcactgctgccagcatccatgaaataattcttcgtttcatcctatatcttccttattttatcatgtccataaattcctcttccgttaaaatcggtatttccagctccctggcctttttattttttgatgacgaagaattcctgtcattgttgatcagatagtccgtcttttttgtcacagaacctgtggcttttcctccgagtgcttcgatctgctcctgcagctgcttccggttttcataatgattcagggacccggtgatcacaaaggtcttaccttccaattttttctccgtgtccggctcctcctgcttctggatctccacatactcaagcaggccgtccacagtctgtctgttattttccagaaggaaatactggctcacggactcaccgatgatcggtccgatgccgtcgatcaccgtaaaatcttccgcctgcgcagtccggatggcatccaggtcatccccaaaatgcctgcagataagttttgcgttggaaagacccacgttggcaatcccaagcccataaagaaacttgggaagagtggctttcttggactgttctatggcatccacaaggttggaaaatgacttctctccgaatccttccatctccacgatctcttctttgtgttctttcagtgtgtacaaatcataaagctctgttaaaagccccttttccatcagcttgtgcaaagaagcttcagacaacccgtccacgttcatcgcgtctctcgacacaaaatgcgaaaaaagcttgatctttttggcactacagaattgattgggacagactagtgtccggatgccgttctcttcctcaatctctgtcttcccgccgcacgcaggacaggtatcggggatagcggcgttgccgcttctggtatggttttgggccagctgtgggatgatcatattagccttgtagactgaaatctggtctccgactcccagttccaattcctccatgacactgatattgtggaggctggcacggctgaccgtggaaccctccagttccacaggatcaaagatggccaccggattgataagccctgttctggaaggactccattcgatctcctccaatgtggtctccgcgatttcgtcggcccatttaaaggcaatggaatcccttggaaatttagcagtggttcccaggcttctgccgtaagcaatatcatcatagatcagcacaagtccgtctgacggctggtcattgctctcgatcttcttagagaaagactctacctcagaagccactgtatccgatgtgacagtcacataatccaccatgtcaaaaccaaggccctttgcccagataaacttttcttccacagaattatggaaatccacatctggaacatcagctacggaaaaaccataaaaacggacattccgcttagctgtcacctcattattcagctgtcttacagaaccgctgcatagattccttggattcttatatctactgtccagatcttccaattcttcattcattcttttaaagtcagaatagtggatcactgcctcaccgcgtatcaccagatttcctttgtaggcaatctttttcggcagattcacaaataccctggcattgttggtcaccacctcgccgacttccccgtttccccgggtaacggcctttgacaggactccatcctggtaggtgagaacgattgtaagcccatccagcttccacgaaagcagccccttttgatctcccagccattctgccagttctcccacttcctttgtcttatccagggaaagcattggagatgtgtgggcctccttttccagggacgtcaaaagctcatatcctacatggacagagggactgtccgccagcaccgtatctgtttctttctccagctccaaaagctcatcgtagagcttgtcatattcaaaattactcatgatctctttattttcctgatagtaggctttcgacgcctcactcaggatctggatcagttctttcattcggtcaaacttatctttcacaggtcagttcctcttttaacttttttatttcctccggcgtaagcttccggaaggatccttcttttaaaccaccaagcctgatattcataacccggactcttcttagtttggtaaccctgtagccaaaatattcacacattcggcggatctggcggtttaaaccctgggtcaggataatacggaagctgtccggtccttcttttttcacactgcattttctcgtgaccgtgttgagatccgcaagaggcaccccgtttctcatcccctgtataaactcgttggtaatccgtttgttgacggtcacctcatattctttttcgtgataattccgggctttcatgatctcattggccgcgtcaccgtcattagtcaaaaggatcagtccctgggagtccttgtccagacggcccacaggataaatccttactgggtaaccgacagcatcgataatattgtttttttcctctttgctggatgtacacacaatacctttgggcttatgataggccagatatacaacctggcggtccatatgtaccggttttccctcaaagcagacttcctgtccttccatgaccttagtccccggctcagccagtattccatccactgtcacttttccctgttctatataaaaatcagcctgccttctggaacaaaggcctgcctggcttaaatacttattgatcctcacggcggaggattcactccgtctttcttccttcatgttctctcctgtttacttccaattttcgtactttacgattgtaccacgattgactaaaaaatgcacgtgtccatggacggttcccggatcgtccggggtatcttacatctcctgtgcaaaataccccagatcgcctaaaacttcttttgccttttctatcaaagcgtcatcatcctcaggcagaataatgcttttttcgttcagttctacttccgcctcaatccctgcgtccatcagaccgattttgatccggtccacacaatggtcgcacatcatctcgtcggattttaaaactttcatttctttcctccttgtagcccactcggtgttcttgtcttcttgtcagcgttcccacttgtcgcagagcgcattgatctgatccgcaaatttggccaggtctttattggccccgccctcactccttcgaatcacagacagcaggcgctcacctgccgccaaaagcctggcatacacagcgttagccctcttggtcccttttctggcctctggcaccttcttcggtgcgacacgaaggagccattctcctgtctccaagtcaaaagtatctccgctgtatggagcttctgctttcatcccatactcatgctccagatattccgcaaaaatatcacaggtctcatcctctccgtggacgataaaatatttctccggcttttctttaaatgccgatgcccagacggaaagcccttgtttgtccgcatggccgctcataccttccaggcgcaccacgtcggcttcgactttgatcgtttctccgaacagacggacttcacttgccccttcaaccagagcgcgccctaatgtcccataagcctgatagcccacaaatacaattgtattttcaggcttccatagattatgctttaaatggtgacggatccgtcctgcctcacacattccggaagctgagatgatcactttccggtcttcgtcaaagttaatagccttggaatcaatacttgtgatggatagttttaagtttgaaaaggtcagaggattaatgccctggttgatcagtgccatggcatcctcatcaaatgtgtcgtggatattttcctggaacacattggtggcttccactgccaggggactgtccacatacacaggaaaatctccgtgattctttaccctgtgctcctccttgatctgacggatataatagagaagttcctgggtccttcctaccgcaaacgaagggatgaccacattgccgcctctgtcaaaggtcttctgtatcagatctgccagctctcccacataatccgggtgcttcccgtggtaacggtctccgtatgtggattccatcacaacataatctgcactttccgtatagtgaggatccttgatcagcggctgattattatttccgatgtctcctgaaaaaacgagttttttctgtacccctgattctgtcagccatacctcaatgctggatgatccgagcaggtggccgatatccgtaaaccggacgctgataccccggctcacctcaagcttttcattgtactggcagcccagaaactgttccatgacgcccactgcgtcatccatcgtatagagcggcggttcttccggttttccggaccttcttgccttccggtttttccattcggcctcaaactcctggatgtgggcactgtcacgcagcatgatatcacagagatctttggtggcttttgtggtaatgatattccctctgaaaccgttggcataaagcagaggaagcagtcctgagtggtcaatatgtgcatgggtcagcagcacaaaatcaagatccgccggattgacaggaagttctgcattctcatatacattttttccctgttccatcccgtagtcaaccagaaaccgtttctcacatgcctccacataatggcagctacccgttacttcatggtctgcaccgataaacattaacttcatagtcatacctcctcagtgatatatacagcgtccattggtaccagttcctgtaaacacggatacgctttcaggatttcttctccttcgtatccgaataccgcttttgaaaattcaccgattgacagctctccctcggccttcttctctgtccttctgatcttggtcccttcctttgaagtggaaaataaaaaagtgccgttatttttttcgatgaccggatctctgactgtcaatacaaattcctggtctcttctgccctttaggcagcggcacagagcttccagacaggtgatacggaacatgatcttcggtacctttctgccatgtctcaggcatcctgcagatacttggatcttctgtccgggaaaggcagcccttaacatttcaagaaaccgctcttcctcttcggcaaaacccagccgtacatagacggcatcttcctctctgccgtacgcaaacagaccgcagacctttttctgttccttccataccatcagacgtccgtcctggctctttgcttccgcggctgcctgacgtaaatatgccgcatccataaccgtataaatatcatatgactgcatctgctgatttaagaactcaagaaccgctttggtatcctcctcccggaagaattccaactctccggggtatttcccttcctctccggtaatctctgtctccgtccagtctgaaacaaacacaaaatcaaacggttcgtaataagccctgtccgcaggcatcaaatatgtgaacggttccccattctccgccatatcattgagtgtcttataaagcatcttcctcataacgccttttctgcgcacttcctgttttgtggcaaccgccacaatgtaatgtgcgttaaactcccggtctgaaatcttcatccggtaaggattcagatggatcatacccacaagagaatctccgtcccatgccaggagcaccttgtttttgggataaaccagatcaaaatagtaatctgcaaacgcctgggggtcatggaaaatgtcctgatacatctgacatatcagttccctgcggcttttgtcatcataaacaagctccatctattcccctttctgacagcccgggcatccctggcaccctgtctgtcctcccggcctcaaaacatcttcatagataaaattgtccaccggtgtcagcatacacaccgcattggcactgatgccgagtccttcgcctgtaaatcccagatgttcttctgtggtcgcctttacattcacctgcttccttccgatacccagagcttctgcgatattctctgccatctcctcaatataaggcgccagcttaggcctctgcgcaatgacagtagcgtctacgttttcaatgagataacactcttcctccaccagtctcctgacttcctttaacagcccgatactgtcagcacccttgtactttggatccgtgtccggaaaatgctttccgatgtctccaagtgccgcggctccgagcagagcatcactgatggcatgcaaaagcacatctgcgtcagagtgtcccagaagccctttctcgtatgggacatgcacgcctcctaagatcaaagggcgcccttctaccaatttatgcacatcatatcccattcccactctcatatcccatacctcgctttcaaataattctgtatatattataacgtaaaccattttttttattataccttatcgtgcaaagctcgtccatccgaaggatataaaatacggtgcgccctgtggatatgagtttttttctgtctcgtcggtcagctcctccagaagatatttgatcctttttctacatgatttccgttcgacttttagaatgcctcactgcgcaatgcgcaccgcctacgagtctttacttcaagaagaaaaactaacgtcccttcgaatgcaaggcctccgaactggtgaaaatggacgtaatgtctgctagagatgcctgttgcaagacaaaaggcgccacctacgataattttttcttcattgtcggaagtaggcctttccagagccgactggagacaatggagaaaaactcataatttaatacaagatccaaaaaaattttgcacagaaaaaaagacatgttatataaccataacatgtcttttcatagcgatgagcagattcgaactgctgacactacgggtatgaaccgtatgctctagccaactgagctacatcgccatatctttatgcgtatcgcataaagaatgggaccaatagggctcgaacctatgaccctctgcttgtaaggcagatgctctcccagctgagctatgatcccttgtctcgcgacaaaaactagtatataaaataatgcgaaaaatgtcaacaagtttttttaaatttctttaaaaaaatttccaaagccaaaaatacagcccgaaaatccgttcttttggagattcgggctgcattatatttcttactgctttaggaaatcagagagggtaggtccctggcttttttccattggatgtgtcatctcccagaaggtctggccgatggctttcgtctgaagttcatccacgatagtctttaatggatattccctggactcctcttccttgatctccaccgatacctgatccccggcgtcaatgtccaacagcgtcacaaagctttctttggagacgatggctccctgtttcagcggcacaataacactctgtccctgagagagcactgctttcagatcattgtaacggtgcttcttctgaagctgttccttagtctctttcgcctgtgccttggcttttttcgccttcagtgtcgctttctctgcctttcctggtttgtagatctcccagaatggtcctcctgcagatgcagccttagactgttcaatcacatctttcaaacggtacttgtatgtactgcgctgtctgctccccacgtctgccactgtcacctgatctttgtcatcaatagcgaccagtgcgataaaatgtccgcccttggtaaaatatccaggacccatgagtcctaccaccggatgcttctttttcagcgcatcccggatctttttatagtcagttcccagaccgttgcatccaagctgatagttctttgccaatgccggcaccacttcatgaacggaacctgcattgctgtagtagccatgctcatatgcccagatggtcgtatccagcggagtcacccatttcttcgtcagcgaactgatgcagactgccatagcagtcggtccgcagccgctgcttttaatacagtagccattttggttccatgccgcatctccctggttaaaatagataaatcctgcgatggtctccttcttatccttcatactgaggcgtgtgtcattgtagaccttcgggataatattagagacaactttttcttccttaagctttttgtcctttttgagctttttgaccttgttcttctgtttgatcttttttgcttttttcttagaagtcttggccgtttttttcttctgctccgtcttcttgtccttatgggtagtcgtctgctgctgcgccgtagtctcctgctgttgctgtgccgtagttgtggcttctgtcccggcagctgttgttgtgctctcggcggtcgttgtctgctctgttgctgagctctgttctgttgtctttgctgctgtcgttgcttctgcaccatatgcaaaagaattgctgcccactacaaggcagccgcagagtacagcagagcagatggatttcatgtgcttgttcattctgtattcactccttagctcactcatttattctccatcccccaaggttcattataatccttttctcacaaattctcaatgatactccctatatttttcctccggacaacaattttttgttcaaccctctcagaaagttcaggaacatgggagatgatcccgatcatccggctggctccggaaagttcctgaagcgctgacactgcctgttccagggattcactgtccagggaaccaaatccctcatccacaaaaagcacctcgatctcaataccgccggcactgttctttataatatccgaaagccccagagccaggcagagggccgccttaaaggattctccgccggaaagtgtcttcacagaccttcgccttcctgtgtaatagtccattacctctatttctaagttatcctttttcctagcatccgtgacggtctcactgcgaaacatctcataccgtcccccggtcatttttaaaaatcttatgtttgctgcctttaaaatatcttggaagtatgtgatcagtacaaactgttcaaaggtcaggcgaagtccgttatccccttttagcagccgatccacgtcacctacaatgccgtatctttcctccagcatttctttctttttctgtttctctttcagtgacttgagcgcctgctgtctttggtgaaggatcacggcaagcctctccctctcatcctctgacctttttatcctttcctccatgtctctcagttcgtctttctctatcttttgcagatccaggccagacttctgcctcttcttctgctcaaaggacatcctacgctcaccgagcagcgtgcatgccttggaaagagctgtctcaagcgcgatactctcggcgtcttgccgctccttcctgctttcatactcctggagttcttcctccaggcggtcatactcttcttgaatattttctgcactgtctgacatttgcagttctgtctggaaagctttcagctgtccttctgtcttcactgtgttttgcctgatctcggcaagcttttcttcctcctcatcaagagaaagcctttccatagaaataacctcagtctgtgtaaccgctctgcattccggctcattgcccagttcctgctgccttttttcccagtctgcttttgccgtgtgtttcttttccttcagctccagcatctttttataccagccgtgaaggttctcttcggctttttccgccagttccttctgggcctccacctgctgcctgtcaggaacttccaaaggaatttgagcgggatctgggtgagagacagaaccgcacacgggacagggatgcccttctttcagttcttttgccaaaatgccgatgcttcccgcataaaatgcagactgcacatccatataggcctcctgttccttccttcggtgttcctctgctttccggtactggtcctcagcctgttcaaactgtctggcaatattttcatattcttccccgaaacgtcttgtctcttcctgtgcacggagccatctctgcagccgtgccgcctccactcttttgatctgcccggattcctggtccctcagtgcttcatatgatgctttcagctgccaaaaatgttccagacggccccgcagctcttttaagacaccaagccgttcctttttctgatccatacaggctttgagactttccgtctcctctttttgctgtttgatttttcgctgtttttcagtaagttccgacagttccctttccaggctgctgatctggactgtcaattcccccagctcctgttgtatcttctccgcctgttcaaaaatctgtttttttgagtcatactcatctctttgctgtctgctcttttcctccgccctctttgcaaaccttttcttttctctgagttcttcctccagatatgcagccacggctttaaagtcctttttttctcttgcctcccggtattcctcttcttcctctgaaagttctgccgcctcttccattttgctggtcagttcacggatctcacccagcaggaccctggacttttctcctgccagtgcctgaatctttttgtatatctgagtatgaaaaatagagcggaatacctccacccgttcgctggacctggctaccaggagtttttggaattctccctgagccagcatggaaatctggcggaattgatcatagttgatcaaaagaaggcgggataattcctcattgacattcgctgtacctgccttaaccgttccgtccggcagtgtcaggactgcatcttccttcttgaccgtcatgccggagcctctttttttggccctcatatatttgggatgcctctccacacggtattttttatttctgtgggagaactcaaggatcacataggtatcctccttctgtgaggcaaagtcgctcctcaggctttccttcgtccggacacttccactgacctccccgtagagagcataggtcaatgcgtcaaaaatggtagttttgccggagccggtaggccctgtgaccagaaagaggcctccatgaagccttgaaaagtctatcttgtttttctctggatacggaccccagccgcatatttcaaggaacaatggtctcatctgtctgaacctccttcctccaaaagctgtttcagaaaatccatcctcttttcttctgcctccccgctggtcagcaaaagaaaggcttcccccagttccaaaggagttttctcccggacgtcagccgatatgccgttcccgccggatctctgtctcttttctaaattaagctccatgatgttgggataagatgcacggagcttttccataggatccgccagttcttcctcatcagtgagcactgcactgatataatcctcacagtcagccgccccagtaacttccggatccaagagattctcaagctttcctttgatgcggcgcatatcgtgcaaaggagtcagcggataagtcgttacattgacctctcctttttgctctagctcgatgagtgtcacagattttttatgggattcttcagaaaatgagtactttagaatagaaccgctgtagcggaccgagtccctccccgctctctgggggccgtggatatgccccagtgccacataatcataatcctcgaacagggaataagatacctggtccgctccgcccacactcagtgagagctctgaatcggactgtctcaccggctctgtccccgtgacaaattggtgggtaaccagcacattcctcgctgtccggtcaactggatgcctcattaaaacagcgcgcatggcctcctcatatgttcggatctcatcatctgggtacagagcctttgcctgcgccggcttaaaatacggaagcagatgaaggatcaaggtcccgtactcgtcttccatttcaatggctggaaactcttctttaagaatcccctccacatacaccttctgccggccgaaaagcttctgtccaaactccagacgctcacctgaatcgtggttccctgccacaacaaatacaggcaccaagagctctgaaacttccgtcaggaaccagtcaaacaatgtgaccgcctccgcgggaggtatgctcctgtcgtaaatatcgcctgccaaaaggagcccgttaacgggctcctttttcagcagatccaatacctgcgtcagtacatatctctgatcttctattaagttcattccgtttaccgacttgccgatatgcaggtcggccatatgcaaaaaacgcataatgctctgctctcctctagttcagcacaaaccgttcaatggcacaggcaactccgtcttcctcgttggactttgtcacaaaatctgccatctctttcagttcgtccattccattttccattacaactccaaagcctgcggctttgatcatataggtatcgttggcagcgtcaccgcaggccatcgtctcttccatcggtatggagagatacttggcaagctgggtgatcccgtcgcccttgtcacatcctatctgggtgatctcaatgttgttaaaaagcgcacttgaaacactggcgatacccaggccgtccagttccttcatgacacgtttccgctcctccaagtcaccgaaaaatgcactgaccttttctattccgtcgctgttttcctccacataggcctccagatcatcgatcttttgccttgtcctcaagatcaaatccttctgctggcctttgatatcaaaatcctccagatgattataaaatttctcttccatataaccctgcccgttcctgtaaatatccctggtgcagttacactgggcaagagcacggatcagagttagcacggtctccttcggtatatggttcttatatatgatcttatcttcccaggcatcataaatggttgccccattgcagcagatggcatagcggattccttcaatatccctgataaaatcaggaatggctttaaagatccgtcctgtggccggtacaatgtgaacccctctcctcgctgcctcagaaagcacttcccttgtgtgttcagaaatctgcttcttgtcattcagcaaagttccgtctaaatccatggttactaacttaatctggctcataactgtcctccctatgtaaaaaagtaatgctgtatccgtatctgcaggctctcatttcccctgtatacgttaatgtccggataataggtacaagtgatgtactgctttccctctcccatcttctggcggaatgactcttcttcttcaaagatcattccggtcattcttgttcccctgtcactctgaagtgacagccggattacatttctattatcgccgaatacctggattctttcaatgaaaagttttctgtgtgcaaacagaggccttttgttttccttgccgaacggctccagcacagccatctgtcgcaccagccccatagtgatataatcaacaggcatatccacatcaatggtcaccttttttataaagtcctcctgcccaagtgtgcagcattcattgatccgtaaccggaattcatccactttagactcatcaagaagagagcatccagcagccatggcatggcctccgaatctggtaaatacatccttcacctcgttcatggcttcaaacatatgatacgtctcaatggaccgtccagagcccttgatcccttctctgcctttggtcagcacaaacaccggcttatgcagtttatccttcactctgcctgcaatgatgcccgcgatgctctcatggcagtcaggcagataaataaccagtatcttatccctatcatatccattccggctgatctgttctaaggcatccctgaccccgtcattggtcattccttttctctggtcattgagttcctttaactcctgggctgtctccaacgcctcatctgggtctgtttcaagaaacagcttcaacaccttttctgccgactccaggcgcccgctggcattaatgcacggaccgataacaaatcccagatgataagaattaacttctgaatcttccagcttatgtgcttttaacagtgcctgaagcccaatattttctgtaaatccgatccgctttaatccttctctgacaaatatacggttctctttcgtgagatctaccacatcgcagacagttgctatggccagaaaacagagcagaggctccagttctttctcctccctgccttctgcccggtaaagtgcactcataagctggaatgccactccggctccgcacagctgcttgtaaggatactcacaccccttctgctttggatccactaccgcatctgccggcggcagtatttcctgcttccggccgtcctccatctgatacggaacctcgtgatgatctgtcacaataacattcataccgagcttttttgcctccgccacaggttcaaatgcggcgatcccgttgtcacaggtgatgatcagcccgatgccatctttttttgcttgaagcaccatgtctgtattcatcccgtatccgtcctggatccggtcggggattgtgtaatccacagttcctccgagatttttcagacttctccacaatatataatttgaaatcactccgtccacatcgtaatcggagatgatccttatcttcgttcctgatctaagggcttcctgaagcagtatgcatgcctctttgactcccttcatggccgccggatctgatatatctgaaagagtccctgagagataacggcgtatttcttcctcatctgtgatatcccggtttcggatcagcctggcgaccaccggatcgatgccaaatttcttcccgatctgatcaaaatctgctttctttttgctgataaaccatttttccataagtgacttttacttccctttccgtgatgaaagaaaactgcaatcaaaccttatgtctgactgcagttttcaacttccctatcgaattccttttttctttttcttctttttctttttcggcttagcagccgcatcctgctgaccgtcctgtccggcagacttatcttctataaccgcctgaggctgttttttaaatcctgttttcatgaagtaccagagcggtcctgtgatgcacacagaagaaaatgccccgcacacaacgccgaccatcaaggtcagggcgaactggcggatcgatgatacacccatgaggaacagtacaaataccatgataaatgtcgtcagtgacgtattgatggatcttgtcagtgtctggatgatactcttattgacaatactcttaagctgtgactggtccgcctcctgcatattctcccgtatacggtcgaaaataacgatggtggagttgatggaataaccaatgatcgtcagcatacaggcaatgaaggtgcctcccaccgaaagcctgccgatggagtacgccgcaaatacgatcaatacatcattcaacagcgctatgatagcactggctccgaatttcacatccttaaaccggatggcaatgtagatcagcataaagatacttgcaatgaccacagacacgatcgcatctctctgcatctcgttgctgatggtggagctgatattttccgttgtcacagacttggccttaaagtcttttttcatggtcttttcaatctgttttctctggcttaagttcaactccacagatttgatgaccatctggttgttggcttttactttctgtccttggacagaggtagatttgctgactttttcataggcggatacaaccttcttttcaaggctgtcatttactttcacatctttatcaaatgtgatggtggaagaggttccccctgaaaattccagatcaaagttcagaggggttcccatcctggaactgttgatcggaaggaatgcaagtccggcaatgatcacaatcaatgaagcagccatacatttttttcctgcaccgatgaagtccctttctttgagagttctggcctttccatacagcttagggcttctaaatccgaatttatatgcagcggtgactaagaaccggctgataacaagtgctgtaaacatggaaataagaacactcatccccaaagtctgggcgaatcccttgactgttccggttcccttaaaccaaaggactgccacggcgatcagagtagtgacatttccgtcgatgatggcagatgcagccttgtggaatcctgatttaatggctgtccctacatttttgcccagagccacttcttccttgatcctggaatagataataacgttggcatccacggccataccaatacccaggatgataccggccagaccaggaagggtcagtgtcacattgaatccgttcagggcaagcagtgtcatcaatacatagatggccagtgccaggcatgcgatcacacccggaaggaaatacagtccgatcatcaacacacacaccaatgcaaatccgatagctccggcctttacgctggtctggatggcatccacacccagcttagcggaaaccacgttggaacgcagctcctttaattttaccggaagggaaccaatcctgatggatgaagcaagattatctgcagcctcatagttctccatccctgtaatgctgcactccccttttgtgatcacgctctgtacgttaggcgcgctgatgatctggttatcgtagatgatataaataggttttccaacatttttcttagtggcatctgcaaatgctttggtcccttttttgtcgaactccagggctaccacataatcctttgccccgttatctccctcagtagtctgcgcttttgctgattttacattatttccggtcagcaccgtcttcatagacttgccgtcctggaccataaatgccaaagttcccggctgtcccagttcgtccagaatcttatttgcgtctgttactccagggatctcaatattgatccggttttttccctgacggtaaacctcagattcggtgctgtagccctccacacgcttctgaagtttatacacagtatcgtcgatatttttatccgatacatttttgccgtctacctcataggtgatgctgactcctccggccaggtcaagccccagctcaatgttctgtgctcggcctatcttatttttcccgagtccttttgtggtgatgaaaattccaaacacacacacagcgacaagcaggatcagcccggcggcgtatcttcctttcttactattgtttgtcttcataagttctgctcctttattcttcttcactctggtctgccaatgcagctttcaccatcagcgcacattccacacgctttctctccaatctacaccctacatcgtaggtgccgttgatcgtaccgttgagcttatgggaattggcgctgcaacctccgctgcagtaaaatctagcgaaacaatccctgcagtcttctttggagtaaacgcttgtcttcttgaattcggagacaatatcctggcgggtgactccgtcatatacagttcccacggcaaagtcatcctctcccacgaactgatggcatggatataagtcgccccaaggagtcactgccaggtactctgtacctgaaccgcagcctgaaaggcgtttcgccacgcaaggcccccctgtcagatcgatcataaagtggaagaatgtaaatcctctgccttccttctctcttttgatgatctcttttgccagcaggtcgtattcctccatgattttgggcagatctgcctctttgatcgtatatctctcttcctccgggccgacaacaggctccacggaaatctgatcaaatccctcgtccgccaggtgcagcacatccttagaaaagtccaggttatcgtgggtaaaggtacccctcacataatagctttttcctgcgcgcagcttagcaaatttcttgaacttatcaatgattaaatcataacttcccttgccgtttcttgtagggcgcatggtatcatggacttcttttcttccgtcgatgctcagtaccacgttggccatctctcggttggcaaattccatgacctcgtcgtccaaaaggacaccgttggtggtcagagtaaatcggaatttcttgttgtgctcctcttccagtgatcttccgtaagccaccagctgttttacaacctcaaaattcatcagaggctccccgccgaagaaatctacttccagattcctgcggtttcctgagttctccaccaaaaaatccaatgcctgttttcccacttcaaaactcatcatggagcggtctccgtggtactctccttcctctgcaaaacagtatttacatgccagattgcagtcatgggcaatgtgcagacagagtgcttttaccacagtagggcgttctttaaattctgttatgtaatcctcgtattcatcctctgtgaacagcactccctggctttccagacctttgatctcttcataaacttcctcgatctctgcgtccttatagccggaaagttcctttttgatctcttccaatgagtggctagtgtagagtccaataacttcatagctcagatcgtccactacatgaactgatccgctctccacatccagcaccatattatatccgttatttttgtattgataaaccacgttgttttttctcctttatctgtccttaacgaaaagagacggttcaaaaaggaaccgcctctctttcttactgctctttcccgccgtggattatttgctgtgctcgcagctctggtttcctacggtgcaggatgtcttgcatgctgactggcaggatgtctggcactcaccgcatccgcctttctttactgtgttctgcaatgttttattggttagagtcttaatgtgcttcatgccaagttcctccttcaatatgaatctctcttattccctttttaacttgcccattatatcatatcctttttggaattacaataagttcttaattcctcatagaggtgatcgggcacctttaaattcccccgtccggtcccgatctcaatatccggcttattgcttccatggaaatccgagcctccggtggccagaagcccatacttcctgcaccattctgtaagctttacaatctgtccgtagtgatgggaagaatggtatacttccagtccgctcaatccataagcagtcaattctttcaccagttcctcgagttcctgattagaaaaatgatactggaaaggatgggcgagcactgccgctccgcctgcatccgtgatcagccggactgcatcctctggggcaaagtaaggtttgggaatataatatttacagccgtctcccacaaactttttaaaagcctggtccttgttgctgcagtagccttcctcaatcaaaactcgtgcaaagtgggctcttgtgatcacggtatgttcatttccgtgcagaagcttttcaagtgtaatcggaatcccgtcctcctggaatctacgaatcatagaaagattcctctgccttcttcctttccgcaggtgttccagggttccaagcaattttttatcattgatatcaatatcataacccagtatatggatctcgtgtttttcggcctcacaggatagctcgatcccgggcataaaccgtatatctgaaagttccccagaatcaagtatagctggaatccccttaaccgtgtcatggtcagtaagcgcgatggcataaagtcctttttcttttgcctcccgcagcacttccagcggtttatttgtcccatctgaggcatctgagtgcaaatgtaagtcaatcattgtctttcctttctcgcctatagtcatagaatgaaggcatcctgcataaaattttactaaaaggaggcatcccatggaaaataaaaatattggtatttcactcttaaaaagcttaattttctcctacatactgacaggaattattctatgtattctggcttttatcatgtatcagaccgaagtcagcacaaaagtggcgaaccttggcgtaacctttacctatgtagccgcatctgtattcgcaggatttatcatcggcaaaaaaatgggaaaaagaaaattcctgtggggccttgccgttggccttctgtattttgtcgtactttttctgatctctcttcttctggatcaaaatcagacactgttaagcggagaacgaatcaccgcaatgctgttatgcatagccggaggcaccttgggaggggcactggcgtaaacttaaatggccggcagagggcttatgcccctgccggtttcttccatatatcatccgcaattctcttcatgatccggatcttttcccactgctgttcctctgtcaaaaagcattgttcctcctctgaggcaaacccacactgcgggctcagacagagctgggacaaggatacataatctgaggcttctaagatcttcttcttgatatctccatccttttccatctccggagatctggtggagaacagtccaagcacgaccttttgatctcttatgtacctgagaggtttaaaatctcccgcccggtcgctgtcgtattccaggaaaaaaccgtccgcctcacattccccaaataatttttctgctacaaactcataacttccggaaatgatacgcgcagaatgaaaattgccccggcagatatgaatagcaacggtcatatctgccggcttgcccttcaacacctgattgaccagccagacatattgctccaccagatcctctattttaatcccacgtttctgatagacctccctccgttcttttgaacagaattctccccatgagatatcatcaaactgcagatatcggcagcctgcatcataaaaggcctttaaagccttacggtatgctgtgatgatgtcctcaaacagattcttttcatccctataagcaggtataggacggtatgtctccggatgcacacagcagatcaaatgcagcatggctggtgatggaattgtcatcttagctgtagctttacctgcaatagacttcagaaacttgtagtggtttagaaacggatgattgccgaaactgatcctgttgcagatcatcagtgtctcgggttctgtcttttcctccctgaagatctccggtctttctttgtattttcttctctcaatcccgtttaaataccaaagaaaatcaaggtgccaccaccgcctgtgaagttccccgtcggtgaccgccttcagtccggcctctttttgtttttttaccaattctctgaccgcctggttttcaatcctctttagtttaacggcactcatatcgccctgcttatactgccttttggcagctttcagtgtttcagtccgcaggaaactgccgacaatgtcataataatagggaaacggtgttctgtacatgaataatcctcctagaagctttcgccagtccatgtcctctgattcataccccttcaaaagtcgccctcagtcggtcattttttgcggacagttcatacatgctatccttttctgttctctgctcctgcgtttgctctcgtttgatttctccctccgtatcttcttggcacaagcagaacaataccttgatgcaccagagcccgggacatattcaacgccgcacaccgtacagtttttagcgggcattgctgcccaccgttttgtaggtatgatatgtaattcatcgacaaagccgatgaatttatagtaaatcttgatttcctgcttcactgttccgtctgccatcttctcacgctccgaaacaagtatcttgtctatgagtgcgtttataactgttgcatccagttcttttaagccttgataatttcggataagggcgaggaagtcacggattccccgtgatttctcgtagctttcattaagagtttccgtcacctctttcagccttgcttcaatttcaagctgctctttctggtatttccccgacatcatctcaaaattccgctcggtaatacgctccatgaccttatcctcgtagagagaggaaaacagcctgtccagttccgcaaggcgtttgttcagcttcttacgttctttctctaatgctttcgccctgctctggtctgtttccgtgagccgcttttctatggccctgaccgccttttcatcattcactgccatatccgcaaaacagttgatgtcggcaagaacggcattgaataaatcccttgcttctatattgtgggcactacactcgcttcttccgtttcttgcataattattacatgaatactgtacacagtcgataatctctgggcgtttcctcctgtgtacgttcattgcccgcagagcacatccgcagtccacacacttgataacgcctgcaaaaatatttacaaatcctcccttgttctgtggaagcctacgacttgtaataagctgttggacaatatcaaattcctcctgcgtgactattccctcatgggtattgggtatcacttcccattcttcgggcagcttagaggggcgtttcttgcttttcatattggcggcaatccgtttgtagcctacaagatttcccgcatatatcgggcttcttaaaatgctcctcacgctgtttccactccaaatatagcgtttgtcctcgttcccctcaaaatgacgttcaaagcctgtttcgccacgctccgccgcataagcggcagggcgtaggatatgctgtttattaagatgtctgcaaattttggcaactccattcccttttaatgcaaggtcgaatatctcttttacaacatgtgccactttatcatctatcagcagatggttgtggtcggcagggtctttgatatagccataaggggcggtagttcccatgaatttcccctgttgaaacctcgcccgatatgccgattttatcttaacagatatgtcagcggcatacatttcgtttaaaatgttgcggaaaggcgtgatgtccatagcagatttattcaaggtatctacgccgtcattgaccgctatatacctcacgttatgctctgggaagaaaacttccagatataacccacaatcaagatagtttctccccagacgggataaatctttcgtaatcacgcagtttatcagaccgctttcaatgtcttttatcatattctggaaacttggtctttggaaatttgtaccagaataaccatcgtccacatacgtttttgctatgtgccatccctgctttttcacataatccgtgaggatggatttctgtgtcgcaatgctcgcactctcgttatccgtaccatcatctttagataagcggcaataaatgccgactaaatagattttcttttcttctttgattcccgccatactgtaaaacctccgtatctgtcctatctgttttcatgtcccattgcgtacattctaagcggacagcccctcattgtcgaaggtgtcgccctcggcaatcttcttccgaatatcctcggagataatcgggacaaacgcttctgtaacggtctgtgtgccgacatattcacggctgattatcatctgcactggtgcttttggcacgatacgctttctctttttatctgctttcttatcctcgcccatacttaaatcttcctttccagacagggcagggaagagtttggaaatgtccccgccctgccaatcagataccattaatcctcgctgtttaattctttctgcaatgctttaaggagtgccgccgcttcatcagcgttcagcgtgattcccttgccgcacttttcacggttcggggaaaagctgcggatgtcatacttcggctctttcccattccatgaaatgagattgatttcctttgtgtagccactgtcgcccgtagacaatactgcgatttcctttacgatttcatactggatttctttcattctctctacctcaactctctgtatttacttcccgaaaaaagaagattagcggctgtcacggttgcgtttcctctgcaactcacgctccaaaagtttgatgatggtttcctccatctgcttcggcgttttgttcttcggaaagtattttttcagcttgcttgtgttgattttcaaggtttctttctgatttcccttttcctccgtcataatcgcaaatatcatatccatgtcaagccgcccactctggcttaggcttttcatccgctgtgcctgtgagagtgagggcgttgcttcttcgctctccatcgtggcaaagaggttttcctgctcgtctttcttcaagaaggacagttccaccgcaggcgtgagggcgattttcccctcgtccaccatctgcaaaatcggcggtatcagttccgtcaggcgaataaaacgctgcacggtcatcctgcccacgccgaagccctgtgccaccttgtcgtccgtccgcaacttcgtcacaacttgtgacgaggttaagtccgtgcggaaaccctgccgcttcatggcttcggatttcatcttgtaagcaaacgcccgctccgatggcaggatattctcacgctgcaaattgctgtctacaagggtgatgatggctcggtcacggtctaagggcaggacaaacgcaggcacggtatttatccctgcaagttcagaagcacggacacgccgctgtcccgcaatcacttcatagccgttcccgtcctctttcgggcgtgtgattatcggcgtgacaatgccaaattccttgatgctttccgctaactctgacagtgtttcatcttctgccacatgaaacggattgtcggggaacgggtacaagtctttggtctttaacaccttaaaatcctgtttcttcattcacatatctacctttctttcgctctgcttctatgatttttctgcaattcttccaacacttcgggcggtatttttgacagcagccgccccatctgctcgttggttctctgcaattcaaatatcttctgattcgctttctgcacctttagttcctgctcgtacttttcatcacgcatacgccccgcatagtctgattcctgcccaattctctctttcaaactgtcgatatacgcctgctgtttcccgatttccttagagaatttctccacgtctggcagccatgcagagagtaaatctaacgctttatcccttttcttccctgcgttaaaggcgttgatgtcggatagggcagacacgatttcttcatactgtttatcaagcctaccgcctaatttatagagccatgtggggacgtgtttccgcttggtttccattgaggactgcccccgttcaagctgattccaccgtgaggacatccgctcatggtaggcggtctgccactcggataatgatttctggttgcctaagatagctttcgctgacagcttattgtctggcgtaatcggcacaaagcagaggtgcatatggggcgttctctcgtccatatggacgacagcggagaggatattctgctttccaacacgctccgaaatgaagtcaagagccgtctggaaatacgctttttgttcttcgggcagtaactggttcataaattctggtgaagctgtgatgagcgtttccaccatcatcacgctgtctttccttgtcctgcaccccgcttcggctaccatgcggttaatctctttcttgtaggtgtactttggtggtgctatgagatggtaattgtttttagagcgttccatatctatatctgggttgcttttgtaggcttctttcttccgctcgttgtggcgttcacaagccgcaacgccgcccgcttttcgtttctggaaacgcaggattgcataaggcataggcggattcctcctttctttcggcgggtgaccgtcctttggggtgacagcggtgacggtggtgacagcagttttgggataccccctgccgactgccgcaactgtcaccctcaccccctgcatgacggtcatgtcgatgatgacggtgtttttgggataccccccccctcgcaagagccgtcaccgtcatgccgccattcttttatccgaagccgtaaggcgtaggatagcagggcacagccctgccttaagggagtccagagggaacgtctggcacacgactttgcagggcaaagtgtagtgtgttacaccctgtaaacgcagtcggaaaaatcggaatgatttttctgaccgcaggggtggttttacacgaccgaaaagggcgagtaaatctcacgcctgcattttgcgtttacggggtgttctcccgtagggatgacagcggcagggtatcctaaaatcactgtcaccaccgtcactgctgtcacccgcagggcagagccgccagctttacatggctttaagcgtcaatgacagtaacaggggggtatcctaatatcgctgtcaccaccgtcaccgctgtcacccgccctccttgcaagggcaatccgcctgccgtctttcctgcggctgtactggtagcagatacggttctcgcttaaaaatgtggtgcggtattcattcagccatttcgtaatcaccgtgggtatggtttccgtttcccccatagcggctaacagttccgttgccgtgcctatccattcttccttatccctcataaaatccaccaaccgaaaaaggacatctggtatcgtttctttcgcaagctgctcctgcgttttccgctccacaagctcccaacggcaatcacggaaacgcagcgtgtattcctgataaggcgtgtccctgcccgtcacatacagcttggcggtgtcagacgcacgtttctccttttccagaacaaaggtagcgtccgcactccccgttaatcctgtcgtcccagacaccttgttgaacacgtcgctgtcattctgctttcggatgtggtgtacgacaatgaccgccagagagtgcctgtcggcaaagtctttgatgagggagatgtccccatagtcgcttgcgtaggcattgtcttttgaagctgtacggactttctgcaaggtatcaatcacaatgagcctgctgtctgggtaatctttcagataatcctcaagctgcacgataagaccgtctgacagcttgcagcttgccacggcaaagtgaagccgcccgcttgcttcgtccgtcaagcggaataatctgtcctgtatgcggcagaacgtgtcctcaaggcagaggtaaagcacgtcgccctccattgtcggcatatcccacaagggaagtccctgcgacacgcataggcatagcttcagcatgagccagctcttgcctatcttctgtgagccgcagaacagcgacaatcctgtggggataaggctgtccaccacaaaggactgcttctcaagcggttcataaaggagcgtttcggcgttgactgtctgtaacttctgcatggctttcctcctttcgggcggtgtctttgttttcgttacacataggcgttgacctccttagaaatagatttactcccacgaaaaaaagtgagagtatgtaatgccgccaatcccacacaaataaaaaacagatttctttttcgggcggtatcagtcacggttggagatatttcctcatttccgcctttactttctcctttgcaatcgcaacagatttctgtattgctgaagcggtgcaatgctccatcgcagcgatttggtaaaaattgaaatcatgctcgtaataaagcaggaaacgccgcctttgtatctctggcaggctctcaaccgccttacagagcgtttcattccgttcttcttcaatcatgcgttcatcaaggctcttaggcacacgcaacgcccgtctgtaaagggtttcgtcccatacctcgttaaactccctgtgccgctcgtcccattggagaagattcctgttcctgcgttccatctgccgaaactccataaagaactgttccgacacttccaactcgtgggatttgccctgcccgtccttaaaactgataaaataccttgtgctactttccgtggattcctcccgaagcgtgtatgccttaaccctgtatgccatcccgctgtcctcctgccaaaaaataagcggggagattccactccccacccagtagcccgcaggataatgggatgtattagacgcttacaaaattttccgcagcttcttccgcagatggtctaacctcgcatagatggcaccagtcgtcaaatgcacaagcggggcaatctcctttgtggaatacccctgcattttcagcaggacgattttcaaggtacgcccgtccaccgcgactaatacttgatagagattttcgctctcaatctcgtccagtaactccgcaaccgtacccacttccgtctgccactccctgtctgccatgtcctcaaggtattccgcaacgtcattcgtccatcggtaaaaccgcctgttggaattgaagtctgccctgtccgcaatgcgtatctgctcaatggtcgcttcatcaacgccgcactcacgcagcagcttttcctccgcttctttccagatacgccatttcctgtcctcccgtccgtggttatatgccatgcttcttttcctccaatcagaattgattgagagggcagagaaaaaccccctcattttcccaaaggaaaaaacaagggggctgaacgccttaaattttaattttctattatctttcttagttttcttaggattctggctttgcgtttgttcacaacgctctgggttatgccgaacctcgccccgacttcacgctcagaaagtccgtcaaaaaagattgcctgtatcaattcctgttcactatccgacagcaaaggcagggcggctttcagcctgtccaccataaccgcattgacaacggtttccgcaatgtccgccgcttcatcagcgataaagtctaaaggcttcccctcgctgtccgtaaatccatccagagaaagcaagctgttcttcgtatctaattttttcagataacgccaccgttccttatctcggtagaagtccgtgtattgctccctcacgacttcaagcagacagccttgaacgggaataaacagcttgtccatgtaggtctggtcggattccctgcggcggcagaaatccatgtaggacagttccacatatctgccgctttctttgataaatacctttcttggtgcatatttcaccataaatacctcccatctgaatttttgaaatgtaaaaaatccagatggagaggcggagaacgacaccgcatatcagaaacagccctacggcactttccaacaaaaatcgacaaaagaaaaaccgcaaaggctctgtgacctttacggttataggaaatagtaattctattgtatggagattgtacttctactttcaaggcaggaagtaccgttgcataggcagaaatttttttaactggtttcctgccgttctctgatatgctatgtattgataaattttgcttcgtatgagcagatagataactgcccgaaaaaaggacataaaaaaatccctccaaatttaaaaacaaattcagagggtaatttagggtataacaaaataacccacccgaatatcgttttttttatttggtgagtttgttctttcaaatacgaaacaaaaagagccgatgattcgtgaattgttccacaatttcatcggctctgcgtcttaagcgtctggctctttgatgacagttatcttcaagttgtcaactttaatcaatctttcttgtctgcattttggacaataaaggggataattctccaaaacagtgtccttcctaattttattacgggttttgctcccacaaacaggacacaatatccattcgcatttcatcataattagtctctaatcctttcaaatctcattttatatgacttttgcaagctgttaagctaacttgtggaacatatgccgaaccttatctatacggctattcgggcggcggggttggcaaataaatttaccaatagctggctggtatccttttaactctgtcaagcagactccctgcccatttgtgaaataagttaaatcgttcctgtattcttgaatacatctagcagggatttctcctttcagaatgacctcgtcattctttatctgagtacttacaatatctgcacaataccttggagcatcatgatacgcccgtgagagatattcctgcggtgcataaatttcaaagtggagatatggctctaatagttctgtccctgctttttttaaagcctgctccaatacgataggggaaagcagccgaaagtctgcgggggtacttacaggactataatacaatccatattcaaaacagattttacagtctgtcactttccatccatacagcccctgctcgcagccataaagaaccccctccataaccgcattttggaacgattgatttaaatatccaagtgaaactctgctttcatactgcactccgcttccaatagggagcggctctatggacaacccgacagaagcccagaaaggatttggcgggacttctatgtggatggtatattctgcttttctaagcggtctttccatatatataacagtaggctcttttatttctgcctccacatgatatttttcctcaaggatggcacaaatgacttccatctgcacattccccaaaaaagaaagtataatctcatgcgttgtagtatccacataatattttaaaagagggtcgccatctgaaatttctgtaagtgccccaagcaatatttcccgctgttcagatttctttactgcaatcgttgtttggagcatagggagaggattttcaataaattttctctgcggcaacagcattccgttccccaaaatactgtttagctgcaaaacatcatttggtaaaattacaatatcaccagagcaggctgtatcggatgaatataattcaccgtttgtcggaacacacatctctgtgatttttattttctctttttcagatattctaataacatccctcaaatgcaatgttccgctatatatacgcacataaacaaaacgccgccttttctctgaatattcaatcttaaaaacctgcccgcatagttcagattgaccttcaggcgttgatgaataaaatttactggcaatcacttctataagctgccgaatccccagattgtttttagcgcttccgtgataaacgggaaataacgttccgttttggaatctcctgttttcttcctgttccagttctgacattttaaacggtttccctgacatatatttctctaatagttcatcgtttcccataattaccgcatcccactgttccatatcgtcattgtccgttacatttatatggggatgctgcccaaccttttgcttcactataatttccgaagaaagctttgctttcatttcccgatataccattggcaaatcaatcccctcttggtcaattttattgatgaaaaaaattgtcggaatcttcattgtctgtagtgcatgaaacagtatacgggtctgtgcctgtatgccatcctttgcagaaactaataatactgctccgtctaatacggataaagaacggtatacttccgccaaaaaatccatatggcctggcgtatctataatgttgacttttacatcctcccactgaaaagatgtcactgctgtctggatagtgattcccctttgacgctccaaattcatggtatctgtccttgttgtgccttcatctacgctccctagttctgcaattgcaccactggtatacaataaactttccgttaatgttgtctttcctgcgtcaacgtgagccagaatgcctaagttaattattttcatgtgattttcctcctatcaacacccaaaaaagggcataaaaatacccagtgataaatactcctatcactgggtaaataactccaatagccccaaaacacttatatgttttcgggcatataaaattacatgataaaagtattcttaaactgggtacaaaaaactaagccccatattaaaagtgaaacgggactgctactttttgttcccactatcaaattgacagtttatttaagaataccttgccgcatatttattaactccttgtataatactgaatctaattatattccttaaccctttatttgtcaagctgacaaactaaagcagaaaaagcggcaggatttccccctgccactaatcatctgtttatgcaaaaataatttccttttccacaatctccctcgcacaagcccttatgttattgaggcatcctgtccattctaaggcgttttctgcctttagctgttccgttatgccctgtgcctgtttcataccctctatgagcctttcaaagcgttcctgtgcctgtctgtcaatgtcggcaaggtaagcgttaagtctgccgcttgtaagaagattggtgtatgtaactttacagtgatgcttcagataatccaaatgccgctgtccccagatgcctatcggctgttcttcttcggcgggtacagtcaaacacggtattaagtaatcgccttgcctttgatatttgccgcccatttcctcaaaaattgtctttgccattgtctgttacctccacattcttttttattttgaatgtccgcaaaatccgtcctacatctttggtacagaaaggacggcgcaatgcagcgccgtccctgtgtattaatcttcttttgttccctggtttggtttttcgacctgtgaaatcgcagcgcgctccatagggatacggcagtgcttgtcatttccaaattccacaacaatcgttctgtcatctacaacatccactacaacgccgtaaaatccgctgatcgtaagtacactgtcccctacttccagagaagcagccaattccttcatctgctggtcttttttcttctgtggacgaatcatgatgaagtacatacctccaaaaattacgatgatccacaaaattaagcctaattgtgattgcatttgtttcttttcctccatttaaaataataatatatcaaattcaattgcttgaatcctgatcacttgttttccataccgaaaagctttctctctttatactccttgtagcatccctgctcgatggcttcccgaatctcctccatcattgtattataaaaatataagttatgcaagacgcacaatctcattccaagcatttcttttgccttgagcagatgccggatataggccctgctatagcttctgcatgccgggcattggcatccctcctcgataggtctgtggtccagttcatactttttattgaacagattcatctttccgtggttggtataaacatgtccgtgtcgtccgttccttgttggataaacacagtcaaaaaagtccactcctctatctactccctccagaatattagccggagttcccactcccatcaggtaagtcggttttgcctccggaagaaacggtacggtttcatccagaatacggtacatctccgagtgtgattctcctactgccagtccgcccagcgcatagccgtccaggtcaagacgagagatctctttcgcatgattgatccggatgtcctcaaatgtcccgccctggttgattccaaacagcatttgatgcggattgaccgtatccggaaggctgttgagtctctccatctcctttttgcagcgcacaagccatctggtagtgcggtccacagaattctgcatatattctctagttgccggatggggcggacattcatcaaaggccatagcaatggtggaacccagatttgactggatctgcatgctctcctccggtcccatgaatatcttcctgccatcgatatgggatgagaaagaaaccccttcttcttttatcttacgcagcttggccagagaaaagacctgaaatcccccggaatctgtaaggatcgggcggtcccagttcatgaacttatgaagccccccgaactctttgattaaacggtctcccgttctcacgtggagatgataggtattggaaagctccacctgtgtcttgatctgtcttaagtcatcggtgctcaccgcaccttttattgccgcgactgtccccacattcataaaaactggggtctcaatcgtaccatgtacggtcgtcaaccggcctctcttcgcttttccgtctttttttattaactgatacattttctcaccattattcgtatatttttttcacagagtccatgctggcactcatgttcatgagcagtccgtctgcaacagtaattgccgccattgattccacgactaccaccgctctcggtacgatcatcggatcatgtcttcccttgacagaaagctctatctcttcaccgtcttttccagctgtggactgagtcttggcaatggaaggagtcggtttgactgcagcgcggaacaccagaggacttccgtcgctgatacctcccagaactccgcctgaatgattcgtcttctttataaatctgccatcctgccagcagtaggcgtcattgttgacagagccgttggatgatgccgccgcaaatccatctccaatttcaaatcccttgaccgctccaatggaaagtatggctttggccaagttggcatccagcttttcaaacaccgggtctccgatgcctggccttaagccttccacaacacactcgatgacacctcccatggaatctttttctttcatcatgcggtccgcatattcctggacttgaactgctgcttctttatccggcatgtaaaaaggattcctaaaaatctcttccttctgaaaccgttctatatctatagaaataccaccgatctctctggcatatgtggaaatcgtgatccccagttcttctaacagcttggaagccaccgcacctgcagctacccgtccgatggtctcccgtcctgaagaccttccaccgccccggtaatcacggatcccatatttggcatcatatgtgtagtccgcatgtcccggccgatagatatctttaatctggctgtagtctttcgacttctggttcctgttataaacaaccatggagattggtgtcccagttgtctttccctcaaaaatcccagaaaggatctctacctggtcatcttcttttcttggtgttgtatattttgactgtcccggcttccttcggtttaaaaactgctggatctcttcctgagtaatcgaaagccccgccgggcatccatccaccacgactccaagtccttccccgtgtgtctccccccacgttgtaattctgaatattgtgccaatacttgagcctgccatcttttgattcctctctgattataacttaatatttgccagcaaatctccaaggctagtctgtgccttttcttcttccttatattctataccagtctcaactttctcagcctctttggattcctccagcgctttcatgctcaggctgatcttgttatctgcaatctttagcaccttgactttgaccttctggccttcctccaccatttcctttggactcttgatccttttttcactgaactgggaaatatggatcaaaccgctgagtccgtcacctaaatccacaaaagctccataaggcatgatattttctacagtgccttccagcaccatccccgggcgcatcatcgccatcttatggttcaattcttcctgtgcttttgctttagcaacttctttcgctgacaatacaagcctgtttttgctctcatccacagtaataatttttgcttccacttcttttttcagccaggtgtttaaatcttctacatagttcagggaaagctgagaagccggaataaatcccctgattccttctacataaacgatcactcctccgttgacaactccgcctacggtcagtgtaagtactgtctcctcatccatcagcttctgtaaacgatcccatgcgagaacctgattggcctcccgtttggacagcaggatatttccttccccatcgtcaacagacattactttcgcctttactctgtctccctcttttaggacctcaggtaaagtgacatttggatcatcactgtattcggctgcctttagtatcccctgagcatagtacttcaaatcgatgactgcctcttcatcgctgacacttaagacgtctccctcaactatatctccctcatccatcttgcggaaggatgcttccagttcgttctcaaactgttccattgtttcctttatttcttctgccattttaaatctcctttcacgaaacctctgcaataagcctcattataacacagaataaagaagattttaacttgtttcttatgaatttcgggtccgccagaagaaaaacacaagatagaatgctgtcaggatatagatgcctggggctatatactgaagggtactttcagaaattccggaagctttggtatctatttcaaagttaaccgctttgctggacttgctccctgatactcccacagcctctgctttgagcctgtgtcttcctgcggccctgcactgaactattgcccgccctcctgcaaccgggatttctttttcatctatccacagacccgtcagacgatcattctgattctgaaccttcacctgaatttcttttttgcccttataaatacttccgtttctcactcctgataccagaatcactggcggctctgcatcgtagctgaacaccagtggtttttccaccgtgttcacatgcccggtcaaatccttcacctttatcttaacctgatttgttccgttcttaagatactgcctgtccacatacagatcatccccttttctctcatacggtactgtccgtccgtttaccgaaaactcggccacgtaggacggtacaacattctttatatgaaaaccgtatctggactccttttcccctgtgctattattgcgcacagttttttggacaggtatgatctctgttcccttacagctgacggtaaaagataccttttccgatgtcttatttccggcgctgtcccgggcacgtacctcaacacaatagtatccgtcctctgacagcttttgataggaaatcttaatctgctctccagcctggcttttttccgtcttcactatttttccattcaacaaaagcgaaatctctgctggactttcatctgtacaggaaacctgaggctctgctgcgaagctgtaaatcccaaagggctttactccctgaatcttaagactgggacttttcctgtcaatgaaaaagtcttcggcaaaggattcagcacagttgcctgcctgatccttacactttacggaaagcctctgtctcccctccttggagaaacatacatcagctgttgttatattcccttttctttttaagttctttatctcccccgtagtatcccagcggatgctgtctatgtccagaaactgatctttcatagaaaccttgatcctgcatccatcccgtctgtatgtttgtccctgttcccgctcaatagtaacatcaggttgggttttgtctagataaatatagtgactccatgaacttttggacttgttgcccgcctcatccttctgtcgtaccgtgaccttatattgtccttcctcagataagatcagcctgtttccctccactgtctttgaatcccctgccgtcaggtctttgatcctgatccacgtcctcaggcggggacccagtctcttattttcttttacctggatctttacatcctttcggtaccagccgcttttctctgctttcgcgcagctgacgttcggtcttcctgcctgctccctccagaagttcacgggaacatggactgctttgctccggttccctgctctggatactgtccttacttgataagtatgtcttccatttgtctgaactttaatgccatcttctttatatgtagtccactgatccttttttgattctttgtattcataacaggaaagaccggaaaatgaactgcctcctgagagctttatttcaaccggtcgattcgtccatgttccctgctcatatggacctgtattaatctccggctcttttggagctttggtctccaggcagaactccggtaccggataggattcatcttcatatacaaccgatacccgataccagccctgctgccggaagaagatactgccttctctgtcagacgtccattgaatatctgatatatcccatttttcttttccgtcatttccctccgcaaaacagatcaccttctcccgttggacatcctgcctgcgcagagcaatcttcaactctctatcctgtgtataaaaagtatctgcccctccatctgcaaactccactgccaaagcaggttctttcttttcttctgcaaaaactgtatatccagctgccagcgccgccactgtaatcataatcagcagtgccagtatcttttttcggtccaacatctctattcacttccctccccgagtatggcgccaagtctccgaaactccgtatccttcctgcctccaagctgttctgccctgcgatacatttcaactgccatgtccttcctgccttcactggccagataaaaaccgtaatctatgtatcctcccggatcctccggatatcgcctgatcaacgctccgtacgctttttccgcctctttttttctattatgctccgccagcatcctggccttttttctctgtatccctaccctgtcttcctctctttccataacattcatatattgatccgcagcttccagccatggatccagcccatatcggtctgccgttcgctcataaaaagctgctttttcccgcaaaacggtcttattatcataggcattcccagcttttgtttccatcttccttatgaggctcctctgcacttcgtcgatatccttaaatgtctttagttcctgacccttttgtccataaaccctatatagaaaatatatctgccggaaactgaaagccttttgttcgaacctttcaagaaccttttgcagttcagcgggcttatatgtgccgccgctaaggatatccgcaatctccgtgcaggcctgtccaatcccggaaggtttctgctgcatcgacaaatatctgtatgccaaagcaggatcaggagagtatccgccatccccctccttcccctgtagatacatctctcccatggtcatcaacagatgttcttttcctgcggcagaaaattcttttgcctctatgaattctgcgaggacctgcaggccttccttttcttttcccactgatttaaagtattctaaaagacattcatatgcagatgctcttccgggttgttcatttatggccatctcaaagtagcggactgccagacctgataatttcccccgctctttccctgcctcctcctgtgccatggacagatagcgggtatatgccggctggcctttcttcccggcaaatccgatgtatatactgatcatgacagcagcacataacactgcggcaccgcaccggttcctgaatctcctcacttttaaacgatgcagccttttttggacttctgcggcagataacagccggtcttttttctctgatttcatgcatccttgaagaagcctgacaaatccattggaaagtccatagtttctatcatccgcccattgattctctgctggatgattccctgtggccatatgatataaagtcactccaagactgtaaatatcactctgttcgtctacctgtcctgaagcatccatctgttcaggcggagcatacccccgggtcccctgtcttttgttcccttcctttcctaacttcgcagagccgaaatcaatcaaggttagagttcctccctttgaaatcatcaggtttgccggcttgatatcgcagtgtatcaccgccggattcctcccgtggagatagcacaagatactgcaaagctggattccccacagaacggcctgccgctcagacactctcccatgtcttttgatatattctttcactgtaatacccgggatatagttcatggccagacagactgaatccttttccatgaacacttcgatcagccttggaagacccggatgatctaagttctttaggatctcaccctccaaaagacctcccagcacttggctcttaactctcttgatcgcaatatattggctatgtcttgaatcccaggccagatatacgtcaccctctcctcccccgtcaatctttcttaaaatgtgacaagtttctgtaaaatccctgttcatctcatgatactttcaccacgatacaggagagattgtccagctctcccctttcttttaccttatcaaaacagcttctgacccactgtctcatctcatccttggatgcttccacctcataaatctcttcttccctaagcatgccatagaagccgtcggtacaaagtaaaaattccatgccaggcttaagcctgccgttgtagcagtctatggtaatctcctttgtgacaccgatacactgcatcagtatatgttttctcgaatctgtctttgcctcctctttggtcagcagtccccggctcacttcctcctggaccagtgtgtggtctctggtgacatacttctgctccctgtcaaaccaataggccctggtatccccgatattcagcacgaaaaagcggcggtctacggcaaacagaagtgtcagtgtactgcccatggaatctccgtattctctgcttaagagaatcagcctgtggttgatcttcttgatggcggccaccagttccttctgtatcctggtgatcttcatcttttgtttcaggagaaccggaagtgtatgggtaaaccagcgatccagggaacccacaatatacccgctggcaatctcccctctgctaagtcctcccatcccgtcacacatagctgccatcagtatctgctttccgtataattcctcttcttttaagagataagagtcctggttggagtctctgccgttgcccatgtcggtcatctctacaatttgaaacataatgtaaatcctcctttttatttccatttcttgatttgattatacatttatttccaatctatgtcaaacgggttttaaaaaatatttattgactttttctcaagactattatattattgtactagatagttaatacaagaaagcgaggtacactatggcatgggaattaactgatgaccggccgatttatcttcagctgatggaacatatccaaggcaatatcctttccggtatttatcccctgggaggaaagctgccttctgtaagggatctggcggctgacgcttccgtcaatcccaatacgatgcagaaagcactgtctgaactggaacggatcggcctgctctattcccagaggaccagcggacgattcgtcaccgaagatgaaaagctgattcgatcactgcaatcttcgattgccgaaaaagaaattgctgagttcttaaagaagatggagcggtacggtctgacaaaagaagatatcatcaacttaataaaatgacaatgagaggtatgtatatgaattatattcttgaatgtaataacctttccaaggtctactctggatttctagccttggacagactaaatttaaagatcccttccgggcggatcatcggattattgggccctaacggaagcggaaaaagtacactgatcaaactgatcaacggtcttttgacaccgacagaaggagacatcctttttgacagccagcctttgggtattcactcccgggaacacatttcctatcttccggaccgcatgtatctgccggaatggatgaagatccatgaagtatttacttattttgatgacttttataatgattttaatatggaaaaggcactttatatgctgaaggatctgggaatcgatgaaaataagcgtctgaaagcactgtcaaagggaaccaaggagaaggtccagctgattctagtcatgagccggagcgctaagctgtatcttttggatgagcccatcgccggtgtcgatcctgcagcccgagattacatcttaaaaaccattatttccaattataatccggatgccagcctgatcatctccacccacctgatcagtgacatcgagactgtcctggacgatgtcctgtttttacagaacggtaagattaccctgtccgcaacagtggatcagatccgtgaagaaaagcaaaaatctgtagaccagttattcagggaggtgttcaaatgctaggaaaattacttaaatatgaactgaaagcaaccgcccggtattttgtccctctgctggcaaccttcggcggaatcacactgctgtttaagctgtttatggcaatgatcggctttggaaatgatccgctgcgcatgacattcagtatctttatcgtgaccatctatgtggttgctgtcattgctttgttcctcatgtgctttatcatttcgtttttccgtttttacaagaacttttacacagatgaaggctatttgagctttacgctcccggtttccatcaatctccagatcctgaacaagcttctgatcagtattttttgggtggtggtatccactgcagcgttctttctctccatctttatcttcctggcaggtacgccgtattggaatgatttcttccacttgatgtccctttccttccaggaatttagcaagatcgatgcaggtatcagattcttgttcatcacagagaccttgaccgccttggtgctcaatgctgtggcatcaccgctgtttatatatctgtgtatcaccatcggaggacttttgccaaaccaccgtctggcggcgtccataggaacttacttccttgcaactgcggcactctcactggtgaccaatattttttcatccctttttccgaacttcatgaactttacaggacttgaagaattctgctattatctgatgcctatgatgctgatcggctgcattatagaaatctttgtttctttcttcctgacaagatacctcatggaacggaagaccaatctttaagatcaataaagccggcaggtgagaaattctcactctgccggctttacaactgcattcacctgaaattgtctaatcctcttcctttaccatttccagatctgcttccatgactttgatatctccacggattttttcgattagattaaacaaatcaatataatccgcttccggataatccatatgggattcaaaatactgccgtccgacctgctcatacagatcatccaattcacgctttgcaacacggatatcatttttaatctttgcggtatccgctacttccctagctttttttgccgctgccttccctgtagttgtaattgtctgttcaatcttatcaaataaatcctttggcataatcaacgtctcctaactaatatatttttcttaaattataccttataaagcgtagcacgtccacccgtagggtatgaaatacgggatgccctactgggtataccttatcgtgcgaagtgcgtccacccgcagggtataatatgttccacataatttccgttcggctcttagaatgcctcactccaatcatgcagaacatagacataatgtctgctagataagaatgacctctagaccaaagatgccatactacattgtttttcactattgttggaaggataccatcccagcgccgaatagaaataatggacaaaatttataccctaccgtgcgaagtacgtcacccccaaagaatataagacatgggatgccctttttaaatttaccattttgtgcattttgcccggaggggtattttcttaatataaggagttttgtataacttttgtactgtaaataacaaaagtccggcagtgccggatttctgaatgatgtttattaaattgggggatctacctctaaaatttataggcagtaaatcctagaccagccatggataattgtaaacccttgttaatattaatcgccgataaaaaaagctacagaaaagtgcagaataacattttaatacaactcttgttactgttaatctttcttatgcggagacctacgcaattcttttcaaatttcaatacaactcttgttactgttaatctacgcagtatgcgaacttaaaagattgccttgatgatttcaatacaactcttgttactgtttatgaaacacggaaccacggttttatgcggtctgtaagaccttttcgacaaattaccgacaaactacccgcttctaacagggccttacggctattatctcccctatttttacgcagcgcccggctacctgccgggcctttacattatctataacaactctatatccgtgatcctcacaactgtctcgagaggatcttctttttcttctattacctcaaaacagtaattgatccaatcactgtccgtgatctggatgctccaagactcctgcggcacgcctcctgtgccgtcccagatctcaccaagctctatttgccccccctgctctacatcgggaaggttgttgccaaactggtccattgcctgtgctttttctattatattattcatcttccttacctccgctattttcctttattttatcatgtttattgtcgtttttctatgctattttatcaaagacattcaccgcagtgtgctgcatatccggtataagatggctgtatgtattgagcgtggtttgtatgcttgcatgtcccaaacgctcttgaaccaccttcggatgaacattgtgcgaaagcagcacggttgcatgagtatgcctaagttcgtgaaaagtcctccggggcacctttgccatttcacagacatctgtaaaagcacttgatatgttccacggtacaaaaaatgtgtcattattcggaaataggaaaaccgattctgacctatttgaaagattccacaagaaattcattagaatcttatcgcaggcgatcctgcgccggctcgatttcgattttggctctttcaaaataacctttgcatttttagttaaggactgcgttttttgtaccttaataaaaccaccgttaaaatcaatatccttttttctcaatgcataaatctcaccttttcgcatccctgttcgatatgcgataaattccccagcataaagccaaggaagacacttcactttaagaattttctccatctctgtctctgaaaatggatttatttcttgtttttccgtttttggaatgacaattttatagcacggatttgccccttttggaagaatctcataatcaacagcatagttaaatgtcatattgataagtttaaaataatttgtaattgtatcagttttgcaacctttagagtacaaaaacttcacataatcttgtatatcgtttttatctatctcataaatggactttccataaaaatactcattaatgaagcgcagatttttgctgtatgagtatgcggtggattctgctatttccaactcatgcagactaaaccacttcatagagacatcgtaaaaagttttcatccgaacactcctttctccgggagaaagccgctcccggtcggttggtgtgttttagaacttttctacacttgtcacttctaagtagaaagcttctgcgtcttcgtcttccccattgtcgatcgtaatttcaaactcaacaacaacttcgcacattcctgttcctactccggtataaacaacttttttatctgatttcacatcttccattaccccgtcggccaaaacggagtaaaatccgtttttaaccatgacattgtctaactccacaaaactcatttccttgtttaataatttttcgatcgttctcattttacttacctcttttactttccgggcaagtatgctatattgtacttgccctgtgtgggtgacggttccttcttactttagtcggttgtgggagccgtctttttgtttgcttatcttccttacacttatatagtacattattgtgtacttaaattcaatagtaatagtacacaaaaatatactttatttattgtgaacagtacacaatagtatacattccattgacggatgataccgtatagtatataatagtgtacaaagaggtgatgaaatgacagagcgtaaaaaacaatactccggctctatctcttatgaaaaattattttctgtgatggatgataagggaataaagaaaacaaacctaagaaatgaatatagcatatctcctactataataaggagattgaacaacgatgaaaccgtgtccatcgacacgattatgtacctatgcgaaatactctcctgccagccaggggatattgtagaatatatacccgcaaaaaaataagccccggagattgctctggggctttttgttgctattttttacgattcttaaaaagggccgtgcaggtcttctttcctgcgtagctgcctttcttccagccaagctgtttccagtaccgttctaatttcttctgtgttgcaggtccccagatgccgtctgtcgcaatatctgcacccggcgacaggctgtttaatttatcttgcatccagcggatcgcatttttagatgatgtcttttttacggttgtgtattttacagcctgaccaccgatagcctttttaaaagctttccactctgcgttgtctgctccgatccaaggcgcagggcactctttcccgtttacgtcccagtgccggatcacatgcgatgccggtacgccgtatttcttcattaaaaatttcaccagttcgaccgtctggtcccggacttttctcggcaccttccctgcactgttgcacatttccacggacaagctgtttgcgttcgtgcacttcttatagtagtttcctgcagcccctgccgtggaatagcagccgccaactgcccaggcgattcggtttacttttaccgatttgtagatatactttccaccgtctacaaagtaatttgcggaggcgtgccggttcttcctctggaagtatttacagttattcaaggccgtgtccccattattcccggtgtaatgcacagaaatgtactctatatcctttgtgcttcttttaccgccgtaattactcttatgtgcaaatttctttttgaattttaatgccatttgtttctcccttcttgtaaagaaaagaggacgattattcgccctcactctccccttctataagccttgtgaacgcctggtgtaatccggtacttgcaaggcccgtgaacgccccgtatacgaccgtttccagcgtaatcgaactctttgccatgcagcccaaaacagctcctaaaatcgcaagaatgagcgggatgtacttgttcgggataaagtccagggacttcttaattacatagcctacgatcaggcaggctgccagcacgatagggatgtaatactctgtgataaattctaaactcataattctttacctcttctttctacttgtcgatgatgctttctaaaagctcatctcttatttttttcatgttttcgataccatttcctgtgatctgatgattgagcaatgcagccaggctctttgattgctgccgctgcatctcctctatcgccacgatccgcttgtaatctttctctgagtggtcttccaatttctccacacggttcttaaacttaaaggccgggtgcacgaccttatagatcactgccccggctccgcctacgatgctgattgctccgcacgctgctaaaatttgttgtaacacttcgctctcctgtctgcaaaataaaaaggccctgcggtcttactgctgttctggtgtctctgctgctcttgcgtcttgtgctgcgtaaaactgctctgtaaactctgcaatttcttgccgcacagtggctttgttcgcttcgtagagctttgaatcctggatattctggcttatgttgtccccgtctccgttctctgcgactgtggcgtttaggtagaccacggtgcgatcagaatccttgactttgatttctccggtaagggtgatgcttctctttgtttctaacatgtttgttctccctccttttattttttacgaacccacatgaagcaagtgatgtatggctgtagattgttatgcgcttgaccacctccacttttttgagtccccatcatatctgttgttgatccactatttccggcaatgtgcgaaacatttcctgttggcgtaacatttgatccaaaaccaatgataccgtgatcatgggatgggatttcttgtagcgtcaggttgtgttttatctctccaccttttttttctactactgcaaattccgtttcattttcgctgactccgactggaactctgccgtttccccaacgttcccaaacccctccaaacagcacggaggggtcaacattcacggtagacatatatatagcccctaccggataaattttggacgacagttcactttgatatgcttcaaatgtcgttttcaaatttaataatgcatcatcgcctgtatcaagtctgatcttaagactttgatatgttgttccagcagcattcattctcgcatctacaacctctgccgaagatggatcagatttcgataactcatccagcaaattgtcatatttttgatctaataaatcctgcttagctgtgtaggcctctatcactgcttgcttcgcctccatgtcggccttgctttccttatttattgcatctattccatcgtggatgctctgtcttacatcttttccaaataccgcctgtaaaatattctgtaatgcttcttgtattgtcatatctgctcctttctaacttatccttttccacatatataccgttatatatggctgtaaattcccggcatttccgcctcctgtagatgttgtgtttccgctgttgccgcctgtacttccggatacataatgtgaatggtcactcgactggttacctgtatttgtaatctttccccatgttgcgccgcttggaatgcgaggatatttatatgtatttcctccaacatctccgctgtctgcctccggtattcccgttgctactggccagtatttataactgctgtttccggttgtatgattgtgagaagcgctttgacctccagacgtaatatttacactgtgattgtgaccgttaagtccgtgtgcatgtgattgtaattccttatgccctccggatttctccggagtattaaactctgtctgtccggtatccacgccgacgatggttttcccggttgcaaacggcacccatacccctccaagaaaagtgcttggatttacgtttaccgtgttaatgtaaatgctatttacgggccagatcttgtttgtaattgcatccatttccaccttcacttgctccgcggtatttgcggcgttgtttgctgtatttactgcactatttacagccggaataacattctgtatgccggaattataaacgttttggttttccacaagggttttaatcgtagatccaaggacaatgcttgaatcttctggcttttttagattctgacttttcttacttacctgcatatatgaattgattccgtgggggcgtgatactaccgggataaagtcacccacagcaatttctttcacatcatatccaaggtcttttaaatcaacagcagtcaattcaatcgaaacaacaagattcttttgagcttcaacttgctcctggcctttctgttttagtatatttgggctttcaacatctgaaaatgaagccgttccatatattttcccaaaagcatccacagctgcttggtcatagagataatctactccattatttacgctttctattgtgattgcctttccagtagcgctgtttgttgccccgataggaatgatacaggttttaatatcttcggcctttatatattttgttatatcaagaatattttcaccgtatcggaccgcctgcccttctttattttcatattcttttagatagtcaatataatatttcccatcctgttctcttgtcctgatatatccaccatagacattcagtagtttattttcaatctcagttcgggtatctggatacccgttttctgtaatctttgcagggtcaccgggcactgtgatattcccgatctgaaactgtttgtctgtctctacctgtgaattgtgagaattaatcagctgacgaaaccggtccaccggtgaaaccgtcgaagagtaaggccgctggatcgtatctaacaaaaaagcgaggtccccctcgcatgtgactgttttttttccgtcaaagtccgtttcttcacttaggacacggcatctaaaaatctctttttcgtttccattttgatcaaaccacatgatgtgcagtttagattttagcttttctaaactgttatacatcgggttgtctggataaatcgaaaaagaaaaagagccgtttttattcagctctgtatctaactttggatcactgatctgcaaatccttatcccatgggtgatagatatatttgtcatctaattttaccttatacactacaaactccctcctctatactccacacttacggtcccgtttccggagaaagtaagcacattatccccttccatcagaagcaggtctggtgccttgctccttccgaccggcagactaaacgtcttttcattatgtgtcacgctcatcgaagcgctgcactcaaattcaggaatcaccggcatagaacggcctggtatatgaagctccaatgagcctgaaacagccaggtccttatattctcttataattccgtcctcaaaagaaaaatcatcccacggccaatcttctgtggaagaatacttttcgtatttatatggatctctgtttacttcaatttcaattttactgaactgcttatttattttattagtgttaacactaattctgccttcgtaatagaatgttttttcatttcctaaaattactttttctcgttttccatgcaaagcattaaaaatttcacttcccttacgcagccatgttccataatctccgtccacaaaatcgaaagtaagtttcatgcttgtatttttatatgttgtgtatccagtttgtgcttctgttatgtcaaggtccccgtttcttccagggatctctttaagttttatatctgcttctggcgatccaggttccagatcaagtagtcttagtccccatttggaactaaggctgtattcccctatctgaatatcaaacattaatttctcctttcaacctttccttgttcttttccaagttctttgctcatgtgcggagccaaaagccttcctgttgtttttccgtcaagttctactttgcctgttatttcaatgtttgcctcaatcggtctattatcttccataacaatcaccggagaagcaacagaaggcccattgtatgatggaacgtccggcgtaggatattctacgctttctacttttgcacgcatggcggcgagagatacatcaatgtctttttccatctgtgccgtagccaacggcatgtatttagaaaaagcagaaccaagagcaagtggaatatactttccgactttgtctcttaccacacgggaaggagatttgatttttaactgtttcttcatgtccttaataatctgattgcacatctgcttcacggctttggacatattttttgtctgtgacttcatgcctgacgtaaatccagccatagtgtccttgccaatctgattcacctttttcttgagtgcattcagattatcatttagttctttctggtagtcctcttgaagtttatcaagatcgcttttgaagaaactttctccaaaactttcagatccgttatagattttattccacttatttaagtaatcctgtaactgctgaggatccatggactgtaaatattccatgtaatcatttgcatctgcaacgcccattcccagaatttcatccatcaatgattctggaatttttccttttagggctttgatccggttctggtaattctcaatagcttcgatgttaccatccagatcatacagactgcccgcatcacgcatttttgacaccatgtcgctctgtttttgcatgatgtcgttgtatttttcttggaacttttctgaaagctcctcgatcgttttttcagcttcgcttacaactgccgcagcctgtttcttgaccgcatttgtataagcagtgatcatagctttgccaaggtttgagtaagagcttgtcattgctttctttttcgctttgacatttttcagctctttttcaagggcctttgtgcttttcttatccttcttagcctttttaatctgcttattcagacttgaaatttttttgtcgtatttcttactttctttatcgctaccctttttaatttgagtattgatcaggttttttccggctgttgtagtcttctctacctgagagtccatggaatttgacagattttcagcaaaggttttccctatctccgagaagttcccttttttgcttgctgacttcgccgatttaatcgcagcattgcaaaggctttccatcgtctttttaaggtttttctgctctgcatttataccggaaatgataccggtcacaatgtgctttccaacttctttcttgaacacccgagatggggactttattcccagctttttctttattgcatttaaagccccagatgccacttccttcgctttattaaacaaggcccctgcggcagatccaataccacctataatcccctttatgatgtttttaccaacgtccgcccacttgatatttttaaacgctgttacggctttctgggccaggctttttgcggtgctgcccatcttccctgcaaggctgatgagaccagagacaagcttacttatgattgtctttccaagagccagccaatttgtattccggattgtactaagtattttggttgctatactttttgccgcacttccggcatttccaatcaaagaccggatacccgaaatcagttttgttaaaatactttttccaagtgccagccagtttgttgttgtgaccttagtccataggcttttcaccaagctattaaacgcagataccacaccgccctttgcggaaacaattccatttttcaggcttgtgatcagtgcctttccagcgctcagaagatttatatgagtaaagacgtttattatcgccagtacaatctgcggaagggctgctattaactgaggaatcgactggatgatcccctgaattaaattcagaattatctttgctccggctgcaagcaactgcattaatccagtgtccagagcggcacatagaccgtttataatttgcgggacatatgtgatcagtacaggaatagagttaataatcccctgcgcaatcgctgtgatgatctgtattcctgtactgatcagctgtggcagattttgaataaggcccatcgccagctgtccgatcatttccagtgcctttggtatcaaatttggagcatattgcgaaatagaatctcccacctgctgtatgatctgcattcctgcactcataagcgctggcgcagcctgcataattccttgtccaattgacgcagctattggagcaattgatttcaggatcttcggtatgctctgagttattccattagctatgctcgttatgatagaaactgcggattgtgtaatctccggcgcatgtgaactgatcgcactcgcaatcataggaatgaaagaaattgcgcttgtaataagtgacggaaatttagaaagcaagccagttgtaatattggctataatatccgctccagctttaagaaagcggtccccaccaccttgaaatgcctgccataatgcatttaagacttccggtatcgtctcagcaagcctgggaataatctctccaagattttttcctatattaactgcggcggttgcaagagcatccgcaaaatccttagcagacccagagccattcaaaaagttgtcatatgccgccttagctgcattcattgatccttcaatcgttgttgctgcctcttttgccgttgttccggtaatacccaaatcgccttgaatgacatggatcgcttcatagacgtctttcagattgcttatgtcatacttaaccccggataacttagatgcatccgataacaggcgctccatctctgtcttcgtgccgccatatccaagcttcaaattatcaagcatggtataattctgctttgcaaatccctggtacgcattttggatatccaccattgctgtacccattttatttgcattatcagacatgtcaatcatagccatatctgcgacttttgcagccttttgagtatttccagatgtgctttgtaacaatgatgcagaaaaacttgttacatttttcatgtactcatttgcgctcatacccgctgtcttaaatgcattattcgcattcttaataaccgttttcgcgctatccttaaaaagagtttccactccaccgatattctgctcaagatcagatacagaatcaagagattgttttgtcattacgccgaaagcagcggttacgccagcaatcgctcccgccgttacggcaagtcctttttttgcaattccgcccagcttgcttatacctgcattaaaacccgcctcatctatctttgtattaaattttaaaccgccatcgtaccccatgcgttatctctcctttcggacaactgcacggctcaatggctctctaatgcatcacctgtcttccttcattaatctttatttcaacttctttcccacactttttacacttcaaaaaaacaccgctgctttctgcggtattgtcataaattattaggtgtgcgtggcagtgcgggcaaacgtaccactctcttgcaaatggtattttctcctttatccccatatcaccacatcatatttccaaaggcgtcaccgatgtcttcatctgtcgcactattttctgttattgcaatctgcctctggatcttcatgatcctttctctttctgccttgtctttaatttttccagcatcaatactacggtaattcattcgtttttttagttcacactcttcgttcataccgtcaatcaacatgcggaacttccaccagtgcatatattttaccgttgttagatcaatgccataacattccagaaagcctgataatataaaaggtgcgtcctgcgtgtaggacagcacctgtttttcttgtctcttgctttcttttgtatcactttcggtatctgcatgattctcttctcccctgtaatctgtcataaagatagagagggcttttaggcagtcatggaagttggcttgaggaggatctataaaccacatcagtattagctctgccttttccattgtgtctacctcatcatcccggagtaaatctatcaacttgatatactctctaaaatcggtcactattttataccttctcccggaaatcaatacatgctctggaaatttttcatatagagggttcatctctagttgccacgatatttactattgtttttcttgtgtttacctggataatatttctggttctttgcgattcgtctctgatttatcatctttacctgcctgattgtaaagccaacaaagtcatctgcgatttcttcacatacccttatattatgtttcccattgaatatcttgttcccggtccccggtccgaacagactgtcaaacatgcgataatagacgttacaatagtttcttacaaactccactgttgccccgactttctccaattccttctgttctttatccactgtttcaaatgtcttcatcattttttctaatacgtcggcatctgctaaatcaaattcaaattcatttccgttaatctcccaaatacggatgttgtctttttcccggctcatggctcaatctccttcatttcttcatttactgtttcggtaggcccctctggttctggggccgtttcagggtttggaagtaggtgcagctaagaaagtgcagcttttctggtcttccgctacctttgcatatccttttataatattatccttgactgcaaaactgccagagtattgcagtgcatctgtaccatctccggagctgtctggcaggatagaataagttctttttcttgcaacatactcatcatctgcttttgcttctcctttgtcaaaaaagtcgacaactacgatttctcgtgtttcgcccttctgttcatcgtcctgtacggttgccagatcttttaataccggatcgccctggtgatgatcaaagccatattcaagggctgttccgtacccggttacatcgctgtcctggctgtctttatctacgtactgccgctcataagtgaccggattctttgattctgtaagagaagtaaagtgctgcatccggtcaaactgcgttacctccccatctccatctaccgcaggaacgccataaaaggccacccgctggcttcttcttactaattttgctttctccattcttatacctcctgggtgtaaagaaagcgacattgaatctgatagctggcataatccggctccatgccgaatagaaacccgctgtttgtaacttcaatgtcgcttatattttttttgttgtcatttaattcagggaaattcccttctctgttctgtgcctcaatccattccgtgaaatctgcaagaaatccactattttctatggcttctcgctcgtcccctgtgaagcgctcctttgtgctaaatgcaaaggcatattgccgcttggaacctccatccacgtaggtttttattaccggatcaaccggcagtggatcaatggagtatccaatttccgccccggtataatctacccttacatgaccctctttcaagattgggcacgtaagaataaaatcccggaccgcctcaatcaactttttagcctcccctggcaaccttctcagctccttccagtatcttgtctttatttgctgctttcatgcgttcaaaccactttggcccacgcagcccttgcccgctatgctcataatactgcctgcgggcatatggagcattgtaggatacttctccggagccgatgaccgtgcaaagggttccgcttttaattaatgcaccagtcaagcgtggcgttagaggatcggaaagccttaacacctcgctgtcaacgaaacattgcgcttttgatagattcccttcaatccgaggcgccatacctccggcccattccagttttgccattactgttcctcctgatgtcttctgcgtgtagatctgtccacgtggcgtctttaccacaaactttttctgttgtgccatctactcgcccccgatcctgaaatgtggaattgttgtatttgcacggttatctgaccagcttgtaatccggcagcttctgttaggcaaatcagaaggttttactatgtcagggccttttccctgaatcacatagtcatccttttgtattgtccatacgtcagatgcgccctccatatctttgtatatcgcggcatccatgtagcacaattcatatttcccagggatacgtattttgaacatatcctgatttctcagtccattgtcgtcctgcacaaccttattgtcaactttccagtgacactccggtatatatgttttgtaccaggtatccattcggctttcagggtcatattttttattgtaaattgtcaagtctgaatttatgatcacatcgcacaccaccttgataaagaagcccggtcatccacaaatttttttctatacactcttttatttcttcactgaaatttcttgtgtcattgtatgttatagaatctccatcatttgtttctgatttcacattaaagttcatttcttctttttcatgtaaaatctccgctacctggcaagccgttatttgaatatcatcagcccatttgggaatcagtgattgtatccgccccaaactattgtttctgatttccatagatgcagaaagcgcataccgtgaaaatatttcctccggtatggctgatcctgcaaaactcgtcttgtagaaatcatatgttacaaatgcaaccatgatacacctcctatcgagatgcctctgtttctgtacgtttgatataaaccgtctctggttttgaaatcattcttccccaaatctttcgcccctggaccgcagatgcaccaatgaaagttccagaaccagaaagatcctgtaaatgaacctctacggcccattcgtctactctatgacaccagtttggatgtcctgcgataaattcagtcgtggtgacctttcctccagtggtttctgtgtcctcatacaacaaattatttgattcaaatacagcgaaccccgctactgatcctactgctccagcatttttcatttcctgagataaatctccctgccgaataaaatggtcgtctaacatcaaaactgactgaaattctggggagacaattagccatcttccatccgatgggacgccttttcttccaaggtatgctttagcctttaatatttcctgatatgctgttttctcagtcgctgccgtcttagtttctgtgacctttgtcccacttgttgtttcgagacaaccaattgaatctgcgtccatctcaagtgcaagtgaataccccgcagaatctaaacgatcagctgtcaaattgtcaggaacagatgcagcatcaaagccatcaatcagttcatttactgctttatctctgtcaatgtttaaatccgcataagaagtacttccggtttcaatttttattccggtttccttattatagtcttttacttttacttccgtatctctaacaggaatctttacttttcctgcctttggatttccttcataattgttgttaaaaatgtaattgtctcttgttacgagcgtctgtcgcaattttgcgtctaccagtgcagaataacgcacttgtgattcatgtgccattttataccttccttttcttaatcaatctttaagcctgggttctttttcagaaatgcagcctcaactccagaagtcttttctttcgcttttttcgtctgtctctgtccccatgcttttttcggttccttatcttcctcgttttctgatgactttgtaaaatgagggtactttttcactaccttttcaattgcatcctctatgtctgtgtcatcatcaagatacgagtgtgccagagcgattacatcatctacgcaatcttttgaaatgtcatgctcgtagcataagatcttcatctctgctttctgtgccctgacttccgcttgttttacagcgtcatcatcttttgattcgtttttatcggattcattatcatcctttttttctaaagactgctttcgttcccactttctacgctctctttccagacgttttttgatcgccttatcaatatcagcttgtgtaaacttcgcctcttcatctccgttttcgtccgcttcatcgtcgtcctggtcgtcaccatcactgccggcatcaccatcgtcccctgcatcaccgctttctgcaaaaaactgcaagttcataggaaacttccgtgtttccattttttctttcattaattcattttttctcattttttttacctccgtttactgttcgtcaactaccgtagacagttttaggtcataactacgtttggacataaaaataacacgccttagcgtgtcgatgcagcttaaccctgctgctgggagataccggatcaccattcttttctatttcttgttttcaattgtttgcgctcctttccttaaaaatcggcgtaaaaataccgccggtccattattgactggcggtattaaactaattcaatctgtaatgtatcacaaatttccgttaatgaatttccgtcatagaatggatcattcatcaaatcgtttatatctgtatatgtctttgctacattaccaaatcctacttgaaatttatccacggaccatggattgatacacgcaaatttcccgttgtactcaaatgtaatgtcctgcgtcagttcaagtatctgtttttttaactctgaccttttcatgacagatcaccatgctccttcctttcaatttggttcatctctctggtgtatcgcttcttaatccttcctttttcccatctgtatatatggacatgttctccgttttcgccataattatgaattttttcatttccgtgatttccggaatgaatctgtttgaccatatggccttttcggtcatagattgttcgattcttgtattttactccagacttctcttccatggtttcgataacagcattctgcctatactttccagggattttaacatgttctttctttgtccagtcgtctgttgtaatgatgattccatctttattgtacctgattttttggtacttcacaatggaattatcccgagggagaacccgacctttcatatcagaataaattctctgtctttgttgccttagccccattttattagagaacttcgtatattcataaagctgattattgtatctgatctggtcatccagtatcttttctttgtctgtacccgcttctttcaacaatgttattttttcacgctgagcacgcatggctgtttccattttcctttgcttctgcgttgcctggtatgtagtatattgctttccgccgtattccttcggaacatcctcttctttatttttgctgttcagccattcatctgtccagctccttaccgaaataccgggaacaaatggataatacatatgatagcagtttgcaccaagcaatccagtcacagtatatagcccgcagacagtcacaagctgttcttttgtccacaccttgccttgccagattctatgttctggccttgcccctccgtgccaatctacttcaaagtgatccgttccaagcttctcggcattcatatctgccattttcccagatagttgtgagattccggtcatgatagctcttctagctgctacatctacccggttggaccatccagtctgtgcataatgaacggttctcagaccactattcgttaactgtgttacggtttttctgattgtggattcataatcgaatacccctgacgcaatatccatcatggctgcatcgagaatattgttataggtctgtgcaacagatgtaaaatgcagtttccctgtccaggcatccggcatcatgaaacctaacgattttgtaatgttgaataagtctgtattgctttgccgctggaatccttctactaactgttgcaactctaaatttttgtcaaatggtataaattcctgattgacctgctcatatagggatttatacctcacatattgactgtttattacattatcatatgcctcaaaagtcattgcatagctgtcatcaaggcacttttttatttccttttctatctgctctgtagagtttccaagtaaatggtacttcgtaagttgccagtcggcagtactggtgatttctccagttttctttatccggcgtacaatatcccttaatattcgttcttccagatcaagaaaccttttttctgccccatgtgacaatcgctctgaatactctcgattcataagctatcaccacctattcaatgatctgagcttgttgcggaagattcttcaaagcctcttctcttgattccccataccatttagcccgatactcttctggagccataatgcctgcagctaggtcttgacggtcttgctgtctctgtgattctttatcggttataatgctgtcatcaaattcaatagaaacgtcctgatctccagcaccggacagaaaagcgatagcgtttaccatgcggattaatgcatcctttatgactatttcatgtttcatcagattttgatacagctctgacttctctgaaataacttcggttgctgtcttcgccgttccgttttcaaaacggtatctatcgtttccaagcccacatttcatgctcagaaggtcaagcattcgctgtaaggcttgttcatgctctgcagccctcaatgacatgttgatttcctttattgattttggatctgtgtcattcgtctgataagaataaaactctgtatcgttcggatcaaaaatgggattcaccgtcccgtcttcttgcatctggatctttgcgaaagtcgtaggaacaataatccttttcttcccaagtcgaaactcattacagtaagaatcatataccagatcaactgcttttagctgatcaatgccgtttgcaaagcagctcacacccattgggctgtcaaagtcaatattattaattatgtttggcgtgataatctggaacaatggcttatcataacctgttaatacagtttcctctatgtcatccggaaggtctaattcctttccggattcagaacaaatatagtggttctcaattacatattgtgtcccatccttcttatgtatctggatataaaatgctttctccccggatacgacaacagggcttgcaaaggcgcattctgtgataattccattgtcatgtgcgattggtcgtatcatttccgctctgatgtaatcaataactacttgttcatcctgatcaagatattccacaaaggccgcagtgccaaaagcaaacatcatctcaatcaattggttccctttaaccaggaagttgttattttcaaatatctggttaagggatacggaaaattcactttctgtggtgatcgtgaccttttcattcaacaatagattagcccagtcctcgcagatcctctttgccatctgcattgacatgcgatccttaccaactgttttcactccattataaacattataccgatgaaatttcttaacgtatccctggtaccagtcttcccactctgatagatgtcctagcgtcttatctgcttgtagcacatatccacttgtttttaagaactcacttacaatatctctcatttcatcacctgcctttatgctactatatacataatgtcgctcataatagtttctgtgctgtactccgtactatcaaggctgtctacgttcatttgaccatcatcaagacgtacatcctgattaggcttgctgtcatcataaacagcctcctcaaacgcttctttaatatgcgtgcagtgtttcataatcttccatctgccctgcgcaatcatggaattgtaaaaggcaatccggtcattgattggccctttgatcgcattcttaatatctattgccacccgttccctgattatcgctgcttctagaccactgatcagcgtctgttctgcgctgtcacaatatgcttcgtggactttgtatctgctctgtgccctctttacaaagtctataaaatcattttctaactgttttggatttatcctcttcttgcagtaatactcatcaagcacaaccatctgtctgtatccctttgtaaatcctgtcaaggtaaaagaatgagctgacttcgtacctccgaaatcaactccaatgattgcatgtataatttgattatccctgagccattcttccgtaatcaggtattcatctacatgatctgcaaattgctgatagataaggccatccgccgccacccattttccaaggataaaccgcttgtaaaaaacactgccaagaggccacgcatttttataaaaatcctttttactttgcgataatgtaaggttatcctccatcgtgaaatgcagatgatatacctttttcttgctgtctttctctgcggctgcttttatgaactcttcattgatataatgatgcggcccctccggattgcagttcatccatacctttgatccatcaatagagcaccggcctatcatctgatcaataaatgacttcggaaataaagctgcttcatctgcatatgctccggcagcagtcaggccctgcaaggcatcctggctggcctctgtattcgccccgtacaggtagtaagtattatcgccaatctctatatgcgcatccgatccagaccggatgtattcatatggccacccccatgcttctaagatctgttgcattggttttacaacattctttttcaatgctcccatggtctttcctgccagaataaaactctccccggaaaacatctcctgggaccagatcaaaaacccgcagatacatgcaatcgttttccccgacctgatagatccatccgctatgacaaaatcgttttctgatgtccttgtcactggacgccaccagtttataagtcttttctgttgacttgagaatggtttgaatctaaattccgctgctttcttctgtttctttggcatcgtcaacaccatcctcttcgttaaataaagtatccatttcttcttgtgtcggcctcatggctttcaagaaggattggatgccttctgtattgtctgtatttccagcctcttggtccctggctcttttatctctatctatcttaatctgttgttcttctatatccagatcagactttgttgtttgcccgattgtgtccctgatcgcttcaaaggcttttacgtttccagtcatcgcatttttgattagtgcggctgttacggcggattcaagagtattttccagtcctagtccatctaatattggcgcaagttccggattatctactttggcagttaacaaggcatttaatgtccttctaagatctgctttttttctcctggcctctcctgatgcccttccacctttcttggctatttctcgtagttcgctcgtgcttcgactgtcaaagcccttcccttttaagttttcttcattcgccacaacaccaccttcctatctatctgtaaataacggagaatgaagggatcgaacctccaccacgcctccaggctctccatacgggctaagcccgtagcaatgtcttttgtgtgccatgccggacacagcaagtttgttttacgtctctgttctccgctctgacggttgtttttatcgtggtcgctccacgcctgcattcttagaatatgtgtttttgtataggatagaatgcagaagacccattgcggtttgcagttgcaagaatggacacccagggaatcgaaccctgtacctgcggcttaaaaggccgttgctctaccatatgagctagatgtcctaaattttgtatcaaaaaaagcacctacaaatgggtgcttcgtaaattatgtatgtcgttttgctgatttgtatatttcgtgatcctcatcataccatattacacgaaaagttccatcctccaatatcccatacaacctatgcgttcctgtcaatcgaagcgaaaacgcctccgaatactcctcaagttttagctctatccatctttcctgggcttccttgataaattcgtcgacgttttcaaaatgattattatttcctgttcttcttcctccggttgcctttatgatttctccccaagtcatcccttcataatctttcatcttttcaataatgtaaggataaatgttgtcgcatttctgcaaactccatctttcatgctctacatccatatccttgaagacccatttaggtgttttatcataataactttcaggattctcagtatttcttgcttctttaatccctttcggtttttcagaaacttttaccttcttctttttgttctttgacacttgctaaagacctccatagtaactttgcatgctttcctttgtaattacttcattacaatatgcccctggcgcacatcctgctcttgctatcttccaaggagcctctttatgcgtaagctcgctaagccactgtggttctttatctccataatattctaacacgttatccatagtttccagttcatcttctgaaaatacattttgtatagatccactatccgtaaatatgtcttcgtctaccacaaacattcctctatgtttttcaaataattggggacaaactggaccatttgcccatgcttcaaactcttcatcaaataacggtacatcatcccaagctaatgaccatgcctggcaataatatgtgagcttctctagtttcatcgttgtcataggcccttttttgtgcaagatatactttgctacatccaatacccttgccatatcttccatcctcctttataaactgctatcacaatatgttgtataacaattcatacttttattatactagattatcgtcaaatcacaacaaaaagttgtcatattgaatgtattttaaaacaaacgtaatatttgacatttttattatttcaccctttttctttattatacaaacacttgtacgggcattgtgggcaattatagtacctaaaaaccccgatatcataaagataccggggaaaacaaaataattatagaggtttcaatatgccttgcgttttggtttatcaggggcgccgccgtgacgccccgtaaaaaagcttaagaggagtgcaagaaaaataactgctatagttattctagttgctctattataattatatcactcccattgtgttaattgtgttaatctttcaaatattcgctaattatctgtgaaatacggctacgactgtaccccacttgatccgcaacttcctgctgtttcttttcttccaggaaagtcatctcaaatatctgccgggctgtactgtctggtatagccgcaatgaactcttctatctctaacacagcacccatagccgtgatcttccgtgatgttttcatccgaattagtttttttatttggtctgattcccccggttcatccatgtatacagttggtcgtgtctctatgtatggaaactcagggcttgatccttttactttgcccaagaccgttggtatattcttctgtctgtcatagagctggtccagttttttgtcgattagatctatttcccttttgagtgcgccgtgctgcttaagtttcttctttgtcacaccggtccctccctatttaatctttgcctgttcaatgtttctgataacaaccgtactccctccgcccggttcttctacgatctctacattctctttagtgatatattcctcgattggtatcttgatctcgattccggtatccgtctccacggtgatatattctaatcccttgaccgtattctcttttccaacagtgaacttgtcatactgcatgtcataccgctccatccggtcatcaaatagctgcttcttttctgcatcgcctccaaagatccggtcaccgatctcattgatacggaactcattcttttcagcaaattcttctctcagcttgctttttgcatccaggcggttctttaaaggctcattttcataacggttgttgatgtctgtaatgactttgttcaggatctggaactttttcttgggcgccatatctgcatggcacttgaggaaccgctctgatatgtaattgatcttatcccctgcgagcatctcatatttcttttctaccagctgtacgttatattccagaagatctacgatgacggcttctgtgagcttcgccccgcctaatggcatgatccgttgtttcacgatgtcgttgacttcattctctgcctctttatgtacgtatgtctccttatagttcatcttgagcattgccaggtatacgacactatgcaactggaaactgaccacgactagatccgccgccgggatggtgatactgtcgcacatgatgtcaaataggctctcggcaagcacccggctggcctctataaagctatcgtcttccttttcctgcatttcttccagcaacgccgggatcggggaaatactaccgtcaaactgacacttctttgtgtcgtcgctgtcaaggatcttaaagatgtgcccccgaataaactccattaagtccggccccatatccagcaggtcattagacaagccaagatatccgttatggctgtcaaggatatgtatgatcccttttctgatgatgatatcgtctctttctattttctgcataactatttacctcctaaatctcagtttaaccatcatagcaactacaagggatttcgttttcctcataaaattggcacatactgatctggctatcttcccattccatgtagtttttccatgcaaaactccttccaagtcctttta

SEQ ID NO: 18 - DNA, 72894 bp, Anaerostipes rhamnosivorans
acttttttcaaaagttaaaagcagttaagaaacaagatgaagttgtgaagcgctgctgttttgtcagcaacgttgataatcttaccattgctgtcggcaaatgtcaacagctttttttcatttttttgcatctttttatcgaatcctgcggcgatatagaagaagaccccggagaaacggcataaaaacaccgtttctccggggtcttcagttgactttaaaaaggaatcgctccctttaaaatcgagatcaccgggttattttccaccataaactgaagcagagagcttgactgcatccattggctgtactcctgctgtaggcctacatactggcaaaggtaaatagcaaacagcaaaaaggataccacgatcactcccttcgcgaatcccagaacccctccgaacagatgattaaaccatccgatcacaggaagatccccaaacttactgataataccgactaatatagaaaacaaaatcttaagcacaaccacgatcagcgcaaaagcaataaaatatgcaagctgatctgtcagtatattttgtttcgaattcataaacatctttatgacgtactgctttatggtatctgcggttgaataggcaatagcaaatgtcaaaagccatgtagccaagaggagcagggattttagaaatccccttttaaaccctctgatcgtatcaaatatcaagatcagcagtaatacaattaaaataatctgtcccataatatcaccatctatcgtaatctaactaactgtgttttatcttcaaatgtaattaagtatcgttccgccttgcccgtaggggccatagactgaatcctctttttaaaattctgctgatacatctcatgacctgcaaaattaatcattgaacaatgatagtttccaacaaacagaacgccgtcattacccaggtacacatcggagaactccgtcttgatctccttctccataaccattttgccggaccggttatatgcttgtaccaggtactgttccttggaagacttctttttgttctcaaggaccagcgcaaaatgagagtcatccgcagccacacttttgatccttgaatctattataatctctttttgtttcgaaggtgtgtcctttgtgttaaaaataattgtcttattatctccgatggcacacactgtattctggcccataaactgaatcttaggaatgaccgtatccttaaaatcaaatcctgccagaagcctgtcttctttttcctgtcctttttctccgaaatcataaaatgctacccggttcttcgtctgcagtccgtccactaccagatagctgacggcgagcattttaccgtcatctgacagatcaatatccagaggataaccattttcgtccactgtggtcttgatcgtcaccagcttcttttgagaagcatcatagagttctatataattttcatcgtccccctgcaatatagcagcgatcacgccctgttccgccacttccacatcgctgatcgcatatgaggtagaaaatctttttacttttccgctactgtcatatagaagaatctcatttccattcttgtatgcaaccacgatgtaatcaccgcagtatgtaacaatcggattcttaatggaataagctttttcccatattgtttttccgtccccgtcaataaatgatatgccgtcttcattatagctaatggaaccgctcttatacgcaaagaactttgttgtggaatctacatgctttgcgatgactttttctgtcttaagcgaatggtacgttctataccggtatgccagaaagatcgccagcagtactacacaaaaaatacccaaaagaatccatctctgttttttccggatctgctttttccggatagaattctgcattgcttccctgctgtttgtataaagagaaaatcctgattttatcctgtggtccatagtaaaacctctgtatttttaattaacattatcaatttcacgctttattatacatgatttcactttgttatactaggaataattagtttctgtcccggatagatattttccttcggcccaatccggttggcatccagaatcttatacatatactttctggtaccgtacatcttacgagaaattgaaaccaggctgtcccctttttttacaacataagtctggctgcggctgaccgtctgtgtagatttctgtgttgccgtagtggcagaagccgcggtggtagccgatgcagccgtcctggtactagctgatgtttttttattctgctccgtcgtggttcctgtctctgagccgcccgcctcctgagtatccgccgggagctgtttggttgttgtccctgatcccttgttttcttcatccatggaaacattatctttgactcctcttcccatggtttccactgcgccgtggatcgcatcaccaaaagaagaaccattgtccagtctggagtaataaaacattccccctgccaggatcaaaaccagaagcatagccgcgctggatgaaaaccgcttcatcctatcttttgtcttgctgctcttctgcttttcctggacgatcgtgcggaattgccgaacaatcttttcatcccgttttgcctccagcatattctcatatgacacaacttccttgagcttctggttcctctcgatcagatactcctgcatcatcgggtttttttcataatatatgtaataaccgctctgccgcacaagatcttgtccgcggtaaacataaaaagcatcctctccctccagatggtctgtcatatatagaaccttaccatcccccgggaagttttcaaaatgcgtcttcttgatcttgtcattgagccgcactgagaatcccattctggaaagcgcccatccaatgacatcaagatccgggaaaaacctttctttcttctggtagatttccctccataccttatcatcgaatacagtctcgtccaaatccaactctatattctgcccctcaacagcacctctgataaatatcacagtttcattatcaatacttttcttttctccaaataatatggcccctcttacaaaagtgttcttgtccgtcgtcaatgcttttaaaaatgtaactacaaagtcttcgatataaacctttgtggttcctacaggcccgccgatctgtctgatgttcttcggcaactgattttctgctctcacgaaaaagcctccctttcctctttaataccaaagactttatcacagtattttcaatttttttatcaaagggcgtcgacagaagaaaataattttctccctctttggagacggaaacttctaaaacacagtgtgtcctgggggagtttttttataaatttcatctattctctaacgaactgccagtaagcctgaacgaatatacgcgcgaagggtataaaatgcggtgtgccctgtgggtataccttatcgtgcggagcacgctcacccgaagggtataaaatacggtgtgccctgtgggtatactttttttatttatgtataaactatatggagcgtcttatcaggcggaaatgttatttaagaaatgattggagaacgcaatgcgcatttcagaccgaatatcctattttaatccaaaaagcagggaggcagggaccttgctgcaggcggatttgatccgcaggattcaaatacaaaaaaatgacagccagccagtggtggtcctctgtgtaggtacggaccgtgctaccggtgactgtcttggaccccttgtagggcaccagttgatggcatcttcttattataaagttttcggaactctgtctcagcctgtccacgcagggaatctggctcagacaatgactgacatctaccacacttacaaagaaccttttgtgatcgctgttgatgcctgcctaggctctatcgaccacgtaggctttgtgacagtgtcatccatgcctctgtttccgggacagggtgtggataaggagcttcctcctgtgggggacatctccattacaggcattgtaaattatacgtcagaagcaaattttaatacaatacagaccacaaggcttcacaccgtcatggagctgtcctcttatattgcatgtggagtagaagactctgtccggtattttgcgaaacacgctgctacaacttagcgcactcacatatccagcttcatgtctccctgtttgataatccccatacgcctcatcccttctgatataaagtaggttaaaagcgccggggcaataatatgcatgccaatgatcataaccgctgtggaagccggagaacccccgccggctaccatggttttataacccatgatctgccctaccagcccagctgtgcccatgccagagccgattgcattgtttgtcatctttaatactatagtagaaaccggaccaagaatcgcgctggtgaggatcggcggaatccagatccacggcttcctgacgatgttcggaacctgaagcatggaggtcccaatcccttgagcaatcaaacctcccactttattctcccggaagcttgccactgcaaatcctatcatctgcgcactgcatcctacagccgcagctccggcggcaattccagaaagattcaatatcacacccaaggctgctgaactaatcggcagagtgagtgccattcccatcagtacagaaactacaatccccataagaaacggctgctgttcagtcccccaccgaatcaaatctcccagacgtgccatgagctggctgatccatggtcccaaaaataatcccacagcaccgccagtcaaaatggtagtgagaggtgtcagcagaatatcaagctgagttctgcctgaaatcaggcgccccagttcaatccctacataagcagccagaaaggcacccagaggttcacccgggcctgataaggcaactgcacccttgaccaccagggtcccggccacgatcttagacgcataggcgccgatcataccagcaacggctgctgagaccgtcactaatacaggttcctgaaaccttgaagcaaccccgactccaatacctgcccctgtgagaatctttgcagctgccgcgcctgtaacgagaagctgtccgatatttccacccgctaaaactcccacctgctccaatatggtgccgatgatcagggttgcgaatagtccctgcgccatcccggacaatccatcaataaagaaccgttttaatatcttcatatgttaatctcctctattattcttcgtttaaagtcattttaaatcattttcccttttactacaatattgactgttttatatttatcttctattatacataatatatatagaaagaaagcaggtaaacttatgttccgaatgtgggggaaactaatgaaaagtaaccggctgctgaaagacactgtgatcagtgtggaggatgccggtttaaaccgtacccgaaaggtgtacaaggcacttgaagacatttgttatgaatttgacctaccgaagcccctctggttagaagcaaacaaacatgaatttatatcacacgataaaacaaggttttatcatgacagttttatagaagatatcaacttcgattttctagaaattcaggtcatcgaagaagatgaaagcctttagaatatttctacgggctttttttgtacaagctttacaaaatcaggaaacatatctataatgagagatatagatatagagatacaaaccatgaacgggggaagagggagagaatggaaatgatacgccggaagaataaacctcctacgaagagcgctgttgactatattgaattgctctacaacaagtatgcatcaaagttgaagttcgtagcgaaacagtatattcatgatgacaccttggctgaagatgtactacaaaatgttttcgagaaagctttgctttattctgaaaagattatggaattaccagaagataaggcatttacatttctttatgtcatagttcgcaacactgcatatgacatgatcaaggttgagagcagaaataatcacgaagaactgacttacgaggatggcgaagattcagaacatttaattgatccgaacgaccactatctggaatttatagacttgaaagtaatgagagacaagattgaaaagctgccgacgaatcagcaaactgtactaatcttgcactattactacggattcagttttctggaaatagctacacttttacaaatctcggaactggctgcaaagaaacggtgcagtctagcccgcagttccttacgtgctctatatgagaaggagggattgagttatgagtacaaaagataaaaaagacagaaatgaagaattgtttgaccatatgattaaatatggtacaagcgaatgggctgacgacatctctcctgacgatattccggaagaagatctgtctaatcaactaaaccaaaaaatgggcacgatgttcgcgtccgcgcgaaaaaaagcaaacagaaaacgccgttttgtcaccgcacgaagagttgctgctgtatttttagttttccttacaatggcatctattactgtgatgagtgtagaagcttttagggttccggttttgaactttatatttaaaagcaataaagataataatagcctaaccgaaatagaacctacaactaaagatcctgactttacttttaaatatataccatcaggatatcattttgtcaaaaagaccgtcgcagaaaacaattcttattttatgtatgaatataaagacaataatgataattggatttctatagaattaaattctgacatatcatcaaaaaattattctgctatcgataaaacagattatgttcagtttgtaaacaaccataccagttattatttcttacaaggtgaaagcaaacagttactttggtatcaaaataaatttatacataaaatcagttctagtctttcaaaagacgaattattaaaaattgctgttaacattaaatacaaacaataaatattttatactaatcactagctataaagtcctttaggccaaataaatttgacctaaaggatttttttaatacctaattatgttagctaaattctgttctttaattttctctcctgatttttattaaacctatttattagatagcgctatacagttcaccttttcattcttttctcggttttacaagtagtaaggataaaaaggaggaataatgaaaagactatctattaatttggtttgcgctgtttttctcgtcacttttattttaggttcatcttcaaatacaaatcgcgttttcgcatctgaagtgaacccaccaattactacatcaaatttcattactgtaattacaccccaaacactttttccttttagttatagtaaaaatactgatcttgcaagcgctagtacaaatgtaacaataagcaaaggtagagcatatttttacacaggtgccgttccaataaaaggaagctattataccactattacaatgaaactacaaatttataaaggcgggtcttggaagactattaaatctggaagcgcaaaaggaaaaggttctcaaatgttttccaaccattattatgtatacaaaggttataaatacaggggaaaaagtactattaagatttataaatcaaaaggtggaagcctattacatcaaaagacccttacgacaagcactagaaaatattaagaaaaaaatccttactataaataaaaagagacgaaattcttcgtctttttttattaaaaaaagttcacctttttgttctaaaaacagtttctattatagagggatatttttcagccattattcctgagaacatattaactatttaattatttttaagaaaggaaaaccatccaaatcacaaaccattctaaaatattggttaagcaggtgtggaaacctgctttaatggctggattcatccctcttgctgattctttaaggttactagtgcctttagacttagtaggcaggatggccaatgtattcatgataacattggcccttctgcatttttataataaactttcaaaacactatcactttttccatattatttcagtttctattataagagggcattgacaacagattgtgactatttcgttggacctcattctctctctcataaaaaatggccaatgaagtctttgcaatctgttgtcaatgctcttttccaaaaaataaaaggacagaaacctcattcattttggtttttgtccttttatctatttaattgaataaatcaaatccaaagcttcattaacagtgagatatcctacaatatgtatctgatatttatgaatatttccaagtatagacaaggattctttacctttatatatatagaatttacccccctcataatttactactttaatcttccttcttttttctgcaaagtacactcgtgtatttccatcctgaccactacaatcttccactacataatagaaattcttatttcctttcttataggttgcaagtgaagctcctacttctgttcctaaaacctctatagtaagctcctctaatttccaacctttaggactttttctgggatacacgactctgccattactaatttcatctacttcattccacgaagtaacctttttattttgaaattctccgttctgtccattttcctgagactcagcataattctttatcttcattaaaatatcaaaaatcgattctccatctgaatcatgaacgttaatgtctactactgttgcttcttccttgatttgatcgaaataatgaaagatagattttcctgtaatcgcataacaaataacttgtgctgatataataaacacaagaacaaatatagccgcttttgccgcaatagagagatactttttctttcttctgctcttttgttcatttcttctttttaaatgctcacagtaaaactctccccgttccaaccgctgctcgtattccagtggattgatacattctaaaatatgttcaatgtgattaagtttttcatgatctggttccagcttcaggaattctgtcatccattccagttcccatcgtttctttacaaatcgcctcatcttttgtacccattcctagttaaatttgattagttttactattataacagaagataacagaggtataaaacacatagtgctttttatatagcctctatggctttgagcaacagccaacccacgagggcaattcccaaaagttctgctgtatacaaaataatgactttacgttctttgaatgatttacatgtaaggaagcagataacaataacaaaagtacaaaatacagcgagtaaaacagcgaatagagaaaattccaaatgaaaggctatttcagccacatgacatacagcacttaacaaagcgaaaactacaagcagcataacgtaatttttctttttttcaaattccttctctgtttctagcattttgtcattaatcagtggttcccctcctttcttaccatcatgtccgcttgcgttcccaaatctctctctctatcttctcctttgtcccgtccgatacatcatcttcctgaatatcttccgaatggatttcctccacaagctctttgattgcctcttccatgatctcttcaaagcttttcttcttcattatatgacccctttcaaaataattatagattacacttctatgtcctctaaaatcccctataggtgtcacataatttaatattttattttcagccaaacatgacaaatataaacagctgtttcctggctttccttcggattctggccagctttgattttaccgcctgatccgtacttttccgaaacgctgccaattcatttaaagaaaaacctttgatataaaaatcataaaacagtttatattcatcctctgtcagtatattcttcaggtctgttgtcagcagcccgctgtagtcatcctcaaactttttattcagcgcaaacaaattttcatctgtcagtatctcgttgatcttatgtttccgttcaaacacatgataagttttatactttgcagtctgctttaaccacccgatgggattttcatgctccgaaagtacttcaatcttctcaaaagcagtgagatatacctcctgcaggacatcatagacctcctgatggtcccagtagaatacccctttcatatacttgagcatctcatcatagctttcgttgtatagtctttcaaatacctgttctcttgctgtgcgatccatgttgtctccccgtctttgatctattataatatgtcgtttctttacagaataacaaaaactatctataaaagcaaaaacagcatatggcataactcttaaggctatgccatatgctgatctcttcttcttacagacggcttttcttccgtctacgttacttatggacaatcatagtatatgaattaagcgtttactcggctccctcttccggctgtgttgcgtctacatctccaagtctcatggcttcatactgttccaagatcatggactggattgtatttctcgttgccgaattgattggatgggcaatatcacggtattccccatcggcagctttgcggcttggcattgcgataaacagtcccttttctccttcaatgactttgatatcatgtaccacaaattcattgtcaatggtaatagaaacgactgctttcattttcccttcttttgctacttgtctgatacgtacatctgtaatttgcatgttgtcttcctcctagttttcaataatatagctgataatctgttatgcgggcgctcttttctgtctccttcccatttcacaccgcaaaataaacccactctcgacacgttccgctcatactatgattcccacggtaaacatccatactctaaaacaaagcacctgctgtcttccaaacttcaaataggaagtcagtcctgatgcttgtgcagggatcaacatcgtacatgctatcttatataatctttattatagcatctccatcgtgaattgtgaacaaattttatgatatatcttcactaaaattattatattttactattatgaaatacaaaaagcgacctattccccatcaatgtgtacacctttttctgctgaaactccttattctcatttccttccttgcaacttgtttttttgtgcactataatagaaaaaacacaatttataaattcacagaaaggttaggaattcctatgtatcagatagatttcaagaaaccaattcatattcattttatggggatcggaggcatcagcatgagcggtctggccgaaattctcctccaggaaggattcactgtttccggctccgatatccgttcttccgacatgacagagaaactgagctccatgggtgctaagatcttaatgggacaagtcgcagaaaatatcaccgatgatattgatctggtagtttacacggcggctatccatccggagaatgaagaatacaaagccgctgtctcaaaaggcattccgctgatgaaacgcgcaaccttacttggtcagatgatgcataattacaagaatgccgttgcagtatcaggaactcacggcaagactaccacgacttctatgctctcccacatcctgctggcaggagatacggacccaaccatcacagtcggaggaatcctggatatcattgacggcaatatccgagtgggtcattccaatgtttttgtcaccgaagcctgcgaatatacaaacagttttcttgaattttttccgaagatcagcgtaatcttaaatatagaagaagaccatatggacttcttccatgatattgacgagatcagggaatcttttaagaaatttgcccatagactgccggaggacggtctccttgtgctgaatggagagatcgatgacatttcctatatcgtagacggtctaaaagctgggtatgtgacttatggtattgacaatgacaattttacctatactgctaaaaatatttcttatgattcaatgggacacggccactttgacttgtataaagaaggctcttttgtggattctttgtcattaaacgtgaatggactgcataatattaataatgcgctttcagctgtggctgtagctgatttcctggatcttcctatggaaactgtaaaagcagggctcctgaccttctccggtgccaagcggcgatttgagtataaggggacctgtcagggatttaccgtgattgatgattatgcacaccatcccaccgagatcagtgcaacactgaatgcatgcagaaattatccccatgaagatctgtggtgcgtcttccagcctcatacctatacaagaactaatgcatttctggatgactttgcccaggcactaagcaagtgtgaccatgtcatcatcaccgatatttatgcagccagggaaaaagacactggactggtccacgcaaaggatctggcggaaaaaatcaaggattttggtacagacgttcgatatattaaggattttcaagagatagaaaaatttattttaaaaaattgcaaaaaaaatgatttgttgataactatgggggccggaaatgttgattctatcggcaatgagttggtaaagaaatagttatccacgttatccacagggttatacacaattgtgtataacttttcctgtggatttttctttattttttccacagacagattttttagataaggcttgtctttctgcggatcctatttagttatccacgttatccacagtttccacaattattctgtggattactctgtgaaaagtgcggctatttacaattctttcggtctgcgttatagttcttttagattaaaaaagagacgtatgaacttgatgttagggagatggatttatgagcagtattaatgtaacgacaacatatccaaccggcggtactttgctgccaaatgcctttgtggattactatatgatcaaagccaacggtgagtacgtgaaggtatatatttaccttcttcgtatggtttccaatgggcagaaattcaatataccttgtctggcggatcttcttgagcttacagaacgagatatctgccgtgcccttaagtactggaagaaagaaaacctgctggatctggtcatggatggaggagagatccgttccattaaactgctccccgtttccacggccctgacgattgacgcagacgatctcaaggagccggaaaaagaagagcctgcaccagcaccggaattaaagaaggaagtcccagtggcggctccttccgtgaaagcgattcctgccctgagaaccttaacaccttctcagctggcacagaagaacaaagatgataagttttcttatctgatctacatcgcagaaatgtacataggacggccgctcaccgccaacgatttaaatactctctcttatttttacgatgatctggcaatgtcaccggaattgattgagcatctggtggactactgcgtatccaacggaaagaaaaatttccgctacatgcagtccgtagccattgcctggtatcaggagggtattcatactgcagaagaggccaagctccactgccagaattaccagaaagaatattaccagatcatgcacgcttttggtctgaataatcaaccggctccggctcagatcgagtatatgaaacgctggctcaagaccgatggctttgacttgagcattgtcattgaggcctgcaaccgcacgatacgctccatcggacagcccaagttccagtatacagacagtatcctgaagaaatggaaggacaaccatgtggtatccctggatgatgtgaagaagctggaaagccgcccgggaactgttgctaaaccgggaacacctcagataaacaaccagttccataactttgaggaacgtgattatgattttgatgagttggagaaacagctgtttgaaaaacagatacaccctgtaaaggaggactgagatgtccctgaccaatgcacaatatcaggaaattatgcggatgtatgagacacgacgtctcagcaactataacctttccagagagcgcaggcgtgaggtttacgctcagattcctgagatgagggatctggaccgggagatgacccataattctatactcctcggaaagcagctggtcacagctaaagatcagcagtccacagacctatgccgacaaaaaaaccagaagctggctgaccaaaagcgccagcttcttttggaccgtggattttcaagagactatctggatcccgtttatacctgccctgactgtaaggacacaggttatatcggcacaaaaaagtgccactgtttccgtcaggctgtcacccgcctgatttattctgattccaacatggagcatgtccttgcgaaagagaattttactcattttaacgatcagtactattcggacctgcctctggatggcggacgcccttccccgagacagaatattcatgcggtggtaaaacagtgccatgagtttatccagcgtttcccgtctgcggagaacctgcttcttaccggctccacaggcactggtaagacatttttaagccattgcatagcaaaagagatcatggaccagggctttacctgtgtttacgtgacagccttccagctgtttgatatactgacctcccaggcctatcagaagcgcaaggatgagcttcccatgtcttatcagcttatttttcactgcgacctgctggtcattgatgatcttggaacagagcttaacaatgcctttatcacctcgcagctgttccattgcctgaatgaacggcacttaaaagagaaatccactctgatttcaacaaatctgtccatgaggagcctaaaagaccgctatacagagcggattgtctccaggatcattgaaaactatacaatatgccgattatacggcgaagatatccgtttaaagaaatctttttcccgcaagccttgacggaattacaccaggagtgatataaaaagagtgaacaaaccacaaaggagattaataatgagacgatctgaccgaaactttaaaacccttcctgacggcaatcttggcatcatcgctatggaaagctgtaaaagccttggaaatctgatagacaagtatattaccggatggcgcggagatgaagctccccgctataaggacatgcctggctatgatgaatattacaaggaaagctatcttctggacgcaggctgccctcgcttcggctccggagaagcaaaaggcatcatccgtgaatctgtccgcggaactgacctgtacatcctcgttgacgtgctgaattatagcattaagtattccctgtgcggccaccagaattctatgtctccggatgaccattttcaggatttaaagagactgatcgcagccagcggaagcaaagccaagagaatcagtgtcatcatgcctttcttatatgaaagcaggcagcacaagagaagcacaagagaatcccttgactgtgcgatgatgcttcaggaactgatccacttaggcgtacagaacatcatcacatttgacgctcatgatccccgtgtgcagaatgccatcccgaacagcggatttgatacagttcagcccacttaccagtttgtgaaatccctagtagagcagtgtgatgatatcaagttcgacagcgatcatctgatggtaatcagccctgacgaaggcgctatgcagcgttccatctatatggccaatgtacttggtgttgacgttggtatgttctataaacgccgtgactattctacgatcgtagacggacgtaatccgatcgtagcccatgaatttttaggtgactccttagacggaaaagatgtattgattttagatgatatgatttcttccggtgagagcatgatcgacgtggcgaaagaattgaaatccagaaatgcgagacgtgtcttctgtctgtcaactttcggactcttcaccaacggactggatgtctttgataaggcggtagaagaaggcctcattgaaaaggtcatcactacaaaccttacttatcagacaccggaactgctggaacgtgactggtacgtgtcctcagacgtgagtaaatatgttgccctgctgattgataccctgaatcataacgggtccatcagcgaacttctggaccctacagaacggatcaaagaatatttggaaaagaatctttaaaacgccttataataaaaacttgaccatcggacttatcaaatagtccgatggccttttttttatttcagcggagaatcccgaagaagggatttcttcttgcacaaaaaatcaggtatcattcgatacctgattttatagataagcttacatctctttattcatcattgccactgttccggccatcttccccgccattttgctgctgtgtggccgccgttgtggcctgagtcgttgcctgggttgtagcttgggttgtggcctgcgttgtagcttgggtcgttgcctgtgtagtgccctttgtacttctattttctgtcgtaccctgggttgtctggcttgtggtcggcatatttgtgccaccgccgccctctgaagattccagctttttgcctcccgagaactccttatgaagtgcattcataaagctgctccagattgttttagggtaagttgaaccggtcaagttaggaattaccttactgtcatcccttcctacccagactgctgttgtgtaatatggtgtataaccgcagaaccatccatctttattgtctgttgtagtaccggtttttcctgctgtatctacattcggcacctttgctccgcgtcctgtaccgttggtgactacgctcttaagaacactactcatcatagatgctgtattggctgaataaaccgttcgcttcttggatggattagagactacggtctcaccatctgaatcctcgatcttcacgatgcaagtcggatccctgaacactccctggttggccagtgctgcatatccgctggccatctcttccgctgtagttccataggtaaaacctccgagacaggttgtgtaatacttataatcattttcactgagactcttaaagttcatcttctctaaataccggagagccgccttcggaccgatctcctcataaagtctcatagttgcaacgttgctggacttctccagagcgcgccttaaggtaatgcttccagagtagacaccgccggagttccggactctgtgtttgtcctttgtactcatcggattgtcatttaagatcgatcccggtccgtagcctctctccatagcaggtgcatagacgaggattggtttgatcgcacttcccggctgtcttggactctgataagcacggttcagccccagtccaacatttttctgataccgtccacccacaatggctgctaccttgcctgtctcattatcaatacagacaccggagccctgaaccttataaaccttgttcttatccttttccgtatagccgttcaatgcattgtcaatgctgttttgcaactccttctgggcatccaggtcaatggatgtatggatctgatatcccgcactgtacaaggttctcttacattcagcgtaagccttgttatatttctcatcgtaatcctgtttatcctcatcggaatcaaacacatagcggaactcgaatccctgcttttccatcagtgctttggtagcgctgtggatgacataagtttcaatataatttcgtttctgttctgtttttttctttttcagagtgatcgtttcttttaatgcttcatctctctgggacttcgtgatcagcttctgcttatacatatctttcaaaatcttgtcacgcctggtcatcgtcttgtccttatggtgataaggctcatacatattcggcgcatttgggacagcacacaaaaatgctgcttctgacatagtcaggtctttggcatccttgtcaaagtatcctttgctggcagcctggattccgtaatagccgttagcaaagtaaacattgttcagataaaattccatgatctggtccttggaatactgcttttccaaatcccaggctacaaacatctctttgaccttacgctgccaggagacctctctggtcagaaagacacctcttgccagttgctgggtaatggtacttccgccctgggtcaccgatcccttattcgtgacaaaagacaccgcagctctggcgatccctctgaaatccactccattatgtttgtaaaagttattgtcctccacggaaatcatcgccgccaccgcatagacaggtaaatccttatacttcagatagtagacatccttttcccccttcagcttggtgatcaccttgccgttggtgtcatagacaacacttgtctgggttgccttaaatgtctgttctgaagcgttggccaccagatcttttgcttctgatctcagtttcatgactttgattcctacggtgaaccatccgaccacgaccagaaaaagaaaaacaatagagatcttcaacaggatctttcttttctttttcttcttcttgggctttttctctttggaaatgactttttttgtctcttttgtttcttcagccatattcttcacctttcattattctctggattcctcaagggagatccagtggattttctgattcctccggtccaactgatgaaacagttcctttttgcatgtaaacaaaatcagctgccttccggaatgccggctcagatactcaagagccctgcgtgtccgttcatcatcaaagttgccgaaaatatcgtccatcagaaccggaaccggctcctttggatatagaatctctcccgcggcgagcctcacagccaggcaaatctgctctacggttcccgcgcttaaatatttcagatcaataaacctgtttttatattttaccataaaagacagtgattcatcaatttttactttttcgtacactcctcccgtaagataactgacgatttcactgaccttttcattaaattgttctccgagatgttcccggaactcctttgcggcatccatcacagcctgaatggccgcatctgcctgatttatattatattctgtccgttccgcctgttctttaagaatttggtactctcttcttaattcttccttaaaatcagcctgctccgtcttctcccgctgtccagactgaagagacaagaaactcaggactaaaaatacagcgcagcctgcaaaaaatccaggatggacaaatcctgcagccgcaaacaccactgctgccaaaagaaataaatatacagacctgggctgtctgtctttcttttccggttccggagcttttagatagcgttctcttttttcagatagaagaaccgcttcctccctgtttttgcgccggagtacactcttttcttcttttaaagctttcagggccaggtcaatcttaacatccgctgtattgctgcctgtcagattggatgtatagttcataagttccattgatagatttcctgacggaggaatgtccccttcctgaatgcagaaggtgtccgtataagcaccaaggcttaaggagagcaaactggaaagagggatctcttctcctgtttctttaccatacacttcacaggacttctcacctgtgcggaaacttctctcgagcagataagcatgtccatctgattcgatctccatgatgcccccgtaatttcctccataaaccggcatataaatagtatatgcatcagatctcgccgcaatgcctctggatttctctaatccaaacagcatatgcatgagaaaccgtttgaccgttgtctttccactctcattggggccgtagacaatgttcagtcccggctcaaaggaaatctctttcccacagaactttccaaacccatcaatgtggatattcctgatagaaaaactccttttttcttcctgctcctgagtccggcgccgctgtttcagccctctggatgcctgctcaaatgccgtctgcgcatatctctctgcctctggcatgccttccagcctgcgtaaaaccgcaccgataatattgtctttattatcctccagcaatgattcagtatcagtttcgttctgcgtctggtcgacaatatctacaatgtgatattttgcgcaaagcagatcaaaatcgggctggatgccttctgctttttctccccggagcaccagggtaaacatctggttttctccctgcattttaatttcttcttccgccgctgagagtatctcatcttcatccatctgggccgttaaatccacctgtacatccacatagcttttttgatttaccggaagaaaatggaccacctttttttcctcagtgatctcacctaaaaagactcctctccgtcctgtctctgtacggtttaagggttccagacttcctccgtaggcgatcagatcttctgcgaccatctccggtttgtggatatgccccaaggcagcataatcaaatcccgaccatttcagactgtgaaaatcaatggggatatgggtactgtccccgccgtgcccgagaaggatgtgaatcccatattctgtacccggcttcatgccgtcataaagcggctctgtgatctccctgctgtgatagctaaacccatagatataagtgttctgtttttcctcatacaccctttccggatcactgcccaaaaataaatgtacgtcagcagaaaaacggtacttgaggtatgccgaatttttgtctataaaatcgtggtttcccgcaatcataaacaccttggtgcagaccagctgggaaagaaacgaatctaaatatttaagatcccgcaatgccggtctcttatgaaaaatatcgccgcagagaaataaaaaatctgcctgttcttcatttgccagggcaatgacctggcttaaactctgttcaatatctttcttccgttctgtctcccatcccctctctgtttccggacaggctccgaaatggaggtctccaacgtgtataaacttcatgtctcaccttctttatttggcatagctgtaaaatacacttcctgcctttttaaattccttttccatagaggaccggtctgcctggacagattcctcctttaacgggtcgtaatatctgatctttgtattgttatagctgatcaccaaaatatatgtgccgttggcccgtttcgcgatgaccgggcgtcccttgctgatgcaatagagcacatcttcaaacttacatcctgtataatccgccgccatcttatccatagattcatagagcatgccgtaaacgtcctttttgctgcgtttcagctgtccgtaagtgacatcttttccttctgaatctgtaatcatcttgacacaggcaattccggtctcgtctttggattccgctttcacgattggtatattagccaccttgccgtagcttttcatgacacccttttcccaaaggtaaagctggcttgaattaaccaccactcccgcgttcttttctgcttccttcacagcttgcgccatatctgtataagttcctttgagtgaacctcccgcataaacatatgcattcttatatctctggtcattttctgcaaaggttatgctgcattctttttccgtctggctcattgccgctgacagatacttgggtaccgtctgcacatagacataatcaggaaaagagagatatacctgattcagacggtcgcttgtatatccatattcaagggatgctttatcctcggttttatctttgtagcggatatagtcttcttttatagtcttgtacccggaccctgaacgtttggctgtgcttaggactacgacagtaccgtctactctggcatccgttacataaattccgctcttttcaaactttgcaagttcctgattcttttcattcacaatggatacttttttcatcgggaactgaagggaaccatctttctttttctttacatccccagcatctgcgacaccgtagacaagatcttcttttacaaaacctataggcttaatcttctcccccttttcacagctgatcttgtgttccttattattttccagatctatgatccgtatggtcatttcattctccgtaatcgcaagcattcccgtaccggaaaccgctaccattccattactgatatttttggcgatggtctttgactctctgttatctaagtctacctgataataagctccatccaactcaaaatagaactttccgctgtcgcttaagtatgcacctttttcaatctcatccttaagattttcatattggatttttacgggtataaatgctttttcatctaccttgccgctgtccgcatcatactcataaacaccaataccgttctttccttcatgttctccacggttcatatatccatagacaataaatttgatattcccgcttttatccatctccatcacatgaatgccatgctgaggataattgtttctggactctctgtagtcctctcctacgaatgagaacactctagtcattgaggcattcttgtaatcgtaataccaaagctcattctcctggacaaaggctgccttgcgcccgctgtttctactgaccaactcttcaggattcatctgagtgatgcccatcaagatcctgttgttagagcggtccagtgcgtcatatcgaaaataagcattttgggttcgctcatagttgagtagatacatcctgtctttggagtaccgaacacgaaaatactcttttacctgataatactgcttgattcctttgctgttttccgcagatagaataaatctgtactcaagcgacgttacattggagctggcctctttaatcaccggcgcatacatgcgttctacttttggtttcagagatgcatagcagacagcctcctgattggaagatatatctacagaagaaaggtcatttgccgttgtcccttcctttgcctccaaatatttttttacatactctgaatttccatctgacagtgtggcatcgtggaattcttttgcaaacctcaaacactctgtaaaatgcagatctgtcccatagatgattcttgtatagtaggtaatgctatctccatcattctccagtgtcagagccagcagatatgtctttccggaatccagacggcttttgagtttgatatctgcctctgttcctttttttgtctgcttaaaagaaaccactcctttttccagagtggaacggttattttctttatatatcttgtaattcagcgcttcaatggagctatttccatttttcataattacctggaactgatctcccttgaggggcgtgatagagtctctcatcaaagacgcatccacagtctctctgaatccgtgcaattcattgatgtcctctcctccggtgtttactgtcaaaaccggcagggaggcctggctagtctcgctgactccctgattattttttcctatcaatacataattccatatcccaagagcaagaataaaaatcagcccgaaggctgctgctggtatggctttttcccgcttcataagctcctcctaacattctctctgtcctatctgtatattttatccgtttttctggggaaacacaacaaatttaaggaaagtttaagagcggcgcagagggatctcttatatacgctgctttttgttatgttcattagtatattttgggtttttaatttttaaataaaaatggtaagataatgatgatgaatataatttcagcaaacacaagaaggagggcggaaagcatatgcttgatcctatcgttattgctgcatagcaaaggctaatgcagccagtctgaatggcctttgctgttcctatgtactatttttcatttaggagagcaatatgagctataagaaggcagaacaaatactacccgcaggtcttttgaaagaagtccagaaatatgcggaaggtgaatatatctacatacctaaaaatcccagcagcaaatgtgcctggggcgccgctagcggaacacggcagtatttaaaaagacggaacagagaaatatatagggaataccttgcaggacagagaccggatgctctgtctgaagaatattttctgtctctgaaaagtattcagagaattatccgtcaggaaaaacgaaatcaatgacttgaaagacatgagcctatacggaatgataccgtataggctcatgttctttttagaaaagaatatgaggtttcggatacagattccccatgctacaattttttcatccacaaagagtcaggaggtgtctgtatgaaaaaattatttgaaaatccgcctttttctttttcctattctaactagaacaggagtgagtatgtatggagaataaaacccgcacgataaaggtctgggaggtagaacttttatctccgcctcccgcagtgcggcattgtaaaaaatgcgggaaaaaaactgaatttcttagttccgggctgttcagaataaatgcccagagaaaatatctggacatatggctgatctataagtgttcaaactgccagaccacatggaatctgccaatcttttcacggatcagccctaaatccttagatccagaacttttagataaatttcataacaatgacataacacttgccaaacaatatgccttggattttgaccttctgcgccggaacggggctgctatcggttcatacgactacagggtaaccggagacagtttctttaacggccctgttgaactgcatataagaagcatcggttctgctcatctcaaagtatcagcggtcttacggaaaaaactgaatctgtccagaaaagaactggaagaaaagatttctgacggcagaattcagagtaaaacaggacaagatatcatgaggtgcagaatgacggatgagattgtattaattgttttatagttgtttatcatagattattacattatttgacatctgagtatgtttattgtaaaattataggtgatattgaaaaaactttccatatatgataagctgaaggagacaacagaagatgaagaaagcaaatacgatctcattaaaaaatgactatgcctttactcaaatcatgaaacagcctaaagtactccgtggattcttaagcagcattctggatattcccccggagacaatcggaaagatccatgtaaaagaccgctatctttctaaggattttctggaggggaagctatccatacttgatctatacaccatagtcgaggacactggtaagatcaatattgagatgcagctgcttccctacacatactgggacagacgggctttgtcttatttggcaaaggtctatacacaggatttaaagtccggagatacttatgggagctgtgttaaaaccattcacatcagtatcctgggctttaatcagttgaatgacaccgattatttctattcctcctttcacatgagggaggataacagacacagcctatacagcgaccaatgggagattcatgtgatagaattaagaaaactgcgcacttcccaggtaaaaaaggaacataaaaagctgtatcaatgggcatgttttatttgtgcagagggagaggaggaacgtgccatgatagaaaaagacccctatatcgaggaagcgatcaaagaattagaattactggaacgcgatcctgagcgcatggatgaatatctattccgtcaaaaaaacctgtctgattatgttacccagatggaatccagcagagaagaaggactgaaagcaggtttacaactgaaactaatcggacaagttcaaaagaaactccaaaaaggcctgtccgaaaaggagatcgctgaagctttggaagaaccccaggagacgatcgccggtatctgccgtctgatcaaacttcatccttcagccccaaaagaagaacttcttaagatattaaaaaaaagttcctaaaagagatgccgcaaaccaatcaacgataagaattggtttgcggcatctctgtttttttagctggaacgttcccgcggaataacctcttaatctgagaacattcctctttttctcctgtaacgacaacggcggtgatagagttccccgcccagcaatgtgcagaccatctgatagagaagacggtcctttttaatacagtcttctttgtccttttccttgatcttgtcatagatatggtcggcaagaacaagcattccggtccggtccatatactggtcgaacatcatgcttccattatactctagttggtcacatgcatcctcaatatgctcaagtacttctcttgcaaccggtccgtacatcctcgtaatgtactggtaatcatcctcatcctgctcatccatcattaccataggttttctggacagagtatccatatcgaatgtaggcagatcacctaagccttcacgatccatcatttacgctgctccttttctctactgataatatactatgagaaagaaaaggaaaaaggtacatttttttaaagttcttcccgcatatcatcctgcttcaggctgtgaatctcctcattgatggccagcatcttgctgtccaggaagctgatcatttctgcacactcacgtagttctgttcggatatactcaggagcatgtccgtcatatttataataaatcttatgctccaaagatgcccagaagtccatcgccactgtacgaatctgaatctccactctcgtgggaacgactgtatcggagaggaaaatcgggacctttacaatcatatggtagctcctgtacccgcttggttttgggtttaccatataatccttggtcctcactacctcaatatcatcctgattggagatcatgtctacgatcctataaatatccggtgtaaaggaacagataacccggatgcctgccacatcgtctatatatctctcaatattttctaccgtgatatcctgtccctttttcataagcttgcggacaatactctcctcacttttcatacgggattcaatatgttcaatgggattatatttgtgtacaaacttaaattcatcgttcaggatctcaagctttgtcccgatctctttcagcgctgactgatacaataactgcattttccggtattctagaaaaatatcctttacatcaggtaattcaatctttgccatagaattcacacctctttctgtattattgatcgctggcacactgatgatcaccagctctaaagaatattttatcacgtcatagacaagctttcaaacttacaagtgtgaaatttttgtaaccgttttagcacatcagcatcccgcctgtggcatcaaatgtagtgcctgtgaaataagatgcccgctctgatacaagaaatgcagctgcgtaagctacttctttcgggtctgcaatcctgcctatgggtatttttttattctgttcctcttcgtcctttttgtctttaaaagatttcatcaacatctctgtcctcatataacccggtgcaatggcatttaccgtgatcccatgctccgcagtctccatagcaagagatttggtgaggccgataagcccggccttagaggaggcataatgggagtgattccttttggatcccataattcctgccttagataccacgttcagaatgctgcccttttttccgttctccatgagatggctgatcagcttcctggataaaaggaacgggacggtcagattcatctcaagtattcttcggaaatcttcttctggcatgtccgctgccatagccgtagtccatgctgctgcattatttacaaggatatctgcccctccaaatacttcacaagcagctttaaaaagcccttccctgtctgcttcctccattatatccccctggaatccgtagatgctccccggacactcctgattcatcctgctgatcatagattctgcttcgtcctttccagaccggtaattcaagaccacattggcgccctcctctgccagaacctggcagagggctctgccgaagccttttccgcctccggtgacaatggccgtttttcccactaaccctaactccatgtgtacctcccttttaaccgccgatatctccggaacgccactatggcgtcccggagatataagatccaaacttattcagttacttgaaacttcttccatggtatatcaagcattgatccatgctgtagaatatcgtcgatatggaggatcagaggataatcctctttacggactttaccgttttcggacagtatccttatggcctttgctgctctttttgcaatcactacggattccagagttacacctttcagttcttccatagctttgtcatatggcatgcccgctccaagtctttttccaatctcctttgagcgcccgcccatcacggtcacatacagatcaccgatcccgtgaatggagttttcgacgttccctcccatgtactggacatatttcatgatttcataagaactctgtccaaagagtgcagactgggtattacacatgtacttctgctgtttttcttccagaccaatcccaaggctgacaccaagtgcatatgcattttttaaagctactgcgatctccaggccggctacatcctgtgttaagtcaatgtgataataatccctctctaaaagtttcttaaagaacttaagaacttccatattccttccgcagaatgcaactcttgtatcgtcatggtccgccaattcataacacctgcacggtccaccgattgcacagaactcgtggctctttccattctccacctttgattcaaacagttcagggaaggtctggatcgttccgtcatcataaacctcaactccctttgtcactgcaatcaccggaatcttatcaggaatcttcgcaagggcattttcaataaaccaatccaccccaaaactactgactcccaggatcaccgcatcacagccatccagtgccgcatccagctcttcgatctgatatgcttttaccccctccggcagcgttctttttaatgtgggatgatagcggttatcctttaccgattcaataatctccctgtccagcggcgtacctgtaagacgcatctcatttccattttccatagcaggaaaagaaaggctggaagccatcacccctgctccaatcaccgtaattgtactcataaaggccctccatttcaaacacaacaaatacaaacataattataccttatcgcgcaaagcgcgccaagcccgaagggcataaaatgcgggatgcccttttgggtataccttatcgcgcgaagcgcgccaagcccgtttctcccctaagggataattgcgtatttgatgccttcctgcctgccgatgctttccagggcatcgatggctttttctaatggatagtgtcctgtgataaacaggcttccgtcgatttgtccgttggaaagcagcttcagagccagctgtacatgatatggtgtgtgatgatatacggctttcaatgtgatttcttcatagtggaatttctggcagtctagggtaatgcttgtgcctgccttagttcctccgaatgcaagaaccgttcctcccggtctgaccatgttgacggcattttcccagacctcagggaatccagtagcttccacgactacatcagctccctgcccattgcagagatctctcacttcttttatatgttcttctccagaagcattgacggtttcccatacaccaaatttcttagactgctcaagacggtaatctgagagatctacggcaatgactctgcagcctttcaggcttaaaagcttcataaacataagtccgatcggacctgccccgataacggcaaccgtatctccaactttagctggtatcctgtcgcttccgtgaaccgcgcatgccagaggctccagcaatgccgcctgttcaaacggcagatgatctggtacacgataaaagttatatttcaggatgtgtgccggcaccgccacatactcagagtaagcgccgttcagatactgcagattttcacaaaggctgtatctcttatttttacaatgctcacactcaaaacatggggctgtattagctcctacgattcggtctcctaccttaaattttgtaacgtcttttcctgcctccacgaccactccagaaaattcatgcccgaatgtggaaggaacggaagtgatgatcgtcggatgtcccctcctgtatgttttcaggtctgtgccgcaggtcaatgccgcttttacctgtactaacacttcatcatctttaatctgaggaatgtctgtctcctcaaaccttacatctcctggtgcataaaacatctgtgctttcattttcccctgcatgttaccatcctcctaaatcttatttctgtccatagttttgatctgtatcttctttcaagaatttacacatctggtcttccagcgtgttgacattccccatctggtaagccagatatgccaccttggcactctcctccagaacaattgcgtcattgtatgccttatcaatcgtctcatcgatgcagattgccccgtgatttcccatcaggactgctttgtcatctccgatcgcctctgaggtcacttctgccagttcatcgcttccaggcggtacaaaagcggcacagcggatatttccgccaaccagtcctgctgcctctgaggtaatacacggcattcctccgtccacacaggcccacgctgtacaataggttgagtgggtatggaccactccgaacacatccggccgtctccggtacatggcggtgtgaagcggcatttcaatggatggacggcgttctccgtctataatctggttatctatgctcacaactacaatgtcggaaggatgcagggtctcatagggcatcccgctgggagtaatgcacacataccctgtctctgggtccctcaggctgaagtttccgaaagtaagagggatcagcttctccttctgtatcttaagtgcaatctcgataaccttggttctttctttttctaataacatattgcctccttatgtgaaaagattaaaacagcatttggaaaaattctgcaatcttataaataatgtacggtaccaaatgtgctcctgtatccagggaagaaattgcttttgcccccgccgggaatgtaaagtctgttgactgtgcgatcagtgtggcagttcctgccaagttggtagcgatatataagattgccaccatcatcagcgttcctgtgatcagtgaacggaacaggtttcctttggaagccactacaggccagatcataaagaacggaagtgtcgcaagatctaccagcggaagcactctgtttccaggaagaattactgccaacagcagtgtaacagggatcatgatcagggcagctgaaataaccataggagatcctgttgcaatcgctgcgtccataccgatgttgacttcttttcccgggaacttcttcgccaagaatttttttgcgtcttcacttaaaggcatcaggccttccataagaatccgcaccatcctcggcaggataaacataactgcagccatattgactccgagggtgataatcttattcggctcatatcctgccaaggctccaaggcctgctccaaggatcagtcctaagaccatcggttccccgataattccgaatctcttctgaatcgtttctccatcgaaatgaattttattaaagccaggtattttatcataaaccttatccagtaaaatacatatcggcgcccagcttacggtctctgtatgaggcagagaaactcccggaagcccaaaataatcctgtactcttggtgcagagtagtctgcaagtttcatgataatgataaatgtgataccagacgcgatcactcctgccaccatgcttccagtcaaaaactgtactaatgctccagtcagaatgaaatgccaatagttccagatatcaatattcagtgtctttgtagtattggttgccagcataatgatatttaagacaaaacagacaaggaacacaaacggtacgatctgtgtaccgaaggcaatggatgcgctgaccggccatccaacgtcaatcactgacaggttcattccaaacctttgtgtcatcgcctgcgcggctgggcttacgaaatcccccatcagtccgatgacaagattgattcctataaatccgattccaatagtcataccggatctgaatgccttggagaatttctgtcccaagatcaggccgagaatggttatgatcaatggcatgactacagatgaacctaaatccaagatgtattgtaaaacgctcatagttttcctccctttctaactcaattactctaatgatttcagatattcagcgatttcatcagctttttcttctgccccgaaccccgtgataaattctagtgtacggtatgtctggtatcctttcagttcattcaccggtatttctgcagtatgaatgatcacatcgggattaaatatttcagctctccccactacttccagggccttacattctgagatgtccactgatgggattccccgttctgctaaaagccgtttgcacgtctcagatgccaccgttgatgttgcgatccctgttccgcaggctgataagattctgtaagtcctcataatgactcctccttattttgaataatttgaatgatctctttcggattcttggcttccacaagctttctcagaacctctgcatcctgaattaaaagaattgctttctgaagcacttccaaatgctgttttcccgcaattgccaacatcatgacaaacttcaccgggaccttcacattttctttcgggtttgttcccatatggaaaaatgacaccggctctttcagtacagcaatagcaattccggttgtctctacataacacggatccgtgtgtgggatcgccactccgatatccccggccatgactccagtgggataaaccttttccctctcgtttaatgcctccacataactttctttgcaatatccttcctgaactaatacacctcctaactgttcaaatacttcctgttcactttctgccttcatatctgtctttactaatgtgtcttttaagttttcccagatcatgctgtcctccgatccaaaaacgtgtttttcaaaactgttatgttaagttcattatagatacccatgaacgtcctataaaggccaagagatgtctcaggagagcgcacaaaattgtactaacatatatacaatcagcatgcatatccaaagtactgttcaaatataatgatctaaaacgaaaaagacagaacctttctggtatgataaggttctgtcttcttctctttatgatagactcatcagcaatattggtgttctaatcttcgaatcgtgttaatgagttcctccggtgtctcctgtgcttccatctgacgttttgcttcctcctgcccaaacatcctgaccaagttgtatatggcgcaattaatgctgttggaatttaatatgctcagaccgataatgtaagaaaccggatcattttcactgttaccgaaaactacaggggttttcagcctgacaaggctggctgcctccctgatggcccccttttcctgctcagcgtgtggtatggcaataccgggatagatcaccacataggatccatttacgcggatattttctaccattgcatcgatatactcataagacacagcaccggaatcatagagcagctgtccggcagctctgactccttcttcccagtctctggcttccctgttgatctcgattcggtccgctgacagcatctcagctagaaagttacgctctgctttggtctctgaaccgatattgtttccaatttcatctctgcggctttcctcagggatatcagaccagttttcacggagttttgtggccttccgcctgatcctgtataaatcatcctgttccagcataggggtaaccataagcagattgggcagctctccttcttgaaatggaacggtagtgatcaccagctgatctttaatctgttccatatccttcagttcatgggctgatctgacatctgtcacatggattacatcttccaactgctttaatttcgccagcataagctgcacagtgcctctgcccatggcgcagacgagcactgccgggactctctgctccttcatcctctccaatttatctctctccagcattgatgcaatgtacatgaccaaaaaagaaacttcatctctaggcaccttcacttccagatagtcttccagcggtctcagacactcctccaccactgaaaatacctccggctaacccttctcgatttctgaacggaaaggattctccagcacttccccggaagccatacggtagatggcagacttcatgtggtcgaccaaaagggcatagagggcgaaatccaggtaaaagtttatctgaaaacggctggtgatccggtagatgacttctcctatcaacactgggatcaccagctggtccacattgttggtaccgcttttcaaatagctttttcttctcagacaaaatacaaaattctccacttccgcctctggcacttgaaatgaaaactctctgcccagccggtccaataccgctctgctcaacggatattttgagctctgcaccgtactgccccattctttctgtctttcatgttcaagagtctttccctttttgatcctgttcaccaatatgacaagttcatacactgccacagaaaaggaaaagtcggacagaaaacaatcatgtcttgtctcttcttcctttaggatcctctgaatctgttcgtagcatccctgatactggatctctttaagcaaaagatgtccaaaggcatgatatgcccccatcatgccatatttctcttcatccagattcagctctaaaagcttcagcatgccggaacggatatccccctcagaggcatggaccacataacctttctgaacctgcgagatcaggttcatattattcttctgaaaccagtcttttagatcattcagatcactgataatcgtatttctgctggtgctcacatactccgagatccatgctgccgtcacatactcatctgcgtttaaaagtagcatagccaggatggtctttctttcatttttcgataaatgatatgtatagaaattattctcttttataaattgacggaactgttccctgagatcttcccctcggtcctccaggcgcagaaccccttcactgttaatgtcgatcaaagccaatccgtttgctctaagctcgtcattcagttcctttatttttctgcgtataatacgttcggatacctggtattgcttggacgcctctttaagttccagttccccttcctttaaaagctgatttaaaatctgattgcttcttttgtccaaatgacttccctctcttcaactttgaatgtgattcgccgctattttatcatacatatatattataaaaaatttcgatctatgcatatagcacaaatcctggcaaaaccccaggagggcaattgtactatgccagaaagaaccataaggcctgcaagattttattcagattcaaagaacgttccttggcgcatcatgaccggaggacttatttatttcataggacgctctttcctatgaaatgaaataagaaagaatcccacttgcgggattctccgcctgcggcgggtcgctttagcgacatgattccttaccgccgcagtgcgatcctcgcggagctttttgtatttcataggacgcactttcctatgaaataaaaaaacaggcatcgtctgcctgtctgtttgttctggatatataattattaaattccgtgcggcctgtgtcgaactctcttcacagacgttacctctacagttaactcagctcaggcacccttacggcacatgagaggttctacttagtgctgcttcgttcccgacctgacacggttcatagattctcattgcgcaagacccaaacatcaacgccacttataaagggcagctccacaaagaaaagccctaaacaggccatcacctctgctatagcggattgcagatacagggcaccgctgcctccccggctgcacggaagctttttgacgtaaaaagttttattacatgtgcaaatttgattatactaaataatgtttacattcgtcaacttttattttctattttattttttctctgagagactatactgaaaggcacaccgcatttcatatccttcggatggacgcgcttcgcgcgataaggtataattgtaaagatgaaagaaggtgaatccatggtttactccatacagaacaacaccgcagagctgcttacgactgaacaatatttaacaaaatatccgttcctctgcccctatcagccgtttgttgataccatcaagaaccacgggatcaacagctgcaaggcagacatcttttctgattttatctgcggtaccctgttgatccccgataaaagaaatccagcggaaaaggaattttgcctttcttattatctttcaaaagatcttctggtgctaatcgaggataaaaaacatataaataacttagagacaatcatagagcagcgaaaaataatgaatgtctcgtcccttccgcagtttttatttttgttagcggaatcgctcatcaaggatgatatggtaagacttcaggactatgagacacatctggctgagatagaggatgtcatactgtccggtaaggacttaaatatgaaccattcactgatcgatgtccgaagaaagcttctgcgcatcaacgcctattaccagcagcttagtgactttggaagtgaattagaagaaaatgcatcggatttcttttcaccagctgatatccagcacttttccgtgctcagcaaccgtgcagagcggcttcttaactatacacagttcctacgggaatatgccctgcagatccgtgaaatgtaccagtcccaggttgatatcaaacagaatgagaccatgaagatcctgactgtcgttaccacgatctttttccctctctccctgatcacaggttggtatggcatgaactttagaaacatgccggaattgcgttttccgtacagttattttatcctcatcggaatctgtctgatcatggttatcgcagagatctggttctacaaaaagaaaaaatggatctgagaatgcttaactcttttttctcaactgcctgaaaaagtcactcatcatctgactgcactcttcccccaggattccggattctatttcggcctggtggttaaattcctccctctggagaatgttcaggatagagccagcacatccggctttgggattcatggcgccgatcactactttaggtatccgggcctggacaatggctcccgcacacatctggcatggctccagagtgacatacatcgtgcattcttcaagcctccagtctccggtttttttactggctttttcaatggcaagaagctctgcatgggccagggtggttttcctcttatttctctggttgtatgcccttgcaatgacctttccttctgagacgatcacacagccgataggcacgtccccaatggccgcagcttttttagcctgctttatggcttctttcataaatttttctttttcgttcatttcgtcttcccccggtcatattttttctgccccattcatagaataaatcaaaaagagagtatcacattggctgaatatcaacgaatcgtttcatatctatacgaatatagcaatggcatgaaaggcgaaaatgcagggtttgccaagattgaaaaacgccagaagcagcttcggttatacttccatgtcaaaacaaatgatgaggcattaacttacaaaatctatttttataggttccgccatggaaccatggaaggcatcctgctggattcattccagcgcaatgacaccatcattgagtttaagaatacttatcctctggtcgtagacttagaccaggtggacggctttttgatttatcactccaacagccacttctttggttctgaatggaatgataaaccgatcacgatccgcaacttcctgcctgcagatgatacatcagggccaagtgaagttgttgaagcagaagaaaccaggcccccggaaccggctcctgaagaaagtcctgttcctgaggagacaacacagcctgagacggctccaatgaaaacagagcgtccgcagacgacccagagagatcgaattcctgactctgctcatgcacggacttccacttctacagtgacagaacgtccacagccagctcaaggagaacgtattcctggaactcctcctgcccagacagcaactcctgcggtgacagaacgtccgcagccagctcagggagaacgcattcctggaactcctcctgctcaaacagcaactcctatggtctcagaacggcctgaaccagctcaaggggaacgcattcctggaacctctacaacacagcccgctgctcctgcggcctcagaacgtccgcagccagctcaaggagaaagtgtccccggcaatgctcccgcacagaatcctgttccgatggtcacagcagaaccatatgaggatgaggaagaaccgccggccagcgctccagatccgcctcctgtcagggatccttttgatgaactcccgcaggaaattccaatcccggagggaacccctgatacggaatccacagtgccggagccggcacctgttccggcaggaacgcctccccgggtctatgtagaaccagacattccagaaccggagcctatgaatgccgagtctgtggccgaagaggaaccgccaaaagaagaaagttctgctgacgctaattcaaagctggcagaatatattgaggcccttcaacttgaaaagaacgccaaagaacagggaatatcaggcactcccggtctctttgactggaaggagtatcccaccttgcccttacctccttcttatatgctggatcctagcatcaaactcaaagtagatgacctgcagaatattccagatgtgccagagaatctaaagaccaacggatttcttctgctcaactatggcaactacggacatttgatgctctgccagaataaacgcaccaaaatgctttacctgggaattccaggagtttttgataatgagaagaacttcattgctaagttatttggatttaagaactttttgacagtgcccgaagcccgtcagaagacaggaaatttcggttattggatcttagccctttaattcttccagcaggtcgctgagccttgcaaactgttcaaggctcagtgcctctccacggatcgtaggtgaaagctccattttttcaagggcttccaccacctgttccttggagaaattcagcgaaccgctgttattgatcccgttctgcagagtctttcttctctggttaaaggaagccctgatgatggaaaacatcagcttttcattttttactttaaccggcatctcctggtatctggtcagacggataactgctgagccgactttgggacgtggcataaaacagttgggaggtacattggctacaatataaggctctgcataaaactgtactgccagcgacaatgcaccataatcctttgtcccaggacctgcctgcattctctgggccacttccttctgaaccatgacagtgagactgtccatggggacattcttttcaaacagccccatgatgatcggtgtcgtgatatagtacggcaaatttgccactaccttgatcggttttcccttgtttttctcctgtgctatctttccgatatcaaccttcaggatatcatcgttcagcacttcaacattgtcataccctgacagcgtatcatgaaggattgggatcagattatgatcgatctccaccgccaaaaccgctcctgcatgttctgaaagatactgggtcatcgtaccgatgcccggcccgatctccagtacaaaatcatcctttgtaatatgtgctgcgtctatgatcttttccagcacatggctgtcaatcaaaaaattctgtccgaacttcttctgaaaatcaaaatgatacttctgaatgacttctatcgttctttttgggttgcttaatttctccatctaaacctctttcattcgatacatgatcttggcattttgttctgtaacctcgataacctctttggcactgactcctttaattgaagcgatctgctccgccacaaacggcagatttaaagaggaattccgtttcccccggttcggttccggtgagagataggggctgtccgtttccaacagaatcctgtccagcggcgcataagaaactacctcctttaatgttcggctattcttaaacgtgacaactcctccgatcccaagataaaatcccatatctaaaaacttcctggccatctcctttggataagagaagcaatggacaactcctccgatttcttctgcatggactgcacgcatcatatcttccgtatcctttgcggcatcccggctgtggatcaccataggaagattggtctcccttgcaagctccatctgtgcttcaaaccactttttctgtattggacgctccggctcattccagtagtagtcaagccctatctctcctatggcgacaatcttgggcagttctgcatactgcttaagttcgccaaggtcctcaggcttcatatcaccgctgtctgacggatgaactcccaccgctccatagagaaacggatatttttctgtcgctttggctgtccaccgggatgtttccatattggatcctatatttacgatcgtaccgataccattctcctccatagaagccagcagttcttcccggtctttgtcaaactgcttatcatcataatgggcgtgggtttcaaatatcataactcttcctccaaaaattgttttcatgctgatacaatttctcattcatatggtataataagaataattcttatttcattgcaaggctgtctctataacaaaagacaatattttttattataacacgaaacggaggatttttatgagtatttttaaatgcagtatctgcggctatgtctatgatgatgaggcagaatccgctcctttttcccagctggaagctgattatacatgccctgtctgcaaggcatccaaagataagtttgacccagtagaagacggacctgtttcctctcccaataaggacaacccattggcttacccagacgccttttccaaaactgattccaaggagttcccgcagatggatgccattcatcagatggctgtcacaggctcttctgtcgttgatgccatgggaaccttaaaaccgatcatttcgtgggatgatattctgattatgggggcacagctaaaccctgcccccctcaatgccaaagatccggtgaacaccaagacagtcatcggcaagaaggcgaaaaaacctatggagatctatcatccggtatacgtatcccatatgtcttttggggccttgtccaaagaattaaaaactgctctggctaaaggtagtgccatgtctaagaccgccatgtgcagcggtgaaggcgggattcttcccgaagaacgtcaggcggcttataagtacatatttgagtatgttcccaacctgtacagcgtcacagacgagaacctccggaatgcggatgccatagagattaagatcggccagggaaccaaaccgggcatgggtggacaccttccaggggataaagtgacaccagagatcgcaagaatcagaaataaacccctgggtgaggatgtgatcagcccttccaagtttccgaacgtcaattccaaagaggatttaaagactatggtagactggcttaaagatgtctccggaggaagacctgtgggtgttaagatcgctgccggacatattgaacaggatctggaatggatcgcttacgctgacgccgactttgttaccatagacggacggggcggtgccacgggggcaagtccccgaaccttaaaggacaatacctccattcctacaatctttgctttgtccagagccagaaagtatctggaccgccatcacatttccatggatctggtcatcaccggcgggctcaggcttcctggcgatttcgcaaaggctcttgcgatgggagccgatgctgtggccatagcttctgctgctcttgtggctgctgcctgccagcagtaccgcatctgcaacaccggtcaatgccctgtaggcgtggccacccaggatgaagaattgagaaaacggcttcatatagaccattcggccgagaggctctgcaattatctaaacgtatgcaggtcagagcttgaaatgttcggacgcattaccggacatgccgatatccatgatctgagtgtctcagatctaagaaccaccaaccgtgaaatatcagagtttacagatatagaacatgtataaaccaagaaaaggccgtcaaaaatctgatggccttttctttatgtctcaatatcaacctggcacatcttaagtgcatttaaagcattttcatggctctccggcgtcaccccggcacaaagtcctgcgtgaacgataagcttagcttctggaagtgcagcctttaccatgagaacattggagatgacacagatgtccgtgcataatccaaggaattcaatctcaacttcttttccctcgtatctttgcttcagaagttcacagagctcaatggagccaaaggtatcctttctgcaaaaatccatgacctctgcctctgtatcagagatagcatccataatgtcagaatgcagtgcccatccttcttctcctaaaatacagtggggaaccggaagacttttgccttcctgtgtgtttaagtaatcctctgtgtgggtatccagcgttccgtatatactgcccttaaatcccctgatcttctctgctgccccgtcaacgatctcctgggcttccttggtgccaagagaaccgtcaataaagtcattctgcatgtctatgacaaccaatatatgttccatacggcctcctactggatccttgcagccaccagctggttcaccagctttccatctgcttttcccttgactctcggcataagactcttcatgatcttacccttatctttccctgtcggagcatcaattcccagttcattcagcaccgcatcaatttccgcgttgatcttctcttcgctcatctcctcaggagcaaattctttgatcactgcaagacggatgttgcattcctcaatgatgtctgtccggtcctccgggcaggattccagagtttcttttgtctgtttcaattcctttgcgatgatcgtattttcttcggcctcagtaagatcctctcttttatcgatctgtgcatttttaagtgcgcttaacagcatggataaggcttcttttctcgctttatccttatttttcatcgctgctaccatttcttttctgatctcatcaatcttgctcataatatcctcctgattttttgtttttattctatcatatattccaggagaaatcacttccttctacggtttcttcctccgtacagatcagccagtagtcaccgtatctgcgcatttccttgtatggtttctcaagcttcggaaatcccacactggaaaatgcatggacgaacattggagttttctctttcttttcaacaaccgtctccgctgtaatataaacacttcctgtgtccagtttatttccctttcgccccaatacctgcatttgctcatagacatcgattccttctgtcataaacaaaaacagtttcagcggatgaacccagatacagttgttggactccacaaccatgtcacacggaatatttcttccttcaatataatctcttaatctgtggagatctttaatctcttcttttgtctccccttttatgatccccattcctcccagatctgtcatatctgcgatgcttctttcttccataatcataacagtctttccctgctctttttgaaaatgtgcttccaccgcattttgcagtgatgcctccagatacaaaatatctacctgtttatcagtctttaaaattgggtaatatgggaattctattttttcctgccataaggaatgcatcaaaccacctcttttttcctagtatgtgtatatcccttcattgtatacaaatagtttttgtcaaaaatattaccataattatacacaataccgcttcagagtatagggttcctaaacctgagacgatcattcctgcttttgaaggtatgaatagtacgatattcagcaaaacaaactcaaagattcctcagagaatggaatgaacttataattatgcgctccgtgttgtatattcttgactttaaatatcccctgtgatactatttttttgataatcagataataatctgccaccgggtagttgaatgtagaaagcatttgtaagcatatcgttaggtcttagaagatatgtttacgggtgcttttttggaggatataatgacgaaattaaaaacatggataaactatttttcaaaaaccgaaattgtattatggtgttgctctgttatcttgatcgttctttcattttgtatctttgaccatgaaaattattttactcttttagcgtctctgatcggtgtaacatcgcttatctttaatgcaaaaggcaatccgttgggacagctgctcatgatcatttttagtttgttatatgggatgatatcgttcatgttttcctattatggagaaatgctgacttatcttggtatgacacttcctatggcggtattttcttttattacgtggcttaaaaacccttataacggaaataaagctgaggtagaagtgaatgatctagacaaaaatgaaatcattgtgatgtgcatgtgtacgattctcgtaactatcgtattttattttatattagatgtttttcagacggcaaatttaattccaagtacactttccgttacaacaagctttcttgctgtatatcttacctttaaaagaagttccttttatgctgcggcatacgctgggaatgatatcgtgttgatcattttatggtgtctggcaagcattgacgatatgaaatatttttctgttgttgtttgttttatagcattttttatcaatgacgtatacggttttgcgaactggcagaaaatgaagaaacggcaaacagctaatgaaaattaaacatttgtcaggaaaagaaacatcagaattaattcggctttagaaatcttaacaaattatcttgatgcgaaaaagatccgaaattcataacactgtatagtgctatggatttcagatcttttaatcttattgataaaataaacctattaccttaatattcacatttccccacagttctcggaaaagggatcacatcacgaatatttgccattcccgtcacatacatgaccatccgttcaaatccaagaccaaaacctgaatgcctggtggacccgtatttcctcaaatccatataaaaatcatagtcagaaagattcatttgaagctcttccattctcttttgaagcttttctaaatcatcctccctctggcttccgccgatgatctccccgattcccggcaccagaagatccactgctgccacagtttttccgtccggattctgtttcatgtaaaatgctttgatctccttgggataatccgtcacaaatacaggctttttataaaccttctctgtgagataccgctcatgctctgtctgtagatctgttccccacgaaaccggatattggaacttatcattatgctgttttaatatttcaacagcctccgtgtaagtgatcctggcaaactcagattccgccacatgatgcagacgatccaaaagacctttgtccacaaactgatgaaagaacttcatttcctcaggcgcctgttccagtacataatgaataatatacttaatcatactctccgccagcagcatattatcttctaagtcggcaaatgccatttccggttctatcatccagaattctgcagcatgtctggtggtgttagattcctctgcccggaacgtggggccgaacgtataaatatttcggaaagcctgtgcaaaggcctccccattcagttggccgctgactgtgagattcgtttccttttcaaaaaagtcttccctgtaatccagtttctttccctcagagagctctttaagatccagagttgtcacctggaacatttctcccgcaccttcgcagtcctgtccagaaataatcggtgtatgcacataaataaaatcccgttccataaaaaatttatggattgcataggcgataagggaccggaccctgtatacagcctggaatatgttggccctcggtctcagatgggcaatggttctcaagtactcaaacgaatgtcttttcttttgcagcggataatctgaaggagactctccctctacctctatactggaagcctgaatctcaaatggctgtctggcatccggtgtttccgccaaaactcctttgacaatcactgccgttcccacagacagcttcttgatctggttaaaatttgtgagctttttttcatacacaatctgaatgggttcaaaaaaagtcccgtcattgatgacaagaaatccaaagtccctggaatcccggttgctcttcacccatccgcacaagcttagttccttcccactgtattctttaaaatgtttatatatctgtctccctgttaatatctgcactctgcgcttctcctcttaaaattttaataagttcaacccaatctcgtcactgtattcacggtccaccgtaccctcgatcctggtaagtaccagttctcccgtggcactgataaaagcttccgtcaaatgtcctccccggacttctcctgcctcgttggcgacgctaatgtggaagtgtaaataggtttccccattcatcaaagaaacattacctcccagtgagacgatctccatatcctcctcataagtcttgcttacatacttcttctctttcgtttgaaacaggcctgccgttaccttatttacagctccgattccgcttaaagatgccagtttcacatcctctttttcacataattcttttaccttcgcaacaatttcttcgcccttttccagtcttataacataatgatttccaaacttccggtattccatgagaaatcctccttattattttatgttcttaaacaagctgtatctttcttcattatagaaccagatcttttatctttcaagccaaaaggcgccttccacactgtggaaagcgccttctggattatcaagttaatttaaaacagccacctgtaaaaggtcaacaatttattctttgatcattgtgaagtcatcccaagggatattcacttctgcaccctcattgatgatggaatccacatgcatcaaaagcgggaattcgtctaatgaaaccactccgcggtcagcaagctttctgacggcacgggctgttcttgttgcaatgacaatggattccagagtcacgccctgtaattcttccattgcctcgtcaaagcttaatccgcgtccaagaagggttcctatctttcttgttcttcctccgaagactgttacatataaatctccggcaccgtgcacgatattttccggacctcccccgatcagctgcagaagctttgtcatctctttaacgctctgtccgaacaatgcagcctgggaattatagtgctggataccgatctttccttccatcttctcggaaaggccgacagccagagtaacaccaagtgcataagcattcttcatagctacggcacattccactccgacaacgtccttggagagagtaatgtgatagtagtctgttgcaagcagatctttgaacatcttaagagtttccatgttctttccacagaatgcaacatggctgtggtcatggtctgccagctcgtagctggtgcaaggtccgccgatggcattgatgtcaaggttcttgccttctggctggcgttcctcaaagatcaccggataaggtaccaatgttccatcatccagatcaaccattccctttgtcactgaaagcagaggtacactttccggaatcaccggcaggatctcatcgcagaaccagtctaaaccaaagctgctgacgccgcagagcgctgcgtccgctccttcaagagcctcctctaattcttcgatctgatagtatttgataccgtcatgtaaagttctctttaatgtgatatggaagttatctttttttaatccgtcaatgatctccctatccagcggagaacctaccaaacggacctcgtgtccgttttccattgccggaaatgtaattgctgatgccatctgtcctgcacaaataaatgtaataacgctcatgttttcctcctaaaatgcttatgctgtaactttctttgttgccacaatatctactcccagtccaagaacgtccttaatgatgacatctccgacatttaccggggccttcgctgttactttggtcagctcatccatgatatcatatatctttccttttggaatatcgccatttgttttgatcggaactcttctggccgtctttgcgtctactctgacagtagatgtaatgactctggtagggttgactaattctttttctccgtaaacggctcctctcgggcatccgtttccggttactttatatccattttcctcatcgacctttaaatgacatcctttcggacaaacaatacaaattaaatctgtcatgttaagcacctaccttttctacagacacagtgatctcgccattcttcaccttctccaaaaatgcctttggaatcacgattttctccatctcacccggagccatgtgttcccgcttaaaggaagccaattcttctcctccggaagtaaccttaatggccacgtctttgtatacgttacgcacacggaacatcacttccaccatcttatccacattggaaggacggactttctgaggaaccgtatatcctacacagtcaccgtttttcagttcaatataagtctggtcttcggtctcaccgttctttacatatgcagcggcacttcttcctgctttctggctctcggcagttacgaagtctaccaggtcatggacgtgcacaacatttccgcttgcaaaaacaccttctgcggatgtctccatattttcaaataccaccggcccatttgtccttgggtccattgtgatacctgctgcccttgtaagctcattctccggaatcagccctacagataacagtacagtatctacgtcaaatgtgatctcagtacccgggatcggctggttcttttcatccaccttctgtacgacaacctgctctactctcttatcccctttgatatccgtaatggtgtgagataagtatagagggatatcataatcttccaggcactgtacaatatttctagtaagaccattagaatatggacagagttctacacatcctacgactttagcaccctctaaactcatacgccttgccatgataaggccgatatctcctgaacctaagatcaggacctttttcccgaccatgtatccttcaatgttgacatatctctgagcggcaccggcagtgaatactccagccggacggtctccaggaattgcgatcgctcctctggttctctccctgcagcccatatttaagatcagggccttgccttccagtaccatatatccatttttcttattcatagcgtggacgcatttcttatcttcatccacatccagcaccatcgtatccagcatcacttcaatgttggtctgctctaacatctcgataaatttattggcatattccggtccggtcagttcctctttaaagtaatgaagaccaaatccattgtggatacactggtttaagattccgccaagttcctggtcacgttctaccactaagattttatcggcaccattcttgcttgcttccactgcggctgcaagtcctgccggtcctcctccgactacgatcacatcatacttcattatttggcacctcctgtttttgtttctcctgtgataatgttcattcccacacggtcctgtggaacgttttccaatggaatatttaactctcttgagatgatctcctgcactctcggaccacagaaaccaccctggcatctgcccatacctgcattgcatcttctcttgaccgcatcaatggatgttgcagggattgggcggtggattgcatctacgatctccccttctgtcactgtctcgcagcggcagatgatttttccgtataatggattttccttgatcaaagcagctctttcttcatcgcttaacttcttaaatctgttaacttttctttcatccttgaactcttcttttgcttccagagacagtcctgaagcttccatcatcttcaacaggtcaacagcgattgccggtgcggaagaaagtcccggggaagccattcctgagatattaaagaagcctttgttttcttcatcttcaaagataaagaaatcatcttcctttgttctcgcacggactcctgcaaaattacggatagactccctgaagttaataccaggaacagattttaaagctgtatttctcacaaaggatagtccatcggttgaggttgacacatcatctccatctgtcggctgggagttaggccctacaatcaggttgccatggacggtcggtgagacgaggacaccttttccgtccttgttcggacattggaagatcacgtgattcaccagttctccctggcttttatctaataagtagtattctcctttattcggttcgatggtaaaagattttttatttgtgtattcgtttactttgtcggcattgacccctgctgcattgcagatgtattttgcttccacagttccgttgtttgttttgatctcataggcgtcaccgttcttttggatgtctgtaacttccgtattcagcttaaactcaataccgttttctaccgccatctctcccagcgcaatcgccaactcccacgggctgatgattcctacattcggggaaaacaatgctttgatcgctttctcggaaacattcggctcttcttttctcaatttttcctgatcccagatctccatgtcaggaacgccgtttttctctccgcgctgttttaactcttctaatgttttttcttctttttcttcaaaggcaacaatcagggctccaatctgtttaaatggaacatccagctttttacacagctcttttatgtactgatttcctctgatattatattttgccatcagagatcccggtatcgggtcataccctccatggataatggcactgttcgctttcgttgttcccacagccacatcattctctttttcaatgaccactgcatttacattatactttcctaattcgtatgcgatggaacatcctgtaatccccgcacctataatcgctacatcatacactgttcttatcctccttcgactgaatccctgtttgtcttactgaccttatctaatcataataatttcactgtgtcaaacctgagaaacgcccatttcatgcggtttttggccacttctgattaatcattatccgttgattaactgcccattttggcttttgttttttagaaaacaaaccctttccccgtttttccttgtgtttactattaatcattagtataatattaataatcaataaaaagtttcaattagtaatttttattaatcaaaataaatcgaagatttttccatttcacaggagggggcaatatgggaaagagaaataaggtcactacaagggatatcgcagaatacacaggactctcccagtccagtgtttctatgatcttaagcagcaaaccccacgtatcattttcaaaggaaaccgtagataaggtaagagctgccgccaaagaacttggatataagaaaccggagaagaattccttaaagaaagcttctgcactttccaagacgatcattgtgatctgtccgatcctttccaatggatactactctatgctgatccattccatcacggaacgcgcaagggaatatggttatactgttttttccgtgtccacgatccgtgacgtttcacaggaggagtactatattaagatgctgtctaattttgacttaagcggcattatctttttatatcctccttcctccaagatctcggagatcaataacctgtctaaatctgtccctatggtatccatcggggataagcctgagggctccaggtttgattccgttgaactggacagcaaaaagcccggctttatactcggggagtatttaatctcactgggacatacacatatttcctttgtctcagctccgatcaaacaaaaggagattggaaggctccacaggcttgaagggttaaagaatagctttaaggcttacaacatggacttaaataatattgaagtgctgtcctccaaattctctacttattccagatacacgccggataattccgagtatctaaacggttatgatctggtctcaaaagctctcgaaaacaatacaaagtccactgcctttgtaggcaataatgacatgacagccttcggtaccatggctgccatcacagaccacggctacaaggtacctggagacttttcagtctgcggttttgataatatccctctctcaggcatgcctcagatctcactaacaaccatcgagcacgcggctgcttttaaaggcaaggaagcggtggatattatttataaaaagaatgcccaaaaagacggcctgtccaagcatcattacattatgagactggaatatgaaccggagctgatcgtccgcaattctactggaaaagcgaaaaacaatacctagaattaaatacgcttacatccgctgagcatatatacaaagagaggaagcattttaaggcttcctctctttgtataatttctatttcgtctttatgcttttcccacacttccacaaaccttcattttactcataacatacttttttacttctttacgtcctgccgcaccataatttttaggatcaatggtatcaggattttcagcgaggatttctttaactccttttgtatatgcaatgcgaaggtctgtagcataatttactttgcagattcctcgtttaatacactcttttactgcttcgtccggcacaccacttgttccatgaagaacgaggggaatgtctacgacctctttaatctggcttaagatgtcaaactgaatgtttggttcccctttatataccccatgggccgtaccaattccaactgccagagaatcaacccctgttctctctacaaattcctttgcctcctgtggatctgtatatggattgtcatctccaccatctaaatcatcttcttttcctccaacttttccaagttctgcttctacagaaatttctgatggatgacaggcctctgtcactgccttactgacagaaatattcttctcaaatgactcatgggaaccatcaatcatgattgaagtatatcctgctctcaatgcctgcatcgcaagctcaaaactatttccgtgatctaaatgcatcaccacgggtacagatcctctctttgcagccgtcttgacattcgcaagataataatcgagtcccgcatatgttacagtagacggggtggtctgcataatgacaggtgactttaattcctcggctgcttctaaaactgcctgtaccatttccatgttctctacattgaatgcacctactgcatatcccccagcctgtgctttcagcaatatttcatttgatgttaccaacataagtctatcccctttctggatatcataccttatctggcaggccgctacaaactaaaatgcgccacctgcgatagtttttctttattgttggaaggaggcctttcttttgacagaaacccttctccagcagacattacgtccattttctacatgattggagtgaagcattctaagagctgaacggaaattatgtggaaaatgtcatagttttataatcttaacattttggataatctcatctcttttcacaggttcaagggttccagtcttgggggaaagtgcgttagccgacgcaacggcaactgcatactttaaaatatcctccggctccatattgcgttctaatcccactgcaaaagccccgaccattgagtccccgcatcctactgtatttaccacttctatttcgggcggccttccttgatagatccctttttcgcatacaagcaaagccccatctcctccgagagaaataaccacatatggaattcccttttcatagatcttcctggcatatttaataacatctatctggctgtgaatcttaatattaaaaagcatttctatttcatctttattaggcttgaccatagtcggaatacttttgagaccttcttccaaatattctccgctagtatctaagataaccttttttccttgatcttttacaatctgcaccatcttctggtatatatccttacccattccgttgggcgcgcttccagaaattgttatgacatcgctatctatgataatttcaggaaatttttttagaaatgcagtttcctcctctggagtgacatcacatcccgcttccagatactctgtagaaccataacccggatccaaaatattaatacagcttcttgtttcaccattaatgtgttcaaactcaaaaggaatgccatcagactccaaaagtgattctaaatattggccattatatccgccgacaagaccggctgcctttacatcagcgccgcaaagcctggccacccttgccacgttcagcccttttccgccggcactgttgtatgtatttgctacacgcattacagtaccattttcaattctttgggtcaaatgataggctttatcgatagaagcatttaacgttaccgttgtgatcatgcttttttcctccagtcactataaacttcttaaatatttcacccctgctgcagcatcagcgacaagtccgtcaatatcatctgcctttttgatagttctccaaagcgagacactctttgcacttgcagacttatcaagaacaaatggctccattactaacggcccttcaaaacatatatcttttattgtttttgcaatagcctgccaatcaatattagtcttcttttctcctacagggattttccggttgctctctccgatatgcagatatcccaaataccctttttcatgggcattacgaatggcttccggaatataatcttcttcaatgttcatatggaatgtatccaaaagcagcttacaatagtcattgttgacagcctcgcatattgcaattccctcttcggcagtattggctgtatactgttcaaaacgattcacaatctccaaacagatggtcactccaacttcttctgcatgtttagcaacttttgttaatccttttattgcatttgccgtacggacctttttaatttctgtaacattctctccatcgggacgtgtattccatagtccataaggtattccagaaaacaatttcgcgcccatctctgcacaaagatccagcatattacataaatgtctgataccagcctcatgatattctttttcagaactggaaacatctctttccggcctaagtccagtcccgttaatcgttactgaaaggcctgcatctttaatataattacgaagtttgtcgcgttcttctacagttaatggtacaaaatcacctgctttcagttcaatggtatccatattagatttctttgttaaatcaactatttgataaatatctaatttaggagttgttccattccaatatgctgtttgcagcccaattttatttttcattttgattctcctcgttttcttcccagatgatatatcttctgctactccaggcttgcatgtctctttgccatatcatcattacttcctttatcttcctgactcatttcaagaattgccgcgtcaaacactataagcagcatttgttcaaataaacttccaagcggctgtatacttgcatcagatgtcgaaaattttgttgcagaactaattgtaatgtctggtgtctgaatttttcccaatgtggattctgatgatgctgaaatcacaaccaaatctgcaccctgtttctttgcagactgcacagtcatacagacactgcttgtttcccccgaagcagaagctgcaatcagtaagtctcccttttccaccgacggtgttgttgtctctccgactacatatgcatccaaaccgatctgcatcagtctcattgcaagcgcttttaacatcaaacctgatcttcctgtcccataaacaaaaattcttcgatgagtcttgattttttgaatcagattttgaatctgattctcaggaatttttttagcagcttgttcaagctctgttataattactctcgttcccaaaataacaccttctttacatgatttcttccggatataaaagcacttttccatatcctttaggattggaaataatctttttaaacatgtgaggaccttcgctcagattaactctatgagtcaccatgccaagaacatcaaccttcttgtttccgatatactccactgcattcatccattcttttcctggatatggtgcagaaatagtacaccaggatccgataatatttaattcatttctcataattttttcaaaatagaatcttggaattggtacatccgcatatggaattcccatatatacaacttctccgcctttacggggcaatccaagcactcttgcagcagtaaaagggttccctgcagattcgatagctaagtccactccatttccatactttctgatttcatcatgaaaatcaatatctgtagaattaattaacacatcggcgccaaatttctgtgcaacttgtaattgtgcagcgtcaatatcaatggcaaacactttctttgctccaaatgctttggcccattgaattgccataagtccaatatttccacatccaacaacggcaacttcatatcccattttaatttttgtctgatataatccatggatagcaaccgttgccggctctactaacgctccttgttcgtatgtcatgccttccaccattttaacaaggttgacagccggcattttaatatactctgcaaatgcaccaggtacataagctccaattgtatttaatgattcacatcttgacggatgtccgcttttacaatatccacattcatggcaaaccatattcggacagcctaccacacggtcacctactgttaactctgtgactgcagaaccaatttctataacttctcctgaaaactcatgcccccagacattcccttttacgtaaggtcctaaactacggtatcttgcaatatccgaaccgcaaatcccaacggccttcacttttacaataacgtcatcgtctttttcaattttaggatcgggtacttcttcatatcttaaatcttggacgtcataaaatgttaatgctttcattccttcacagcctttcttaaagtctctgtatgctccttgataccttggaataaatatccgccggatacaaatacatttgcccccgcttcataacatggctttatcgtcttattatcaatacttccatctacttcaatatcaatatctctatctccaaccattgcttttacattttttattttatccacgacagaacctaagaagtgctgaccgccctctcctggatttacactcattaaaagaatcatatccaaatcatctaataaatacttgatcgtttcttccggtgttcccggacttaacacaattcctgccttgatacctctattacggattttatgtaaacagcttaatacccttgctgtagattcttgatggattgttataatatccgcccctgcatctgcaatgctctcaatatgcagttccggatgttctatcattaaatggacatccaatgggatatgagtcattgattttaatgctttgatgtgatctgctccaaatgccattctttctacaaaatgtccatccatcacatccacatggataaaatctatgttactgtcttctaattctttgatctgtttttttaactctcctaagtctgctgcgaagattgacggagataatttcatatctttcactgtcatacctctttcttttatcggttcggacatttatctttcactgtcgattaaaatctttccttttactgcaccacgagtcttaaacatctcaaaaccttctgagatcctggataacggcagctttttaaagatcagggattcttccccttttagctgtcccgttgcaaaataatgtgccacacaattccattcgtgtccggggaatggcgcagaataagataaccaggatccggtcagagtaaactccttacgattcatgttttcccattcttccacagaaaatgttagttctcttgtaggctttcctatataacagattccggctttatttgctgccagttcatacgccatcttcatcgtaatggtacttcctgcagtttcataaatataatcaaagcctttttggcccgtcagctccattgccttttccataaatccttccttcaaggtgtttatgccatcggctgcgcccatctgttttgccagttcaattttgtcatcatcaatatcaaatacaacggtctttgctgctccgaaaatatttgcccattgcatgacaagcaatccgatggtcccgcctcccagaactgcaaccgtttttcctccttcataaggaagacactgtaatccatgaagagcaactgctgcgggttcaaacaatgcaccttgttcaaaagatactgtatccttaaaaggaaccacattttgctctggaagacagacatattctgcaaagctgcctgcttgtcttgtcccaataaaactataatgcttgcaaagtgcataattacccttgagacaatcttcgcatttcatacatggaaccagcggagcgccagctacccgctggcctttccggacttttgtcacgccctctcccgtttcctcgacaattcctgaaaactcatgtccaaggatgactgggtaaaaatgcgccccgttctcattcactctgggtacatctgatccgcagatcccagaatattttactttcacaagtacttctccagcctccggcctgggagtctgtacgtcttcatatctgatatcatctcttgcgtgtaaaactcctgctttcatctatttccacctgatcctttccatcttcagcttactcttactcctctgaaatagttttaagcaactcttcaactttcttctttgttgcttctttattaattccagaaacaagcccaaatacactgagatatggtttctcaagaggattacggtaatttgcagtagtaaatactacatctacatctttttgctttgtgggaacctcagaaatcgtccccttcatcaatcttattttaacgccagcattttttgcaatttccttaatttcttcctgtgcgattgtggatgttgcaacaccgctgccacacgctactaatacttttacctcttttgccataattcttctcctttactatgacttgttctcatcctaattgttcctgcaaataaatctctgtttcttcatttgaaaggtttttgcatattgataaaacttcaggattatttaaaaatgccatcattttttgaagtactgttaaatgctcgtttgcatccttaatcgccagattaaaaatcatatctgtttttacttcctctgtatcatcatccaacctcttaaatgttactggaccgtccaatttcagcaaacaaattgcattctgtgaaattccttcatcttttacatgagggattgccgtaggaatttctgtaggaagtcctgttggaaaatttttttcacgctcggcacacagattcccaaaatctttactgactatacctgctttatataaggcgtctccacatagtttgattgcttgttcactactgtcggctgatccgtgaataaccaaatatttcgttttcattgaactcccctctcttatccaatcatcatcataattctatgaataaatgatacgattaggttgccaggattccatccaaagtgagatgctgtcacaagttttccaaaatccacatttgtagcagacatcatctgtgtagcttccggaataaacatatttgccaggaaaagtgttaagtacatcataacagtcataccaagaagggatctgaatagatttcctttactgcttaatacgaccatcggtgtcatataacagatttcagctaaaaggctgagcgggaaaaatctcataccaggtaccaaaaatacaagaaggatggtaaccggaatcatgatagcagtacatgtaatacatgccggatctccaagaccaagtgcaatatccatacctatgtatatatctgcgtcttcaccaatttttctgtgcatatagtcgttcgccgcctgtcccattggagatagaccttccatcatgatagataccattctcgggatcagtaccatggctgccgcaacacccatagccattgtaagaatctctcctgggctttgctttgtaataattcccaggaacgcacctacaaacacaccgatcatcgcagggtctccaaacacgcctagtttatcaccgatttttgtcatatctaaatctactttattaaggccaggaattttatcaatgatcttattcaatccgtatgagattggatatgcccatgcgacaaagcagagacaggtacatgttgttccttcaagcccaaagaactcctgccaaggttttgcaacccactgtccaaagaagagaacgatcacaccacatgccaaagctgttataaatccgatcaccgcgcttccggataaactataggcaagagcacccggcacgagaaagtgcatgaaattccaaatatcaacatttaatacctttgtgattttaagacgaactagaataagatttacaaaaatgatcgccggaattaccaatactgcaaatggcacggtccaagacgctgcgccaagtgccgcaaatcctatctctaaagtatcatagccggatcccagcttttcgtaatactccattgcaggcgtcaccgatgtaattaataaatttactgctaaaacgagtccttggaaaccaatccctaccaataaacctgctttgatcgcccgcccgattttcataccaaagaaaatgcccaatattgcaattaccaccgggagaagaacaaccgctcctaaatttacgaacccttgaaaaaattttaatagtatttccatatgtacctccaattttaattttctccgagattgttggccaaacgttttatctcttgtttacagtttcatattatcattcatataaaatcaaaaacagtgaaaggtacttcccctcttaggaaagaatttagtccggtcaaattcatttccacagctggaaataaaataaatcagccgaatctatttcccatccaggaaataaattcgaccatttatttcaacttatttaaacagtgctgtgttcatatttctcaataattcttgacatttcttcagggtcctctgcctcatgaagaagctgtctgtaaccgtcatccctcagcatatttaccaaactgaaaaaagccttcaggtaactcttatgatcaatggcgctcaaacagcatacaaactctatgggatccagttcttccacaccaaatggtaccggctcttttaagcgaatcaggtgcatgccaagacggatactgccttcttctacttttgcatggggcatggcaaacccttttgacaatacaacataagagccatattcctctatactgtggaccattgcatctatgtatcttggttcaatataacctctttccacaagcttctcacctgacttacgcactgcatccttccagtcctcacactctacatttacttcaatattcgtagccggcagtaaatgatgcaggtatggcgataaaatctccgcctcatgttctgcagactgtttaaaatagcttcggatcactcttcggagttccttcataaagtcctttgctacatcatctggctcaatcatgctgtataccaacggacggacttcatcgatcaaacctttcgcactcagtccattttcatccattctgactggaagatttctgccattcctcagtgcatcaattctattacctacacgaatataatctgcatcactgaaagctgctgagaccacaacatgctctaacggacaacattccaatggcactgtagaaattacgaagtcagctgaattagggtcaaggttcattgcttcatgggcggaaatcacatccacaacccgaaatttaaaatgccgtttcaacttttcgagtagtagtctggatgttcctatccctgcatgacaagccacgatcacacggaaagctacctccttatttttctttcgttcaatggcagcacatacatgaactgcaatatattttatttctatttcattcaatttacgctctgtatattggtatatgacagacatctgattaatgactgcctcaagtacatcctggttatcttcaagcacctcatttatcatatccacttcctgatagtcaatggggggtgcagaaaatatagattccagatgattagataaattttcaaaaaaatcataatctgtattcaaatcaattcctagttctgaagaaatatcagaaatatattgccttgtgatcatttgaataataactgtttttttactaaatttgttattgttcctaaagcgtacattatccataaagctgctaagatactttatatcattttctgttgtaacgacatcacaatactgggaaatatattttagtgtatctaaagcaaacatgtaattttcgctattggtatccacctgtggctctaaaaattcttctgtttggttacgattcaccataattcttaaatacaaaacaatctcacggaaagaattatcatccaaatactttttataacgttgttcctgctctccaagtattttttgtattacgctgctgtcacctgcctgtacactgacatgtttagctacaacatttttatgattgtcatataaacaaagagaaggacgaagaacattaaaaaggaattctctttttttactttcggaaccttctatacgaagccccttattggcatgagaaaccacctctaagttcccttcccttataaatgctttgatatcttttaaatcattgatcactgttgctctgctcacaaataaatgatctgcaatggttgcaagagtgatataatctacagaatttactatcatagccgatgctacctgcttacgctcctcctttgataatctatagctgtatagatcaccttccagcagtatcggcaatgattctttaaagtttccaggtggattgatcttcccgccgctgttgatcaaaacttcttctcttttattctggtttaggattgaattaatctccttcagatcattgcgaatggttttttgagacacctgaaaatattctgcaaatccggagaccgtaatctcatctttctctttgctcaataattgtacaatctcagtacttcgctgattcatcccaaatacccccattttctctctaataaaaccgtaacagtctaatttaatactactctaacagtgaacattaaaaaagaatgatttacttccattaaaagaaattttttatatcatatcctgtgatccacattagccgtagaaagccaataaaaccttttgatccatagtctgaaacaaaattatgtcacaactcccgatgaaaaagatagcattagtctgtatttacatttgtacaatacataagctatgataaatacagataaacgtttatagcaaacagcagccaaccgggaaatggccgctgcacaacaaaggagaggtgagcatggccggcaaacttcttaatgatgaattcttaaacaacatagcgtggggacttccaagtgcggcaaaacaagaatcgatccgcattgcaggcagacttcttgtgtcaaacggatatgtaagacctggatatgaggacagcatgctggaacgtgaacttgaacacaatacatatttagggttcggcgttgcaatcccccatgggactgaaaactccttaagccaggtattaagatccggaatctgcattgcacattttcctgaaggcatagattataacggagagaccgtgttctatgtgatcgggattgcatgtaaggaagatgacacaatacaagaactaatgcagatcactgatattctctgcaaaccagaagaatgtgaaaaactattatctgccgcatcaaaagaagaattcattgagattattaatgagaattatctaaaagaaggagagttatagtatggaacatgaaaagacaacattctcccagaagctccagaagtttggagcgttcctggctggaatggttatcccaaatatcggcgcatttatcggattcggtttgatcacagcatttttccttgaaacaggatggacaccaaatgcaaaacttgcaaaccttatcagcccaatcttaaattcactgctcccaattctgattggtcataccgggggtaaaatggtcggaggtgaccgaggcggagtcatcggtgctcttgttacagtcggtgccatcgttgcagtgccgggaacccctatgttccttgcagccatgatcttaggacctgcatctggatggtgcattaaaaagtttgatgcggctgtagatggaaaaatccctggcggatttgagatgatcgttaataacttctctttaggtattatcggcggtatcctctgctgtgttgcttaccttgtattcggacctgtcatggataccgttacacaggtgctcacaaatggtgtaaactggatcgtatcacacaatgtgcttccgctctctgcaatctttgtagagcctgcaaaagtattgttcttaaataatgcattagaccacggtatttttggaccgatcggttacgaacaagttaaaactttaggacattcagcattattcctgttagttcctaaccctggaaccggacttggacttctgcttgcatactggttctttggaaagggtgaaatgaaagaagccgctcctggaatgatcctcattcatttctttggaggtatccatgaagtttacttcccatatgtattagccaaccctctgactatcattggtatgatcgccggtggtattgcaggaacaggtacctttacgctgttaaatgtaggaacagtggcaacaccttctccgggcagtatcttctctgtcttagcattgtcgccaaaaacctcaatgctcggtgtcatcgccggagttgtaatttcctgcctcgtatcctttgtaatcaatgcattctttgtaaaacgaatggtcgccaaaggaaaaggagaagtttcccttggaccgtcagtaattccaaaagaggctatgggttctagtgcttctgatgaagcttctgcagtaaccaatgactcttccttaggtgttgcaggtttagatcttaaagacgttaaaaagatcgtggttgcctgtgatgcaggtatggggtccagcgctatgtcagccgctgcccttaagaaaaaagtaaaagcagctgatcttccggtggaagtcattaatacagcaatctccaagatcccggatgacacagacttagtcatcacgcataaggaactgaccggtaccgcaaaagcagcccagccaaacaaacagcacttatctatcacaaactatctccaggctccggaatatgatgaactggtagagcgtttaaaaaaccgttaaaccaagtacgtttcgtactgtccaaataatcagcatagcaatcggaatgggcgtttccttctggggaaatgccctgttccaatattttgggagggaatcaaaatgaaaacagttatgtatggggccggaaacatcggacgcggatttatcggtgccctgctctcacagaccggttatgaagtggtctttgtggatgtaaatgacgaagttgtaaataccatcaacagggataagacatatccccaggagattgttggggaacatggaaaaaccgtatggattcaaaacataagagctgttgacggaaaagacacctcgtctgtcagcaatgaaattgcatctgcagatcttctagccacctccgtgggagtcagtgttctggaaaaaattgttcctgtcatatgtgagggcctcacaaaacgctgggaccaggatccggacaatgtcctggatctcctgatctgtgaaaatttaatggatgcggacaagttccttagagaaaggatctataaaactctgccagctcggcataaagagacaatgtcccagagcctgggacttgtggagacttccatcggacgtatggtccctgtcatgacagatgatatgaagaaaggcgatcctctccggatctgtgtggaagagtatgattttcttcctgttgaccggaatgcatttaaagggccaattccagattacgataagatcgtaccctacagccccttttctttttatctggaacgcaagctttacatccacaacatggctcatgctttcactgcatttcttggaaaaatcaaaggatatacctatattgacgaaagtatcaatgatatctatatacgaaagctggtagaaggtgctatgatagaaagtgccatgatgatttcaaaaaaatatcaagtggaattttctgaactgaaagcccatatcgatgacctgttgctgcgttttcaaaactctgatcttcatgatactgtggagcgtgtgggaagagaaccattgcgcaagctaaaaccagatgaccgcttagtcggagctctccgtggctgtgaacacgcggggattcttcctgtatatctgtcatttgcagttgcctgcgcactttacaatgtgacaaaggattctgcttctgagcttctcgccgaaaccagccagatatcaactcaggaaccctgcggtaaatatattatgggattttatgaacagcttaaaagtgcacctaaggattttccatctattttaaaaatgactgatactttatattctgaaatcagagggcctgttgtttaaacgcacaatatgattttaacagagaggaatataggtgaggacatggttatttctgaccgcgcaaaagaaataatagaatatctactggatgcgaccggttatgtgaaggtttctgaaattgcaaaggaactgggtgtcacagagcgtaccgtttaccgtgaaatgcccgagatcaatgagatcatagaatcctgtgacttaaaactggaatctgagtccggcaggggaatgcagatctacggttccctctataatatgaaacggctggaatccctgtttgaggaatccaaggttgaacagaactatactgcaaaagaacggaatgatctgatccttcttttgcttcttcatgagaatgattacgtcaagacccagtcgctggccatcgacctgaatacgtctacccagacgatcagaaacagcctgcgccagctgcagaatttccttgaaaatgatgatatcactttgattacaaaacgcagcgaaggtgttatactggaagggaaggaaatatcgaaacggcatctgctgatcagcatacttctgagaaatatccctctggataatttctttgaatggatgaagaacaaaaagtacaaaaattgtgcatttattgatctgctcatccgctgggattatgaagatacacttgctgtgatctatgatttcctgaatcctcttatatcaaaaaagagactcaatatttccgataaagaattccaggaatttttgtttctcttatgcatctttatcaagagacattccctgattaatgagaatggtgaggaattaaagctctctgtggatataccgaatccagaacaggaactttacaaaagcatcaaacatttattggaacataaattccagataaagctctatgacccagagctcaattatttcaactggatgatcaatttatatacgggacgcacccactatcatgtctcaaatgattccagcatattaaaacagctggatctggtcacccagatgatcgccaaggtagaggaacggtttggtttcccatacagtgaagatgagaaccttgccgaaaatctaatgcttcacattaatatggcgttggagaggatccgaagcggaatgaatgtatcaaatccactcaatgatgacatctaccagtcccatccaaagctctatgatatcgtaaagcaaagttttatagaagtttttaaacacagctccgtcccggtgcccgacgacgagataggatatatcgtcatctattttatcgcctcgatggagtacttaaccaagcaatccattgcagtcctggtcgtatgtgcctcaggcatgggttcctccaagatgttaagaagccgtctggagcgggaatttgcagagattgatgtggagaagatcatttcactccacaagctctccgaggagaatctttcccggtatgatctgatcatctccaccgtgccgcttagtttaagcgaagacaaatacatctgtgtatccccactgctcaacgacagggacaaggaagaaaccagaaaacgcattaaacacctcaataaaaaaggagaacatcatgaataagattttcaacgcagacaacattgttttaaacaaacgcctccgaaataaggaagacgctattgacgtggccggcaaagttttggtggaacagggttatgtagatcctgaatacgtggactgcatgcataaaagagaggaagtcatctctacctacatcggcaataatgtagccatccctcatggtatcgacggttctgaaaaatacataaaagaatccggtatatcctttatccaggtaccggaaggagtcaaatatggcgaggataccgcttatatcatcatgggtgtcgcaggaaaagacggaacacatctggatattctcatgaagctttctgaggtaatctgtgaagaagaaaacattacaaaattaaaagaggcccagacaaaggaagaaattctggacatcattggagacttgaccgtttaatctgatttactaaagcagctataaagaataaaaaggagatatattatgttaattttaattgatgacgcagacttaggaaaaattgaggaactctatgcaaaatacccatatgacggagttaccacaaacccaacgatcttgggcaagacaggaaatcctgatcctatggatcagttaaagaaaatccgcgcgatgatcccagaagaagctatgctccatgcacaggtactgtcaacagagacagacgatatggtaaaagaagctaagcatatggtggataccatcggtggtaacatgtacatcaaagttcctgttacggcaaacggtttaaaggcaatctcaatcttaagcaaagagggcatcaatattactgcaactgccatctacggtgttatgcctgcatttatggcagccaaggcaggagctaagttccttgccccttatgtaaaccgtctggataacttaggctacaacggagtccagatctcaaaggatatccatactatggtaaaagcgtccggatatgatgcagaagtgcttggtgcatcctttaagaattcccagcaggtattggagatgggtaaattcggtatcggatctgtcaccgtcaatccagataccttaaagacccttgcatttaatcaggttgcagaaggagctgtaaaagactttatccgtgactttgaaaactgctgcggtgaaggaaagacaatgcttgacttttaatttactgtaataaaataacctggaatcaatcataagattccaggttatttttatttgttagtacaagttttaaaagcttatgaatcctataacaaatcttttctgagttctgctcctgtccttgcgctaagatatgcgggggcaatgtcaaataccgtcttgcagcctgtctgtccctcttctgccagcttatatgctgcccttgcataggccacaatgacactagatgtaaactcagggttggagtccagcttcaggctgtactcgatcagatgcttgttttccccgtcccatccagtctttccgcttctaagtacaaatcctccgtgcggtatgttactgtgatctctttttaattcttcttcgctgataaaatgaacagttgtatcatagtcagcaaagtaattcggcattgtcttgatctcttcttcaatcttagatgtatccgctccgtcttctaagacaacaaaacactcccttgtatgcttttctctagtagaaagttcaggatcctcaccgcttcgcactgcttccagagcagattccactggtattgtatattgctttccatcttttacaccttctatgcggcggatcgcatcggaatgtccctggctgacccctctaccccagaaagtataatccttcccttccggaagaatcgcattggcatacattctgtttaaagagaacatacctgggtcccagcccacagaaataattcctactttcccgctctgttttgcagctgcatccacattggcaaaatgctccggaatctttgcatgggtatcaaagctatccactacgttaaacatagagacatactctggtgtctgaaccggaaggtctgtggcacttcctccgcataaaatcattacatcaatcttatctttccattctggtgcatccgctacattgcatactgcagcagactctgtgagaattgtgacatcttccgggttccttcttgtaaataccgctgccaattccatatcaggattctgtcgaatcgcacattcaacgccgcgtccaagattaccataacctaaaataccaattcgtatactcatcttattttctcctgtctgttttttatctttttttgattatacttgctgaactgaaattctgcaagataaaatagtccgttaattcattttcttccttttttcaacaatatttttctatatctgctcacgaccgtggctgaatgtaacaggatatttccgataaagataaaaactgaatatcacggtaatcgtttctgctgctaggaatgaccaccatattcctttcatgccgataaaatgagacaacatcatcataaaaggaagcaggagcaccagctggcgcaatatatttatcagcatactgaatcccactctttttgtggactgcataaatgatgcaatcatcgtggccgccgcggcaaacacatagcttgtacacataatctttaatgcaggtataccaaacgacatcatttcatctgatgcgttaaaaatccttaagatctgtcctggaaacatccagaagataacaatgctggcacctgtaagagccactcctatccctgtaccatatttgagagcctgataaagtctctgtttatttccggctccgtagttatagctcataataggaatacatccctgtaccaggccatttaaagtcatgattacgatctgctgcagtttaaaatatgccccaaaaaatgcaactgccgtagtagagtataatactaaaaacatattcgtaaagtacgtcataaatgcccctaaagcattcattataaaagatggaaacccaatcacaaaaatatctctgaagatcttaaaatcaatatggaaacctttgattttcatccttactttctgttttctaaataaaagtacatagaatgcaagaatcatagaaaacgtatatccgcatacggtcgatacagctgctccttcaactcccattttcggaaacccaaagtatccgaaaataagaatagggtccagtacaaaattcaacaccactcctgcaatttgaaaccacataggagcaatcatatttccggtaccctgaaggatcttttgaatacagatatgtaccatactggatacttccaaaaaagcacagactctcatatagcgaactgccagagcatagatttccggatcatctgtaaaagaagcaaaaaagggttctgtaatcagaagtataataaccgttacaatggctcccatgacagcagaaagtataatgccatttgtcaccacactgtcagctttatcctggttcttctgccccaggctgttggcaatcaatacattcacgcccacgccaatccaaatggacatagcaaccattaaggttgtgattggaaatgccagtgatacagccgtcagagctttctcaccaatccatgatacaaacatacagtctacaaaattatatgtatactgcatgaacatagaaataagcggcggaaccgccatagatacaattaaaggaaacattggccttgtctccatcttatttacaccactcataacctctccccctgtatgaatctttattccatagggaaaaccttcctatagaataaaaaatctggatatcataagatatccagactattttagagttgcgggggccggatttgaaccaacgaccttcgggttatgagcccgacgagctaccagactgctccaccccgcgatataaaagtaaaaaggcgccaaccagatttgaactggtgatcagggagttgcagtcccatgccttaccacttggctatggcgccatataatatagtatatgcagacgtatctaaattatgatacgaaaaaatgactccaacgggatttgaacccgtgttaccgccgtgaaagggcggtgtcttaaccacttgaccatggagccttgtttctctgaccgcttcacggcctttctttcactaacctcaagttctgccttccggctccctctcactcagtgttccgacctccccgagctgggctcgaaccagcgacaacacggttaacagccgtgcgctctacctactgagctatcgaggatcattctcttctattctctgccttttggctttcaaatattcaatataccttataacgcaaagcgtaccgtccgtaggacctaaaatacgggatgccctttgggtataccttcaaaactacatacagaacctttcatcaaacatcttccttaccttctttggttaaagcctcgaccgattagtaacagtcagctccatacgttgccgcacttccacctctgccctatctac

SEQ ID NO: 19 - DNA, 71492 bp, Anaerostipes rhamnosivorans
tgtatctgaaaacaagatcaggtcaataggaattttccttctatacataccaataatcattgcagtactattcgttcctccaccaaatgatacaatgttcatgtccttcctcctaaattctaattttcccactctttatgtagccactccattttgcaatcattacagcaatcatgattattactaccgtcatatttgcaatcagggttatatgtatatggacaggctatataatcggtaatcatgccgtattcgtccatatcgtctatcatttgctttatagcctcggcgtttatcatattgccctccttcctgcccgccgaagcgggctgtaaaacaggatgcctactggtttctaagtttctgtgtgatatatatagaccctacatgggtaaatacctacttcttttcaatctttaccccggtttcttcaaagattgtttgtattaggtcttctaatgaaacatagcccttttcaaagctgtcatatagctcaagaactgcatctgcaaacttttctattcgcttgcgtccaaacccaaactggtcatgcaatgccataaccgggatgcccagcatcaggataaaggccctttccattgcttctttggctacatcttctttcaatgtttttatctgctgcgtattcatgttataggtcggaacctttttcttaatcccagatttccttctttctgcccgattcatttacgcctccaatctatgtatgcacttccagaggtgggccggataacacgaagttcttttccatccacaaaacgtcgttttcttctgcttgcggcctttgatctctctgccctcgcttgttcttcctcccagtatagagaaatccagtttttgatcgttgaggcaggaataccatatttcttgcttattttcgctacatttgcctctccatgcagatacatttccagcactttctcttttatatcctctgagtatttgctactccacatttgcgctctccttaactatccggtatactgcggcctttctcccggttctgctatcctttttcttaccacagacctctactataccctcttgagtcatctctgtgaggcgtggggccgtctcgtccctggctggtgttagaacccgctttttccggtataacacctctgcgatctccctggcggttgctgggccataggaaagctgttccaggatcatctctctttttttatcccgctttacaagaccgtttgattcccgccgggtctgctttgtaatctggctgctccggtatgccgtagcgcaaccaaacatgtttaattgctccatggttgtcacctccctgctaccctgtgaagcatggcttcgtttttttctgccgctatcttctcacgcacactttcctctggaaacgcgatcagataagagacctctttcatccggttcgtgatccggtcatcatattcaagcttctctaacggatagttgctggtaaatattgttactctatggtccacataccgattgtttatgatctggtaaaacttgtcgttgatccatcctgctacttgttccgttccaaagtcgtcgatcacaaggatgtctgtctcctggagctggtcaagcagcttgctttcagaaagatcattgtcccggtcccaggtccgcttgatctcctgtataatttccgtggaaagagaaaacttcacctggtatcccatgtccactagctcatttgcgatgctggcagccatccgggttttcccgctgccctttgtgtcagagtagagatacaggcccatgccgtccttgtgctccgattcaaaacagctcatatactgctttatgtacttgcaggcggcccgaattgtagccttgctcttttcgtccttgtaggcagctatattaaagttctttaagcgcatatccttaaatgtcaccgggatgtttgcaaatctcagacggctttcttcgatctgcttcttccggcactcacactcggagaaatactcttttccgtcttctcggtgtctgatccatccggttccgccgcactgctgacatttagaatccgtcgaagtcgtccccgattccgaggtcgatgcctttcgtgacaaggtcatctgctgtattttgtccatcagcgtcatcactttctcccttctttggcagataatctaaaaatggtctggtagaactcagaaaggtagatgcatgttttatgaatcttgcctccgttttgttcctcttacactctgccgcataattctcacatgccgtgatcagttctctttctgcataaccttcgttcagtctcgcctgaaactttttatatgcattacccttatctactttgcgggggtaacttttccagaagtcgtcaaacgcacatgtatatttattattcttttctttctttccttctttactttctttagttgttgccctttgtttgtcctctgcctgcctttcgcctgcctcttgcttgccctttgcctggtacagatcatagttttttaccgtaaatacgctatatttgttggtacttttgattgccaactctccggtactctgcaacttttttattgctgttcttacttgcttcactgacagtccggtttccgtggaaagcacttggtaagatgcaaccctggaacccctctctatacagatcccctgccacttcttatccgtccagttcacggtcaagatcagatgcaggaacaggcggctggtacttatatcgctgtaccattcccactcggtaaattttcggtacaatttaataaatgtatcaatctctctcacctcacgtttcctggatcagtatttcaatcctcggctcctgcttatctatgtagaactcatcatcaaacccggagatatatttctgcccatcgtccggaaatattccggcagttaccagggagtccaagataaattttttagcaaaagctatattgtccgggtccctgcggcggttcttctcgtaccatttaaaagagatatggaccgggaaatttatctttttcccttttagtccccttgggatataggccatacatatcctctcattctctgccttagctttggctcctttatactgatttgttcggtttgcctttgtgtaatcgttcaggccgtctaaacggcctttgattgtcattctgtatgtcatagccatgacttgcctccaaactccctacggaagtcttcacgggttccgtagttcctttcgtaatatttctgtgcctgggcttttaaatggtcatccaatttctttaaactttctgaccatgtagctccggccccgtttggatgcaggtccgggcggagagggacaacaaaaccatattcctcagacagctttctgtttgcccctccaaagatgtggtggcgttccaccggggcggccccggtaaagtagcaatggtccatatcttctgtaaatacgcttttaagccttttcaaacttcatcccccacctttcttccatttcccgaatctcttccggtgattttgtctctatgcctagtgccttggcctcttccacggttccatctatcagccgggacatttcctttgtgttgtaggtgtgtgacccccgcatgaccagatttatacgaaagacctttcccttactatttatgtgtgtttctgttgtgggctgaagatgtgcaaactctacctcataagcatttatatcatcgtccagcggcagacttacaagattgccgcacagccgttcgtactcaccatattcagaaataagtcggtttttcatataaatattgctctgtccggtaatgtctgcaatctttccgacaagcacatggaaataagcatttgcgtcaagactccgcttttctcggtattgtacgatctttacagacagcttatctttgtcttttagacggtcatattctgcccgaacatcttcattcacttcaatctcgattttctggcggcctgacacatagtctattgccaggccgcctaattttccagtacattccatatgttacttccttttatgcacaatctgtataaactctttatgctggaactctgtcatatcctcaattcttgttaagttgaacctgtgaaaaacttctccttttaagtcaggatacttctcaaaaatcttctctaaagagttaatctttgtctggtcaattttctggttccctatctgttccgttttttggtcatctttttgtttttctgctctggatttcctctcattccgactttcatcggtatccgcatctttcatatcatcaatacagaaaaggccgtttaaggcgtattttcttgcatagctggatgccgttccggtaatctggctagcatccatgcctttcttacttccttcctccctggcaaatcctcttcctgcgacttcttcccctgtctccaggtcaatcaatctcggaatcgcaatgatgtagttttctcctgattccatgtgccttacatcatcttcgacatagagaacgcaattattttttattgccaatggcttcgccgcctccaaaatgtcttcacaacttctataatgatatttcccgaaagaattatattgattttttggtactttcagttcattttgtattgtggcaagcttctcataaatactcatgtcatgccctccttaaaaaatggatctcccggtttatatgctgctgtgtcatatcctcaatggattccatctcatcatcatcttcatagtgatgccatccctgttcccaccggtaaaaccagtccaggaaagcatcttccattaatgcgtctccggtttctacggcttctaaggcatactcaaaagcctgttcttcaggaactctttctccgttcttctcatagaatcccatgtttgccctccttttcaagaagagaaagcagtatatctctgcattttctaaacttttgctccgtttcccggttctctttcaacgataaattaaaacgaaaatcttcatccggtccgtgttcatctgtccatccatcgaaataaatagatatatataagcatgtcgtgtgcccgctaaaccaagcaaatgctgttggacctggtttttcgtctgccattcgttcctctatacgaccatcttctcctctctgcaactccatgcagagctgaataaggtataaatatttatcattcaccattttcaaaaacctccgtttgtgctacaatgcacatagacatgtattgttttgcccccgctggagttgccgctccgaaggggcttttttagtttctgcatctcattctcccttgacgatcttgatcgggtagcctagttctttttctacttcttcaagtgtcatttcttttggttcttcacgtttccataccaaggtaagatattcatccgtgaacaggtccctcatttttctccctgaagtcctgtagattttctggatatcatatttgcatactccgtcgttatcgagcaggtcgtcagtatattcttccagccccagagcgtttaagcacagacctccgttttcgcttaaaaatacatcgtttagatacaggtatttccctcccattcgaggttctacaacacttcctggctttataagatcctttgccaacggctcgaacatttcgtctgtccagcagtagcgcttgtcatcttcacaaatcgcatatttgcattcataaacatccgaaatagttactgtcttcccagccagcttgtgcatattgtctgtcacgtaatacccgccataagtgtcacaagttttgaaatccttacgcactttaaccttatctccaactttatatttcatcttccatcctcctaagttctatatgtttgattcccacgccattcctgccgcccagcaacacacagccaagccatcgtatccgctcagagccagcagacagccagcgaagttgattgctgttgccatgtagtgttctgctttacccatcgcatccctccttttccggttgatataagatccctgttacctcccataagagtttcggactaatgtaatagctcatctttccggttttctctgacggctttgcatacccgatgggcagccatccctgttcgatcccggcccgaataaatgtagcgtcctttttcattacttttgcaacgaacgcaacaggtacgttgcaggccgggaactctggcatgtttatataggatgtaagcagccgtaatgcttgtttattgctcacatttatcacctcatttctcttgtaaatatttccttttctccttataatttaagtacaggtgttgcagcaccgagtacataagaaaggagaacattatgactattgatgaattaatgaaggaaatagatagtaaagttgacactatgttttcagactattcattctacgatgcaatcaaaaacgattctgttaataaatgtaacgaatattgcaaatctaaaaacgaagagccaggttttaccttgttagtaaatttcatggatgaaaacgtcttgaaaacagctatttcaatttcaatgaaagaaacaatcaaactcttgtactctcaaaatctgttgcgagttgacgattaatttcttttatatcaacagatacgggattcacggaaaagtctttggttctgcattttctttcttcaatgcaaaattcaaacgattccgctttttttaatgaatctctaatttgacaagccgcactttcaatgatagctgttgacggtgtggctttttcgagttcattttcaagaattgaaaaatttaacctggcatttccaatgagatattcaagcacattgatattggtaatcctttcgtgtatatatacggtttcttctgacttgttaaattctctttctaccttccttagtgcgccagccaaagcctttttgacctcacaccctttttctgcatcctttatttgctgtatttcattttgtagattcatcttttatatcaccttcctttttatccggaacttctcctccaagtagccctaccattaagtagaaaacatttttctgctcaggaccgcttaaatacggggccatgatgcggatgttttctacgtcatcctctgtgagttccgggaatttatgtttgtttgtctgttccattttatcacctcctgattaatttgtaatctaataatataacattgttttcaaactgtcaagcaattttgattgcattgttatcaaaaatatgatatattattttcaggaggtgaaatgatgacccaagaacaagaaatgggggcacggttaacccgggttcgagaatacttcaaaatgaatcaaagagattttgcaaaaagaatggggattagccaaccaggattggccatgttcgaaaaaggagaccgggagttaaaggacattcacatcatgcggattcgagatgagtttggggtaaatgagatttggctccgaactggcgaaggcggagatgagaacatgtttaataagatctcccgagcggacaggttttccattaatttaggaaaattgagtattacagagaatgaatatgtagaaaatgcagttaactatatagcggagacagatccagaaaagttaaaagttgtagtagaagcaatgagaaagatactgggaatttaaaaaggccagcctttcggctagccttgggtgattacgatgagcattaagtacatccgccgcagtaaagcggtactgtctatattattaacaagctccgtaatcatttttatgtattcttctctctccatgttagttctcctttgtgatcgaacatctgtttgtattattatattacaaattgaggaaatttgcaatatagctttcgaacatttgttctattataatttttgttaccgaaattatgcagcaaagcagataccaaccggattgtaattatcaccttctttcttttcatatattgtatcacttttggcataatttgtactatattttatcattttaccataagttacataatatgtaaactgaaagaagtgcatacaaaaaggaccagacacaaaggtccggcccagtgcatctactctccgcaaactgttaccgaaagcaaagaaccataaagggttaaaagcaaatgcaaacacattatatcgcatttcatagtatttttgttggttatttttaaattaccaaaaattacatataaagaggagatagttgatttaagcaatgatgtaatatatttttttagcaaggagaaaagtatgggattatttggcaagaaaaaaataaaatgtgatatctgcggaaacgaaaaaaataaattttcttccttcaaagttgtaggtggaaatctttgcgatacatgttttaacaaattaagcaaggaaaaattcataaaaggatacacgctggagcaagcaaaaacggaactctctaagcaagaaaagcttgataataccgtcacaaaagaggaatccgctggaaatagtattttgggaggaattaaaaaaggaattaatgatgtttcgaggaacacctctcttaaggcaatgattgaaaaaggtgaaattatcaagctttccgaagaagatcgcatattctttcaaacacaaaataataaaactccagaagattacttttctgaatgggaagaaaagcaaaggattaaggctttgaagcatgcagaaacacagtataatatcgggggattagcttttagaaggtccgaaaacggatattattattttggtaatacttttattgaaaacgcagacccactgaaattgattgattttatttgggatggacctaattatgacattgtatcaaaaacaaccgggaaaaataaaactcaaggaagggccggcagtgccttggttggagctgttcttgcaggtccaacaggagctattatcgggggatctcgtggtaaaaagacaaaagttaacaccaaaactacttcaaagcagaaagagagagatacgaaagctattattgtatttaaatcagaagatacaggagaaatcattaaaaaagaaatcaaatgtaatacaagaattgcaaacgaaataagaaagctccctgatatattttaatcaaaaaaaccgcccggcggcaaccgggcggatccactaagaggaggggctatggatattacaaaaaaactattagataaatcaaaagaggcatttgtcatggctcttgaaatttataacaaaccaaccataaaatatcgaatcgaaggtttctcgttctttattataaatgcatgggaattaatgctaaaagcagaactgctaaatcgaaatgagtccatttattataaggacaatccagatagaaccatttctgtaaataccgtattatcaaagatttatactgataaaaatacacgaattagattaaatcttgaaaaaataattgaacttagaaatatcagtacccattatatcaccgaggattatgaagtaaaatatgcacctttatttcaagcttgtgtgctaaacttcgttaatgaaattcaacgttttcacaagattgatgtaaccaaaataatttctcaaaattttttaacaatatctgcaagttatgaacctcttacgaacgaacagataaaattaaaatatccacctgaaattgctgaaagatttataaaacaggcaaatgaaattgatgttttgagccacgaatataattctgataaattctcaattgatattagacaaaatctgtatatcactaagaaaaaagttgaatctgattttaaagtcagcgtcactagtgaatccgaaaatagagttacctttataaaggagttaaaagatccttcggatacgcacaaatataattacaatacagtaatcactgcagtatctgaacgattaaagaaaaaacatattgagttagattatccaaaaggatttaattcatatgtactgaatttgatcatagatttttacgatataaagagagaagaaaaatatgcctataaacacatcataggaaagcaagaacactatacctattcacaacaatttatagattttgtagtttctgaaatagaaaaacaaccatcaattttcgtagcgagtttaaaggcaaaaaaaacaagataaccccaggcacgtaggaatgctcagtacaaaaagtacctaccccattctgggacccagtgtttatccttcacaagttatcttgtttatactatactattttatatgatttttgtcaatttatgcactagtttttatacaatttctaaacaataaaaaaccgcccggcggcaaccggacggaaacagtatacgattgctggatagcccagaaatgatatacctaaactagacacttagattatatcattttcttccaacgtctggcaaggcgttatttttgtactcattttacgtaaggaggatgatgaaatggcactcataacttgcccggagtgtgccgggaaggtatctgatcgggctgacgcttgcccacactgcggatacccaatgaaagtacaaaaagtacaaaggaaaaagccaaaaccgaaccgcagacgtaagttaccaaacggcttcggcagcataacggaaatacgtcatacagatctgaaaaatcctttctatgcccgcgcaaactgtggaaaagacagatacaatagaccgattctaaagcctcttaagcctacggcttattttgcgacgtatgaggacgctatggaggctcttatacggtacaataagggtaaggtggatctatcaaaggatatgcctgtggaaatgctgtatcgagtctggtttgcagaatatgagcaggaggtggagcccgtaaccgcaagaggcgcaaagagcgcattttcttactgccgatccatctacaaaaagtccgtgcagtctctcaggatcacggacataaaaaattgtatagaaaatggcacggcgatagaaacacgaggaaaaaacaaaggaaaacttaaaaaggcatccgccaagacaaaaataggaatgaagtcaacattgagtatgatgctcgactatgcaaaagagctggagatcgtggacaggaattgcgccagggaatgtaatctgtccaagccaactgtgaaagatgcggcgaaagcagaaaacccgcacttttctttttctgctgctgagcgggtgacactgtggaaaaaccgggatgtggagaacgtagacctgctcctgattgcctgttattccggctggcggcctaacgaattatgtgagcttgctttagaggacgtggatctgggaaataaccgcatgaagggcggcagcaagacagacgcaggaatagacagatatgtcccgatccatccagagatcaaacctcttattgccgccaggtaccggcaagcacaggaacttggcagcgacaggctgattaacgtggagtctcgtggaaagatgcgtccaattacatacgcaatctattcaacccggttccataaaattattaaggatctggacctcaacctcggacaccgtccgcacgatactagggatacgttcgctaccgttgcgaaagaggccaacgtagacgaatacgctctgaaatatataatcgggcactccattacggacataactgagcggatctacacggaccggaaaccggagtggtattataaagagatgtgtaaaattgttgtcgacaaacactcgacaaattaaccgcttcgcaccgctttttgtggctatttaaaaacgcagaaacgaccattttaagccatttctgcgtgtctatatacactataacgtttttgttaatccaacgcttttaagccattcttctttttcattatagtcagttttcctgataaaatcaatgtttgttctcttttttcccaaccgattccgtttttttcaatttcaaagccaatcccccatccattggcttaatttggacgtctcctgagtctttttaatttttgcggttgggaaataatcattgctcactttgcctgcctctcttagaaaccattcaaccaaaagggcataaaaagacagctgcgcgattacagctgtctttctacaatcttcattaaatattcaatattttctttacttcttcttccatctgtgctgtctcacatacagtatcgtggaggatcggtgccgtcctgatctcctcgatggcgttcggcacggccactcctgaaattctatgtaattcatccaccagctcaaaatcagacttttcatcatatttgatatcaatggcgttcatcacacttcttgtgaacttgtatgggctggctgtagatgcgatcactgccggagtcttatcgccgctgtccttgacatacttgtcgtaggccacagaagccactgccgtatgtgtgtccaaaacatagttttgcgcatcgtaaacctgtttgatcttttccattgtctcttcttccgtagcataagctccaaagaattcagaaagctggtctctcatctcttttgtgatctcatatgcgccgtctgttgtcagtgcattcataaacttcgcacactggtcagcatcatttcctgtgatcctgtagatcatacgctctaagttgctggagatcagaatgtccatggacggagatgaagtcacaacgaattcacgctttctatcatattctcctgtctggaagaaatcaaataacactttattttcattggaagcacagacaaacttgccgattgggattcccatctgttttgcatagaaggccgccagaatattaccgaagtttccggtaggcacgaccacgttcattggctctcccgcttttacggtgcctttgctgaccagctctgcgtatgcttttacataatatacaatctgcggaaccagacgtccgatgttgatagagttcgctgatgagaactgatatccgttctcgtccataaccttcgaaagctccttattggaaaacatctttttaacccctgtctgggcatcatcaaaattgccgttgataccgatcacgaaggtattgtcccccttctgggtcagcatctgcttttcctggatcgggctcacaccggactttggatagaatacaatgatcttagttcccggcacatcggcaaatcccgccaacgctgcttttcctgtatcacctgaagttgcggtgaggatgacaatctcattttttacttcattcttttttgcagatgtcactaaaaggtgagggagaatggaaagtgccatgtctttaaatgcgatagtagaaccgtggaacagttcaagatagtaagcatctcctactttcaccagcggagcgatctcctttgtatcaaacttttcatcatatgcgttggcgatacatgcctttaactcttcttctgtaaaatccgtgaggaattccttcatcactgcatatgcgatctcctggtatgtcatctttgtcaggtcttccacagaaacctgaagcttcggaatggaatccggtacaaaaagccctccgtcgtttgtcaaacctttcagaatcgcttcggaagctgttgctgtctcttccctgtttcttgtactacgataaactaaattcataattacccgcctttttatctggttttatatcatcttcaaggccttgtaacggccccatttttctttggctatgattatagcatacttgtgatttgcggtctagcacgaaatcctgtacattatgccgctttctcgtattttctttccctttacctgtcactcttccatggcgtaggcaagcatcagtttcaccccgcttaaaagcgcgcgctcatccatatcgaatcggctgtgatgattcggaaattgatctttgccgccgcctacaaatgcaaatgcacccgagatcgtctttaaatagttggaatagtcttccccgagcatcatcggcggcacatggacaaattcatcctcggaaaataccttttctgccccctgtctggccctatttactgccgccagaccgtttaccagaggcgggtggctggaaggaggataatctacaaccgcctctccgcccaactgccccgcagtgcttcgggcgatctcaataacacgctctttgaccatctgctccgtttcctcagaaaatgtgcggaccgtcccttccagtctggcatggccggagatcacatttcttgctgttccagataccattttacccactgtgaccactgcggaatccaagggatccagattcctgctgactacggtctgcagattcatgatcgtggccgcagcgatcactgtggcatccgtacacaaatgtggcttgcccgcatggccggccctcccagtaatatcgatcgaaaaccagtctgttgccgccattctggggccggcctccacagagatctttcctgcctcaataccggaaaaaatatgaaggccgaagatctcatttacacagtccaacaagccggactccaacaccatattggctccctgggcagtctcctccgcaggctgaaaaaccaggaggatttttttctttaattccttttcatgctttttcagtatttgggcagcaccgaggagaaccgccatatgtccgtcatgaccacacgcatgcatgtatcccggactctcagacataaaaggacaccctgtctcctcttccacccgcagagcgtcaatatcagctctcagagctatgacccggctgccttccccgatctcggcgaccgcccctgtggggtttaaggatgtatacgggatgttcatctcctgcagctgtctctttatatatctggttgtcttttgttcctcaaaggccgtctccggatgcctgtgcagatcttgtctgtattgtacgatctgttccatagcagcattgacttcgcgaataatatccatagctgttccctaccgctttccaaacacatttttgataagataaattaaaagtagaatgaggatgagcggcccgataaaacggagtgctacagcaaatacactgccgaccaggacaaccacgatgatcagcgcagccaggcagcctattttggataaaaatgaatcaaaaacaaagactttcgatgaactctgttcttcacctgctggttcttcataggtatcctcatagtaaatctgctccccgcctttcgtttcaatgatcgatttagcaatcagcctggggcttcccagttcttctaagatttcccgctcagttctgcccgctgcttcctgacggctgaaataatccctgtaataagaaacagaatcctcaatctcactctccgctacctgtccctccagagtctcccggagttcctttaaaaactcatatttcgtcatcgcatgtctcctttggtatctttttctctctaaaatatcagtaaaagacctcagcctcactcaaaatgcggaactgaccgtccctgacttcagccgtactgatagaacaattcttaagcttcggtcctttccaaaagtccctgatctctctttgatacatattagtcagcatcccgtggatgaaagctccgtgggtaaataagatcacactttctgcttctttttccatcggaagtataaattcctctaaaaatatcctggatctttctactacctgagccggagtctccgctccttcaatataggccatctgttccggccggtcaaagaaatccagaatcggttcttctctttcatataattcattgatgtgtgccccttcataaggtccgaagttggcctccttaagccgttcatcctccagcagagggatccctctgccctccaggatgatctcccctgtttctctcgctctgctcagcgggctcgtgtaggccgcatcaaaatggaaatctttcagtgctctcctggtgagcctggctgcttccctgcccgcttcactcagatccacgtctgactgcccctgaatcctccgcactttattccatggagtttctccgtgcctcatcatatataacttcaataaaattcctcctcatctgttaccataccttatatccgtcaaaaactattttaacgtatttatcagctttgtaccatagtattttcaggacttttgtgacttcgctctatgagaaatatgtgcatttatatacagattattataaaatcataaaaaactatggcatttttatattattttgctatactaagtgtataaaatgatactaatcctgaatgatttggaatagagttagagaggacaacttatgaaaattgaaattggagacaaaatcacccttgcagaagaggtcactgacgaactgaccgccgcccgctggggaagcggaagccttccggtttatgctacacctgccatggtgcttctggtagaaaaagccgctgtaaagctgctggaaggaaagcttgatgacggcatgacaactgtcggcaccaacctgaacatttcccatgtttccgcaacacccgttggctgcaatgtcacctgccaatgccacctgacagagatcaaccgcaagaagctggagtttcaggttgagattatggatgacaaaggccgcgtcggtatcggtacccacgagcgctacatcgtagctgctgattcatttttagacaatgcaaagcaaaagctgaattaacataaataaatactatatgaaagaaaaactgccagtccctaactccagggctggcagtttttaatatcgtattttaatgttttcccttaaggatcggtgagatcctcttatagacaagaaatgtgatcacaacactgaacatacctttgacaaaggtgaacggcatattaaaccagatcaatgcatcccataagttcttgacattgtggttgatcgcctggtaagcaccgatgatcgcttccatcggcataaaattctcataaaccggatagacgataaaatagtttgagaagatactcacaaccgccatcatcacagctcctatgagagcaccgatcaaagcacctttctgtgacttatttcttttgtagatcaatcctgccggaagtacaaagcagactcccaggataaagttggaaagttcaccgattccgccggaagtggtgtgcagaacattgacaacatttttaataaagcagactgcgattcctgataccggccccatggaaaaggctgcgatcagggcaggaagctcggaaaagtccatcttaacaaatccaggcataataaacggcacgctgaattcaaaaaacattaaaatggtcgccaaagctcccagcattgcagttactgtgatctttcttacatttactttactcactgttacagtttcattcatcattttctttctcctccatttaacaatgcttttatgatacggaaaccttctgaatctatcccgtaaaataaaaaacgcccttgtcaccaaagacagggctacaccgaacgatacaataataccgtccttcgttacttcttccatccagactatactgttggtttgagattcacactcaatcggcctttcggttcgcggactcatctccccctaagtggagtatcaccgccagtcgagaattgacgcttcctgcgtctcactctgccctgaagttggagaatctaatattctctacttcgatatgcaattttagactatgtttattatagacaaatatttcccgtttgtaaagtgatcctaataacttttttctttcatctgctgttttcccttccccgctttacagcgctgcgataatttggtaaacttataacaattggccttttaggccatctacatacagattgaactataaaggagagataagcttatgggtatgcatagaatcaacaaaatgccgtctccggaagaactccagcaggaatttccgatgagcgatgaggcaaaacgcataaaaatagagagagataaagaaatacgaaaggttttcacaggggaatctgataaatttatcgtgatcatcgggccgtgttccgcagacaatgaggaagctgtcatggattatctgggccgccttgccggagtccagaaaaaagtagcggacaagcttctgatgatcccgaggatctatacaaacaaaccaaggacaaacggcgccggatataaaggcatgatccatcagcctgaccctgagaaggcaccggacatggctgccggcctccgctctgtgagaaaacttcacattgatgccctggaagccttccatatgccagctgccgatgaaatgctctacccaggaaactggccttacatggaagatatcttgtcctatgtagccgtaggtgcacgttctgtagaaaaccagcagcaccgtctgacagtcagcggatttgatatccctgccggaatgaaaaaccctaccggaggcgacctcaccgtcatgatgaactccatcgttgccggacagggcagccacaacttcattgcaaacggctacgaagtggaaacagacggaaaccctctgacccatgcgatccttcgcggttctgtcaacaaacacggaaacaatgtgcccaactaccattatgaggacctaacccgcgttgcctacatgtacgaaaagtttggccttgcaaatcctgcggtcatcgtggatgcgaaccactctaattcctcaaaacagtgggaccagcagccaaggatcgtccaggaagttctccacagcagaagcttcctgcctgagatcaagtctctcgtcaagggtatgatgatcgaaagctacattgaggacggaagccagccgatcggaaacggtgtctacggccagtccatcacagatccatgcctcggctgggaaaaaaccgaagaattactttacaatatggttgaacatgtttaagatagccggattgatataactttccaataagcatccgattaccagtaacaaaagttccagttggattgagaacttctttaagaaggaatgacctgtatcaaaggtcatttcttcttttttttcatccctgacatttctctgatacaaaaggtacatagaccccccgtagcagatatagtgtggaaacaggctcaagatcacaataaaaagcccggcgatccccaggttcaccacctgcagtgacaaaatagatcccagaaaaaaggaaaggcagaacagcccgccgtacaagagcaccactggttttaagataaatccgaccaaaaacaggatgccgtactgctttccccgcttaaacaaaatataggggagcaggctgctccctgatatgtacagacccttgcctcccagcacaagagaatccatctgccctccgtattccaggtagtctttatacaccgcattggtaaaaaggctcccgagcacaagccctgtcagcacaaatacgccaatgaaaaactttctccgctccattttgtctcctccctgatatcatttgccccaaaaaccatacccacagcctcgggtgggcgcgctttgcgcgttaaggtattagaaaaggagccacataaaattatatgtgctcctccgatgcattatgtatgattctttgggttgcaagtgttcaaggccttttcatattcaggtaagtcataatcccggagatggtttttgcgtcaacgatctctcctttaaaaatcatatccttcactttttccggtgtcatctcatacacatcaataaattcatcctcatccagattctgctccgtcttttgcagtccggttcccacaaagatcggaatcttctcatcacagaagccgattgccgtcacgatggttatgagatgttctatcttttctgccctgcatcctgtctcttcctcaatttcacgttttacacagtcgtaaccgctctcccccttttcgattcctcccgccggtatctcataggtcatagcatccagtgcgtttctgtactggcggaccagcaggatatttccctcctctgtcaccggaatgatagccgccgcccccggatgcttaaccagatcccaggtcaccgtattgccattcggcagggtgatgatgtcttcgtaaaagcctaccacctttccctggtgtacaaggttttgctttatcttcttataatcgttcattttgctcctttctttctgcaatataaaacggaccgtccctctgtatacagcgcgaaaacagcatcctgcctgcacggcagaatactgttacaattaactttcgtggagcagctccttttgaatcacatcaacctacattttatatgccttctgattagtgcaattcaaaagaacaacaggcgtcgttctacgatagttttcaccagttcacgaagcctcgcattttaagagtttaacgaaaatcatgtggaaaatggattccttttattttaacggttatactcttcgatcacacgctgtacaatagggctgtctggctccagaccggtatatttgcacaccgcctgcccgattcccagctccttgatctccttttggagcttctgtgcgttggcatccctcggctccgcatacttaaaaccggccgccatcccttttgcaatggcgtcaaagcagactccgtgtttcagacacagctgggctgcacctgtgagccggtctccttttgatagcttccggatcgggtcatatccaacacggtaaatagaatctggaagcacgccctgagccggagcaaaatacacaagattgtgcagttcttccggtgtaatcgggtattccttcatgacggcttccgtcagttcctcaacaacttctttgacaacctgcgcaatctcagggtcggcctctgactcaggaatcgtatgatatcccttaagataccccatatatgccagtgtagcatgaggcccattgaccgcaataactttgatgtcttttaacatctcgatcttgtctgtaagctccatccactccacgtcactgatatcattgtttaccggctgctggatcagaagagaattcaccgccaccgtgtcgatatgtacatcataattactgcttgcatccgtgcttcttcgtataatagaatcacggatcacaacattttggtcaaaccagtttcttgcatcctgggataagtctttcttgaaggcctccgtgattcccgggatcagatagtttttgtttgtaatgcagatcattgtcaatttgcgctccggatgcaccttaaaaaactcttcaaagcactttgccaaatactcggccgcttcctcaaaatcttccggatataatggcagaacgatcacatcggtctccaaaaaagcttccatacaagaatatgcttcatcacatgtaaacgcttgaaaatttttgaccgtacggttttgaatctcatccacacggtgcaccttcacgtagtagcatccgtgcttcaaaagttcctctgagaccctcggatccttatccagaaaggtaatattccaccctgcattgtcgaatgtctctcctacaaagccctttcccaaacgtccggctcccacaatcaatacatttttcattctttcctccaaatctgtcttctgcccacaggcagtttctatttactggtcagagtctgtgatcagataggtaatatctcccgtcttacatatcacatagtttgaaacagacccaatcttttcccttgtgacaagtgccgcggtctggtatgaaactgagagcattttctgttttagctggcattcctccatggaggaatgactgatgcccacctcattgctcatgcagtaaatccccataaaatataagtccgggtgcagggagtccagctgtttgatgacttcatatcccaaagtggccatggatgatttgtagaggttccctcccagagtgatcacgtctacattcggataatcccgcagaaggagaatgatcggaatgctgttggtaatgatcgtgcaacggatatgctggtccagctgcttgaccagctgataatttgtcgtgccgtcatcaatcaagaccacagatcccgctttgatcaattctgcgcctttcttagccagacgtattttctcctcctggttcaggtcgatcctcacgtcaaaatcttccttcaaaggcccgtttttgactgccccgctgtgaacctttttaagcagccccctctgatccagttctttgatatctctgcggatcgtatcctcggaaactcccagtctcacactcagttcgcttgcaattattttcttttccacggacagaatctctaaaatcttatcctgtctttccgccttaagcatcttcatcgcttcaccttctcctatatttgttgtctcattaatgacattataacgaatcctccgaaaaaggaaaagcaaaagcaggtactaaatgttctttaataactccatgatctcttttttattcttcgcatacctcatcttttctatgttttcctcctcggcacagatcaaagcaatgttgcttaacatattcaggtgagttccatccttgcccgcaatgccgatgacaacgtatgccgtattcccatccccaaaatcaactccttccggaatctggagaacagaaagccctgaggtgtagatctccggatctgacgattcgattccatgggggatcgccagatggtttccgatatagacagaaaatcttttctccctctccagcatgtgttctatatacttgggcgacgtatatccgttttcattgaggatctttcctgcataccggatcgcctcctctttatccttgaccttcacatttaaaacaatgttgtcctcagataagataggttttcctttttcttttccgtttctctcctcaatcacttccatcgcctggtcataatcagcctccttaaggaaatttttgatggcaagaaattctttaccctcattgtccacactgatcctggccctctcgatcaatccttccagcgtgataatcatatctgccgcagggtcaatctggctggctgatgaattctttactgtgatgtccttatatccttccttctgcagccggtttttcagcaccgacgcccccatggcgctggagcccatcccggaatcacaggcaacaataatatagcggattgctccccctatagagggtcttcggacacttgaccgctctttcggcctgttttccttttttcccatgttgacacctgccacggctagatctgcctcttcctccggggaacccacagtctttaaaataaacgaaccaatcagcagtgccacgacaaatccggcggtgatcgccaccacattcgccactgccgcatccttcggtgtcatgatcgcaatgttgatcaaactgcccggagacggcattcccacaagtcctccgcctaacacgaccaaaaggaacaaggatgtggcgagtccgcccatggtggcaaaaatcatgatgggatttgccagcacaaacggaaaataaacttctccgattcctgcaatccccgcgatgaacattgccataggagcggtctccttcgcttttccttttccgaatacagcgatggagcaaagagttcccagcagcggtccgcagtttgaatccaacagaaacataagggatttccccgcttcctgggcttgggcaaatgcgataggtgagataatcccgtggtttacagcgttatttaaaaacagcacctgggcagggcacatgaacactgccagcagagggatcagttttcttgtgatcaggaaattgattcctgctgttaaaaacgcaataattgcattcaccaccggcccgatgatcagatagccaaggatagccagtgcgaatccaaggatacctaggctgaagttatttatgagcatttcaaatcccggtttgatcttaccctccactgcccggtcaaatttctttaaaagccacgaggacagcggtcccatgatcatagctccactgaacatggtgatgtcagatcccacaatgacacccatggtcgtaaatgctccgatcacgcctcccctctggccatggatattatagcctgccgtatatccaatcaaaagcggcagcagataattcagtatcggccccaccatctcatttagtttctcattcggcatccatcctgtggggatgaacagggccgccagaagcccccaccccacaaatgcgcccaggttcggcatcaccatgccgctcatgtgtccgccaaatttacggatcctgtccagtacccctgcttttctttccatatcctatacctccgactctcattttcataggaacatgcattgatatatcttctctcattatggtgcttttaccgtgtggattttgccccgcttatgttgacggtagttccggatatgtagcttgcgcggtcagacattaagtaacagatcaggtcagcaacttcgtcaagttttcccggccttcccataggaatcacttttgcataatcggaggagatatggttcatatcctgtcctcttgtgtatgcaagcgcctcccatgccgtgtcattgttcatcggcgttctctcattaatggacggtgccactccgactacacggatattataaggccccagttcctttgcccatgacatggtataggaaagaaccgctccttttgtgccggaataacagctctggccttttgatccctgcattccagcctcagatgacatgttgacgatgacaccagatctttgcttcaccatgaagcgggcagccgcctgtgaacacaggaaaacacctttttggtttacgttgaccataaaatcgaaatcatcctccgtcatctcatattccgggcgctttccgtagaaatctaccagcagtcttggacggctgacccccgcattgttcagcagtccgtcgatttttccgtatttttttatgacctgctccatcatcgcatctacgctgtcttttttcgcaacgttgcattccacaaaaaggatgtgttcatcatctttaaacttgtcgttatttctcagatcggcaaccacaacgtctgcaccgttctttctgagtgtctccaccacgtgctctccgatcccctggcttcctccagtcacgaccattacttttccacttaagtccatccaattttccatgtccattcccctttcttttttgcattattctgctacttctttcagtctttgtgcatgtttttgcttgtttcttctgttatgagctaataataccagcatattcccgctttgtcaagcacatttcctgcatttatttgcatgtattatcaattaaatttgcatatatcaacatttattgcgcttttatgcattatttctgcgttttttatttttgaccatctttgcgcaccaaatgcgatttgacgcagtcaaatagtttcctcacgcatttgtgtgcataatgcccgcagggcttttttattctatagggaggttcgcagaactttcctatggaataaaataaagaactcctgctatggcatctaagcttcatagcaggagttctttctatgttaatcagccgactgagtcctggtcaggccgtcatcctggctgttcagcatgatggcctgaaaatacaagaacaaagtgggcaagcccacttcatctccccatcccctcactctttgaggggcttgacaagtttgggcgccaaatgcgatttgacgtggtcaaataatttcctcacgcatttgtgtgcataatgcccgtagggcttttttgttccatagggaggttctaagaactttcctatggaacaaaaaaagcagcagattgttatctgctgcttttatatgttggttatttcgcgtagtccacaacccgtgactcacggataatgttgactttaatttgtcccggataatccaaattgtcttctacctgtttggatatatctctggccagcaaaatcatatcatcgtcactgatctgctcaggaactaccattacacgaatctcccgacctgcctgtatcgcaaaagtcttatcaacaccctggaaggaatctgcgatctcttccagttgcttcagtctagtcgtatagctttccagtgtctcacttctcgctcccggtctcgctgcggaaatagcatccgccgcctggacaaggcatgcgatcagcgtctcaggctctgcatccccgtgatgtgactctactgcattgatgacgattggatgttccttatacttcttgcacaggttcaccccaagttccacatgagaaccttccacttcatggtcaatagcttttccaatgtcgtggagcagtcccgcacgcttcgccatccttacatcgaccccaatctcagatgccagcaacccggagagctgtgccacttccatggaatgcttcaatgcgttctggccgtagctggtgcggtacttcatcttgcccagcagacgcaccagttccggatgtatgccgtggactccaagttccagagtcgcagcctccccgtcttcccgcatctttgtctccacttcttttgtggctttctctaccatctcttcgatcctggccggatgaattcttccgtccacgatcaatttctccaatgcgatccttgcgatctctcttctgaccggattaaagcttgacaatacgactgcttccggagtgtcatcaataatcaactcaactcctgtcatattctcaagggcacggatattcctgccctcccggccgatgatacggcccttcatctcgtcattgggaagctgcacaagggagatcgttgtctcggctacatgatccaccgcacacttctgaatggctgtgaccacatattccttggctctctttctggcgtcttccttggctctggattccatctcttttacgagcattgctgtctcgtgctttacgtcttccttaactgctgataatagttgttcttttgcttgatcagaggtcagcccagaaattctttctaattcctgtaagtgtttggacttgagctcctgcacttttgccttgtctgcctcaaaattcttctccttggcagtcagagactgttctctgcgctccagcaaatctgccttcttgtcaaccgtttcttccttgttgagaacgcgcttttcgtacttctgcagttcacccctgcgttcctttgtttctttttcaaagtcatgtctcgcttttatagtttcttccttgatttcaagtgaagcttcccgcttcttagcatctgctgctttgatggcttcatctataatatctctggctttgctctcagcgtttccaatggttacttccatggccttcctgcttctttgattggcaacaaggacggaaattggcgctacaatgaccagagttgcgataatggcgataattatacttgccacaggcctcctccttattcaattttttgtgcataaaacacttctctaattttatatgtttttgcacaaaaagtcaagaaagcctaacactctggtttaattatcacagcctgatacggtggaatcagaagtcctcccccaaaatccacatcttctccggtcaaaaggtctgtcccttttcccgctcttgcgtcaaaatgcagcatataatcgtcaggtcccgcatttaacgccaaaatgagtctctcttctccggtttctctctcaaatgcgatgatatcctgttctgtacggatctcacggtaaccgccgctttttaatgcctcatgtgcgtcccttacctttgcaagttccgaaatataatcatagagatctccttcttccagatcttctgcttttactctcgggcgcagcgcgtcgtcactgtccggctccttgaagccctcgatcccccattcactgccatagtagacagacggaactccaggcatggcaaacatcagcgcatagatcagcggaagatgcttttcttctgaaagctgggtggcgatcctcatcacatcatggttatctacaaagctgtacagcggaagtccctggtacagtgcccatggatctggtccaaactgacggttcagtgaatatccgatctcatgcatgttgtgggtattaaaactagaatacaggcctttatagcactcataattggtagcggaatccagcatgtgatggttcaccagagtgctgtaatccccgtgaagcatttctccgatgaaaaccatctccggattcttatccctggcgaagtccaccagacatttcataaaggtccggttcagcatgtaggccacatccaggcggatcccatcaatttcaaactcatccatccacagggccacggcttccaaaaggtggtttctcacagcctcatgatccagatttaattttaccagctcaaaatggccttcccatccctcataccagaatccatcgccgtaattgctgttcccgtcaaagttaatgtaaaaccagtctttatattctgattcctgcttcttttctaagacatcctggaatgcccagaactctctgcccacatggttgaacacaccatccaggacaactttgatgccctgctcatggaaagcctggcacacttctttaaagtcctcgttagttccaagcctgtgatcgatcactttataatctttggtatcatatccatggctgctggactcaaataccggtgaaaaataaatggcgtttgctcccatacccttgatgtggggaatccattcctttacttccaggataccatgttccgtttcatcatccacaaaagctccaagcggaaaaatgtgataaaaaatcaggtccttcatagttaattctttcatagtcaatctcccttcctacctttggggtgtcattctgtgctctttaaagattctaccatgttgattttccgaagctggaaaaacatcataaaattaatcagtgccgcaaagccaatggtcagcaggacactgtacagataactgaccggcatgatcgttcttccgaacatgatcagatccacctccgccgtcagtatcacataccggtggagaagcaggcccaatcccgctcccacagctgtcccgatgacggttaacaaaatattttcccgatagacataggctgcggtctccagatcataaaatccaagtaccttgatggtggcaagttctgctttcctctccgcgatatttatgttgttcaagttatataatactacaaaagccagcagtccggcagaaataattaagacaaatacaacaatgttcagattattcagcatatcgttcatctctttttcaaaatcggagataaaggaaaccgatgcggccccatcctgtttcagcagttccctgccaagtgtggtctccagcttctctgacctgtttttattttttaacagaatctggttatactccggcgcctcgccgtaaagcttccggtacaggccctttgacatataaacattatggcgcatataattttctgtgatgtgttcgacttttgccctgactttttttgtctctccctccttgagggtcacagtatccccttctttgatacccagaaggctgcagactttctctgtcagaataataccattgtctgagagctcataagtctccccggatttgcggtctttgaaatgaatgtaggacgttatttccttgacattttccggcacagccagcgtcgctgacttgctttccccgtcaaattccacatccacagaagcattgtgaacttttgtgctgcttggtattgtatgctgtttttgtatccagaatgcaatttcctgctctttttttgctgaaaggtcctcttccagagtgacggacgcatcatacgtcatgatcttctgatactggttcttggaaatggcaaaaatagaatctttcagaccaaatcccacaagcagcagcgccatacatcctccgatcccaaaaacagtcatgaaaaaccgttttttataccggaacagattcctcaaagtcgacttccatgtaaaattcagatgcttccacagaataccgatccgctccagcaggatccttttgccctctttcggggcttccggccgcatcagctgggctggtttttccctgagctccttataacaggcaaacatagttgcgccaaacgtgatacagacagaggccgcggacgctgtcaatgcaaaccgtgtctcaaacggatgcttaacctgtccaatccccgtatacatcatggagtaggcctcaatgatgatcttgggcaggatcgtctctcccacaagcacccctacaatacttcctcctgctgtagccagaagggcatacatcccatatttcttcgccacatcaaagcctgtatatccaagagcctttaaaataccgatctgggttctctgctcctccaccattctggtcatggtcgtaaggctcacaagagccgccacgagaaagaaaatcaccggaaatacttctccgatagcaccgatcctttcggtgtcacctccatattctacatacgactggattttgttccggtccagcacataccatttgggctttttaatgtcctcgatatcctttttcgcatccattatcttctttttggccttggcaaacttccggtccgcttttttcttggaggaacggtactgtttcttccccttttcaagttctttttcagcgtcattaagctcagcctttgcctctttgatcttttgttctccactctggagttctttttcctttttcctaagcagtgaggcagagtttctcagcttctgcttattggcctttaactgttttttgcccttcgcaagctttcttctagccgcctttaaagaagtttgctgtctatccagttccttcccggcctgttcaaacttcttctgcatctccggcgggatctgccccatggcccccgcctgctgcatctgttgttttaactgctcttttgcctgtgagagttgtttttctgctttagaaagctgtttctcatttgccttgatctctttctcagccttggcaagctgttttctgccgtcgttatagctgttccatccctttttaatctgctttttaccgtcggaaattttagcttcctgggactttatctctttttttcccgaacttattttatcttcggcattgtcaagctttttcttcgccttggcaagctttttatctgcttttttcttctcctttttatatttattctcagcctttttaactttcttcctggcttcatttttgatctcttcttgtctggccttacagcgttccccggaaatatctttgatctttttttctactttctcaaccatatcgtcatactcgtcagtataggccgtttcctttgctgcaccttttacggacaggtataaatccgtatacacatccagcttgaagttctcctttggcaccacggcaaaaccgctgatctgcccatttccgatggttgccgttcccctgtctctggacagataataggatgaatccccgaccccgacaactttgagggttgattcttttaacgtgtccccaatatcatcatccgtcccggaggacagggtgatcgaatctcccactttgatatcggagtgttctacaacgtatgaatcaatcaaacactctccatttttctccggcatccggccttctgtgactttgatttggttgagctggtctgtggccgccataacctttaagaccttctctgtctcattgagcttacagatcgtatccacagaataactaggctccgccacagaaaccccggagatttctttgaccgcgcctacatccctgtccgtgatccccatggtgcccaggaccttaagatccatcagcctgctctcgtcaaactgtgcatctgccgtgagcttcatatccggctccgtgacccgcactccggaaaaaaatgcaactccaagggccacaataaaaaaaatcgacataaaccttggcagcgttttccggaccatcatgaaattatctttatgaagtgctttcttcatatgatccacctaccattctatcgtctctacagattggggctcctcattgatccgtatatcatgtacttttccgcttttaatctcgatcacacggtctgcaatcggtgaaatagccagattatgggtgatcacaatgaccgttttctttctctcacgacaggtatcctgcaaaagcttcagtatagactttccggtcttatagtccagcgcaccagtgggctcatcacatagtaaaagctttggattcttggccaatgccctggcaatggatactctctgctgttcccctcctgaaagctgggcagggaagtttgaaagcctttctgaaaggcccacatcggaaagaatctgttctgcatccaatggattcttgctgatttgaagagccagttctacattttccagtgccgtcagattcggcaccagattataaaactgaaacacaaaaccgatatcgttcctacggtattgtgtcagctgtctttttgaatattttgcaatatcattcccgtccaccaaaactgatcctgatgtgacggtatccatacctcccaaaatattcaggatcgttgttttccctgccccgctggccccgatgatgacgacaaactctccctcattaatggtaaaattaattccatccacagccttggtaatgacctgtcctgtctggtatatctttcttacttcttctaatcgaataaaatcatccatgcgttgtacccccgcgtttgttaaaagattttcttcattatctccagctggctctggaaaagcctccttccgacaatagagaaaaactatcacagatgataccttctgtcttttcggccagctcctccagaagatattttatctattttccacatgctcggagcgaggcattctgagagccgaacaaaaatcatacggaaaatatctcacttaaattttaacatatttgcacaagaaataataagtttttcttcattgtttccagtcggctctggaaaggcctccttccaacaatgaagaaaaactctcagaggtggcgccttttgtcttgtagcagcctgctccagcagacattacgtccattttcactagtacggaggcctcgcattcgaagggacgttagtttttcttcttgaagaaaagactcggaggcaaggaggttcgattcactaaattctcgcctcgcctctggctaacgttcattaagttccttcgaacgaccttctcactaagtttagcctgcactttgtttgtcttcactaagtgctctaggtcagcgtcagcgagttccgaacgggccgccggagaggctttgctgaaagttagaaaatcttacgtccctgagacagcaagccggagaactggtgaaaatgtaataccttatcgtgcggagcacgctcacccgaagggtatggaacacgggatgccctactgggcatactttatcgtgcgaagcacgtccacctgtagggtatggaatacgggatgaccttttgggtatacaaattaaaatagaaaaatccggtattgccggatttcgtagaattactatattgaaaatgtttcttactgtttattagataagagagtatttgtttatcctataaaggcttacgtttctgatagaattgaagtacaacttttgtttctgttaatctataaaccacgagttttctaaatcgtgggaagagttatttcaatacaactcttgttttggttaatccacaatgtacgttttatttctgtaatcgataatttatttcaatacaactcttgtttttgtttatcccaggaacagtatgtgggatcaggacagaacatgttatttcaatacaactcttgtttttgtttatcttttttaaaaggcttaggtctttcacaggaagtcatatttcaatacaactcttgtttttgtttatccgggaaggaaaaaaccgtaccatatggggactataatttcaatacaactcttgtttttgtttatcttaattgtgaatgtggtcggcagtggttacaagcatttcaatacaactcttgtttttgtttatcattttgggacatcgcaaaaacagagatggaaaatttatttcaatacaactcttgtttttgtttatccaacgcttttaagccattcttctttttcattatagccagttttcctgataaaatcaacgttctccatgatttttcccaaccgttttccatttttctgctttttctcagaatcagccttctatccgctattctaagcggttcttcagcttttttgcatattcagaggttgggaaactccgatgttatctgaactggtttgtttccgaatggtattcatatccgatcccagaaagttttgtactgatctcttccgggttctcgcagagacttttgcacagctcttcaaagctgtcataataatccctgagctgagtgttgatgtaacttaataaaataaccggatccttcggcaacatttctctgtcccctttctatgtctcgaccacaaaaaagcaatgttcttttccaaagtcataataaatcttatgtttttctatatgatgaatcatataaataagtccaaagccatgttccatcagatgcttctctatggctctccatatttctttgtcttcctttgtttccacaaggagcgtctcagtcccccgctccttgtcgcaataatacagcttaataaacagacacctccctatcttcttttccagaagaacgcataggaaaccaacacactgatggcaaagatcagtaagtccatgcccagcatatctttctttagcacagcggtataagcatcaaacagaactctcatggctatacacgcaaaaccgattcccatcaacagacggatccagtaatacctgatatgtccctgcatataacggaacatcaaaagcccatagattagatttggaaaaaccaccagcttataatgctccactactttctcgctgactggaaacagccaccagaaaaactccggccttccgatccagtcgtagataaaatgccacaggctgcccaccaccgcagtaaacaggattccaccgagaatgaattttttgtttcttgacattacaatccctcctttgggatagtatatgcactttttaccattgttatcctgtgacagcccgtcctgcaaacactgccaggacagacaatatcacgctcaatacaacataaaaaattccttctctcaatcttccctctgaaaccagtgtccctgtttcaagggcaaaggtagaaaatgtagtaaaacctccgcagagccctgtttttaaaaataggaccagatttggatttcctgtgggaactctccctgtccatccggcgatcatgccgatcacaagggctcccagcacattgatgcctaaagtaaccaccgggatcctaagctgggccgatataggaatcagtcccaaaaggtagcggaataccgcaccgagaaaacctcccagccctacaaatatacactggaccatgaattattctcccctgcactcttccgtggtcataagctcgccggtttcagtgttcatcacatacccatagatcttgatatcctccgggatcagcgggtgggtgctcaaaagctccacagtctcatccacggagtcagaaacacagtcaaagcctgccagccaggaatcaaaatcaatgccgcagtgacggataaagttaatcttgtcctcctcgataccccggtcgatcatatgctggatcatgccttcgctgttcatatgtccgacaccgcagtctgtatgtccgataaccacgatctcttcgatgcccagctcatagactgcgatcaaaagactcctaaccacacttccgaacaaatggcttgtgacccctcccgcatttttgatgatcttcacatcaccattttttaacccaagcgctgccggcagcagctctgtaagcctggtatccatacatgtcaaaattgcaatctttttatccggatatttgctcgtcttgtactgctcgtacattttatttttcacaaacaccttgttatactcgagaatatcttcaatcattttcttaccctttctatttctttactaagtcggcagtggtgcctttgcaggcccttaaataatcctcaggtttcagctccgcctgaataccgcgctttccgccgctgacaatcacagtttccaaatctttgacgctctcatccaccacggtctgatagtcctttttcatccctatggcggtgcagcctcctcttatgtatccggtgatcttgttgatatccttcacatggatcatctgcactgatttttcacccacagctctggccgcctttttaaggtccagctcctgggcaataggaatcacaaatacaaaataatctttgctctttccctccgtgaccaatgtcttgaatactttttcatggggctgtgaaagcatatccgcaatggctatgccgtcagtaaattccttgcactcatagcggtggatctcaaaagggatcttttcacgctccaggattctcatcgcatttgtctttggctctttttttgccatgtttcttcctcccaacatccagagaatgtatgttgttgtatattatagcacatttttttgtgaggacaatagaagaccaaaagagagttctccaggaataagaatcattactttgttgtaacaaagtattctatggaacaaaaaaacgtcccgcattgttgtgggacgttttacatctgccaaggaaggctgcatgcacagcaggatatgctgttttgtgttaaaacttaagcttctacaaatacatcttttccaagtccgcagatcgggcatacccaatcttccggaagatcttcaaaagcagttccaggtgcaattccctggcttggatctccttcttcaggatcgtattcataaccgcatggttcgcaaagatattttttcatttttggtacctccatatttacaatttatttatattatctttcatctgtgacgttagtataccaccatatccattattttttctgttgcatttgcaacatttctatgccatatttaaaaaaaggaggttttttatgacgtataataacaatccgctgtttaccgatatcacatccaaagactgcctgaaaatgctgtcctgctttcactctgaagaaaaaatattttcttccggcgaaaccatctatcatttttcatcacaaaaaccagtcatcggaattctgctccacggcgatgcctctgtgctccgctatgagttcaacggcagccggactatcttagaaaagctagagcccagcagtgtttttggagaaatcctggcattccactccgaagaatatgaagcgattcatcttcagtgtgacacgaactgcaaagtgctgatgatcgactatgattctctcatgaaaccctgcgccaatgcctgcgcctgccatacaaagctgatccagaatgtcacctggcttatttccaaaaagaccatgagcttaagccagagagtggaggtcttaagcaaacggtcgatccgtgaaaaactatactgttactttatgcaggaatccctgcggcagaagtcccatacgttccagatcccatttaccatgtcagatttggccgattatctgtcggtggaccggagtgccatgatgagagaactgaaaaaaatgaaagaagacggcatcctttcttctgaaaaaagaatgatccgtctcctctaattctatactggttttcattaaagttccagcgctgtttcatatgctttttttgtcttttcatcaaaacagacaaactcaatacactcaaaagcctggcttgtcttacagtactcttttactgttccaatagcgattgccgccgcttttgagagaggaaaccggaataatcccgtgctgatggacggaaatgtcacatgaccgcatccatgttcctctgccagcttaagacagctttgatagcagtcagctaacagctcttcttcacagtcatccccgccccgccagacaggcccgggcgtgtggatcacatactttgccggaaggttgtacgcttttgtgatcttggcatctcccgtatcacagccgcccaacgtgcggcattccgccatgagctccggccctgccgcctcatggatggcaccgtccactccgccgcctcccagcaatgtgggattggccgcattgacaatggcatccgccggaactttcgtaatgtcgccaagacttatctttatctccatgatcctattcctttctagcgcgcagacaacccatagagcattgctacataacaggcaaagtctccgatccgttttctctggtcccctaactgttttctccaggaaacatcaagccccctctgttccatcataccgctcagcagattcagcgtatgtatgacattatcgtgctttcttgtccttccatcattgtcgcgctgtccctttctgatctgcttccaatttgcccgcagatcagcataaaccgtcattgcgctcagagccagctcccagaattcctcaaactcttcatcatcctccggtgaatttgagaggattgcctcgtatatctccatcgcttcgtcaaacggaaggggattgggctgtgtcagatagttctcatacttcagatctttgttcataaaaaggctcctttcttggcatactatattactagtttaacgtgctttggaagctttgtaaatcaatttcaaacgttatttttcaacctcttttaactgttccagtattccttcctgcctctcgtcaaacagcaggcctttgttgtatttataataaggatcgcagccattttcccggataaaacgggcgctgtaaaagtttacgtttaattctgtgatgaatacgaccatctcctgtccctccccgaaagctgcctccatgaagtcaaatgcattgagaagcgcttctgagatatgctccacaagctgttctctgttttctgtctccgccttaaaccaggcccggactgccttttcctcgtcttccggcttttccttctttaattgtttaacgtacagttccagcttttctataacttgtttccaaatatgctcttcttcttttgaaatctgctccgctttctttctctcctgaaaagcgttctgtgcttttttcagagtctcttccagggaaccgttttccatgtaatccttcagccaggaaaacagctctcccacataggcatcggtttttgcatatttcacaaacaactcatttaatttgccatggagaagatgcacgatgctgagccgctcatcaaacggagcaaacttcaatttctccagcatatcttctgtaaaggaaccgttcaggatctcatcgatcttgtaatctttcttatatttcctgtaaagctccagataatttgcaaactcttttgcaatgcccatatgccggatatactggtagatcacatccctgtcaatggtctttccaaggctctcatatgccttgataaactcagacagatcttcccagcccctggccgtgacaaacgcttttccgtctacggtcgtctccattttataaaagtgattctgccggatctcaagatacgccaaaacagccgggtggatccctgccttatatgcatactctttccaaacatcatagttggcttccacgtcgatcatcttgatacggtccaaagttaccacatcaaactcccggacagatttattgtattcgggggggttgcctgccgccacgatgatccaactctccggcaccttctggtttccaaacgtcttacactgcagaaactgcagcatggtcggagccagcgtctcggatacgcagttgatctcgtcgataaataaaattccctcatgaaggcctgtctgctccattttttcatagacggatgcaatgatctcactcatggtgtactctgtcacagagtaggaaacaccgccgtaatccttttctttgataaacggaaggccgacggcgctctgcctcgtatggtgggtgatcgtgtatgccaccaagccgatctggcactcccttgcaatctgttccataatctgtgtctttccgatccccggaggtcccatcagaaggatcggccgctgtctgagggccggtatctgatattctccgaatccgtcttttgtcaagtatgcttccacagagtctttgatctcctgtttcgcacgtttaatgtccattttgttctccttctaactcatcttcacaaacaatcagtttcatcgcccaggcaggaacctgtgcgtcttcgtattcttcttccataaatataaaagcagtctcaaacggaggttttttcttaggatagattccctgtccgtctgtgaaatataagactccttttaaactgtaaaattctccttcttccataagtctgtaaatatattcaaaagcagggcggaagtccgttcctccttctcctttaagctccagatgttccatgtattctttcagttctttcttatcccggacttttctgtcttcctggatcttttcatcacactggataatatggatattcactttcttaagaaatgtctcctcttcttttaagatgccatatgtctcttctaaaaacttctttaccagttcaccagaacaggacatggaggtatctatgacaatggcaaattcctctaccttcttgacttctttccactcctggggctccaccagaggcatattgccatacatgcgcaggccataggtgtaaaacacatagtcaaaagaatcctcgtccacaccgatctcctccctgagcacggcaaacttctttaaaaactcccggtaatcataccgctcccgattctcgatctgcatctgtttgaccatatccccggcatccgcagacatctcctgggaaaaggtttccatatccaattccattttttcgctgatatcctgccactggttctggacctcctgctgcatcttcggctggtcttttgcaggccagaaatcgtggctgtccatgacaaactcttctgtgatccgccgcagttcttcttctgacaagtcccattccttaatccttttatagattccttctgccgtcagcaccttcaattcttttctaagccttttatagatatccttccggaatgcagtcccataaagagatacaactccagtcttccactgatcgatgactgactctgcagcgatatcacagcaaatatcccacagctctttctcccggtttttttgtccggtgagatgatggaacagacagtgcagaaccagatgaagatacatccggtttaccagcctgcggtctttttgaaacaattttgccagatatccgggctgaaaataaatagctctgccgtccgtggccattctttctgcttccggattggctatataaataaaactgctcaaggccaggtccataaatctcatatgaagataaagctcatctctggatgccataaggatctgctttcctgccccgatcaggatctcctctttttttaaatcttcctgcatagttctcctaactataattcaaatatttttttcttcggaggaaacaggcggagcttttcgttcatcaaataactcatacattccccatcctgtttgtcggctgactgttccatcgccgcctccatggccggctcactccaaagatttttctctgtcagaaaccgcagtgcctccaggtcatgtttttttacaaatcccacggcaatctcctgtgcgtgtttcttgatatatgccgtatactcgccgtttggtctgctgccaagcccgtatggatacctgagtctgctgactgcgatctcggatacaagttccggcctttcttctaccacagctgctgaaaacaactggtcatatgcctggtagtccacttcccgtctcataaagcattggcggtatttatagcctgacccattaaaatatttttcaatgatcctggccggtgtgttttcgaccgcttcttcataaaattcaggaaaaactagtttcgcagtctccacagaaccatcttccctccggtaatgcagagtagcaaacagctcataccgcacctccccgacaatctctttcagacaggagttcttcccatgctcacagaaaatttccacttggccaagtttacatccgttaaataccccggttccagtacctttcagcgcatctgaaaatgtcagcttcttgagccggctacatccataaaacgcatacttccctaattcctccatttgatttggaagctggacgctttctatcctgtttccacagagaagttcttttttatgggcaaatagggtatcgtcatctgtttcatatatttgtacatcttcctcttcttgttttttccactcggaaaatgcatagtcccctaagactttaaaaggctgtccgtccacttgatctggaagtgtcacaaaagcgtcatttccgtaacagcggataagcttaagaccctttttctctttctggtaatgaatggtcagtcccatttcaagtcgtatcctttccgttagttgcttctaataattacagtcctattatactacattggaaaaaaaagaaaacaaccttattctggtgaaaatctttgtgtaatttgaaataccttttctgcaaaaaaggcagccaattctcattctgaatcagctgcctgtgttttaaatttcttacttcctctttaaattcctgctctatatctgcaaaatgaaatagttcatattccccaaatgctgactgtaatccgtttataaagttaaataacctatatcatttaatttctatgcgatcagttagcacttaatttaatacttctccttgaaatcatcttcttttttgatacaactcttgttaatgtttatcacgggccgccagcagatgcattactcctagcttcatatttcaatacaactcttgttaatgtttatcctaacacattgttatcgttcggatattgtgttgaaaatttcaatacaactcttgttaatgttaatccaacgtttttccgtcattcttccttttcattatattcaattttcctgataaaatcaacgtttccttctatttttcccaaccgatctcaatttttcttactaccctctcagacagcccatatctggctattttccgtggtttcttcgcaagttttactttgtccggttgggaaaacttttgatttacttccaggtcaactcaacaaatacatcatagctgcacaaaccgccaatgtgatcagtcccgcacagatcgctaatgccaccttttgatacggcctcttgccagactccctgtacttttgaatttcatccaaatgatttccttccataaaggctgtaatttctttatatgtttgaatgtcatgcacctttttctgtttttcaatgctccaagcatagtacattgtaatcccaaacattacagcataaattgcgaccccgataaaatccaaataaagaaacaacggaacagctgatacgatcatcaccagaagcagcacggaatatacaatgctgtctcggttgagttttttaatatcctccattttaatttgttctttcatctcatccaaatctcctttcactaaagtatcaagagaaatgtcaaacacagaactaagcagcagcaaactatgtatatccggataattcttatcattctcccaattagaaatagtctgccttgtgacaaagaccttctctgccaattcatcctgagacagctttgcctcaagtctgtacttttttatctgcttactgaaatccattttgtcatacctcctgactgcattatattattagtggcttggattcgctatcaaaagtgttttacatggctgatatccgttatgtaaaacacttttgtcatgacattttccacatgatttccgttcggctcttagaatgcctcactccaatcatgtagaaaatggacgtaatgtttgctggagaaggttcctgtcaaacaaaagatgacattctgtgatagtttttctacattgtcggaaggaggcctttccagagccgactggagataatggaaaaaactatcgtaggtggcgacacattttatgtatcctgtgacaaaaacggttctgcgattttcatccattcgtctggcaggtaaactgccagatagccgtgtccatatctttctgcctcatagatctcgcaggacggcaccaattctttaaaacgcgccgccgatctttttacacatttcatctctttggatccataccaatacatgacctgcgcagtcacattttttatccggtcatcgatcttgtactgagccatataagtgcggtagatggtgaacatggtcttttttctgaaatgtggcatatctctcatataataatccgagatttcttttggcagagacattttaggcatacacttattcagaaatgccaactccagccggctggcggttttgctaaacagcatcggccagcaacatctcattacagcaatacagcactttgcaagtctgggctgaggaaggcagaggcttccgtctatgatggctttttgcgcaaagtccggcctctgggataatatttcgatgacgatctgccctcccagggatacccctccgatggcgtaaacgctgccgccccaatgttcgtcgatatatgtaatgattttctctgcacagtcttcggtggagatatactctgtgccatattcctctccatgtccgtccaaagtcggcaggatcacatgatactgcggggaaagcatccgtgcctgccttaaataatcccaccacgcctgtccccctccgtggatcagcacaacatgaggcagccctttttctccaaattcatgaaatttcatatccatcacctctttcgatatatgcttttccaatgagttatcaactctttaaagtctttttctacctgctcaaagtccagctgaccttcatgatatctgcggtataaataaccctcgcaggccagtgtgatctcctgaaccatcatctttacatcaatctcttcccggaaaagactgtgatccatggaatccaggaactcctgctgtcccatttgattttctttgtcaatgagcctgcttacatccttttgtacttcaggattttgttcataataggctttcagcgaaaataccgatatatacggatatttcactgaaagagaacattttgccttaagattgcgacaaagcatttcaaaaaagtcattggtttccaataccccgtattgtctggcggcctcttgtgtcagacacagggcattgctgaccagaaataaatataattcttttttgttggtaaaatagtaaaacaaaagagattttgatattcccgccgcatctgcgatggctgacatggatgcccttttatattcattttttgcaaacacccgataaccggcttctatcatccgttcccgcttatcctggggaagctggtaaaatttatccttcattcattttcctccattgaccgtttcgtccgacaaatccagcatatatccattgaccgatctttggaagacccttttaataatttggttcttttattctcacaagacggatatccgtacctttggtgatcctgcgaaccagtgattccactcccagtatttctgtgtttgtatggcttcccacaagcagattcattcccacatgctgtgcgtactgctgtgaatacaagacatattcgcctgtcacgtatgtatcgcatcccgcctctgccgcaatcctcatttcgttcgtcatattgcctccgcctgcagcgaccgctgctttcttcacaggctttttatggttttgataagagcggactttctcctgtaaaatctcctccagcctttttgtaaacaactcaaaactaacgggatctgagtcacctgcgaccccgccatagtacacttctgcatacggcatcacctttttaagattcttgattccaagagcctttgccagcgaagcacttgtgccaaactcagcgtcatccagcggtgcatgaaagtatgcatgggtaatcctgccgctgtccagcagatcattacagcattctttcaggccgtaaataaattcccaggaatcgtgatgggtgatcagaaaatccacatcctcccgactggccttttctatgatctcctgagtaaggtttgtggcatatccaatacacttgatatccctgtcaatttcattataaaatccccactcctgaggaaacatctctaatttcgattcatcaaacatttctatcatgattgcttttagttcactgtacttcatcagggtctcctttttgactgttttttgattttcattatataataaaaacaaatgaactgccagttgctgatcttttcctaaatattctggaaaaacggacgtaacgtctgccgaagaaggggctctgccaaaaaaggtaatctaacaaaagaattatgacaaatgcaacatacttgaaacggtctcaaaaaaactgacggtccggtttttgaatcaatcaaaaccagaccgtcagacatttcttaagttatttatttgttcattttatattcttctacttttttagtctcagtatttttcttatagatttttccgttgtttttatcaacgtagaaatctccgtatttttttccggaatctttggatgtgtcataaatctcaaaatgatatccttttgcaccgcttctgtattcggaaacatctttatctttatttctcacttcgtactgtccgtctccgtcagatccgagtttattaatcagatagtcatgggcatcgtcgtaattgtcaaaaccattggctacatcatctgccaggtcttttgcgccatcagccacatcatcagctgcgtcttccacatcatctcccaggtcattgtttgttgctgttgtagaagcgccttctcctgtagtctctgtggttgttgcatcattcttgtttgagcatcctgtaaacattgcagcaacacttaatgtgagaactgcaaccattgtaagcatccaacatttctttttcattatgaactctccttttcctttggaataattatttgataccactagtgtttccaatgaaaaggaaaatataccttaacaaaattttgtaaaatttataaataatcttatgcctgccgtttacaatgtttgcaatcctacaatagtttatgtccattattagagtgaggcctttccagtgccgactggagataatggacaaaaactcttaatcaaatattttatttgcattcaatatatttttggggtccaatgaaagtttcacctgcttcatcatctgaagatttaaaggatccgtcgcttttttcagatacttctttttgctgagaccgataccgtgctcgccggatgtcagaccgcccagttcactgctcttatcataggcaaaagcaagcacctttctgcggtcttcctcccactgctcctgtgtgcggcttccccggaccacgcacagatggacgttgccgtcccccgcatggccaaagctgaccatctgcactccagtttcctgctccagccggttgatatattcaataaattctgctgatttattaatagggactacaatatccaccggttcctgctctgattttgcctcaacggccttcacaagagcacctcggatcttccacactgcgtcaatcgtcttctggtcctcaagcagaagcacatccttggcaccgctctcttctgccactgccttaagcttctccacccgcttatagatctcttccgtatcatccccgtcaaatgtcagaagaatataagcctgtgcatctttataagggaaggaaaggccgacatactcttctcccagattgaccacctttttttccacaaattcaatcgccgtagggtcaagatttccccggatcacgtttaagacggcccggatgcctgtatgtaaatcatcaaatggaagcaggacactcagtgatgtctgaggcttcaccgtaagttttacaatggccttcgtgatgatccccagggttccctcggaaccaatcatcagatgcttcaaagacaacccagagctatcctttactacctttccacccagttcagccacgctgccatcagcaagaaccacttccagcccacgcacataatctctcgtgacaccgtatttcacagcgcgcatgccgcctgcgttggtgctgatgtttcctccaatggtggcagtcttctcccctggatccggcggatagaacaaaccctcggattccactaatttctgaaaatcctccagcacgacgcctggctcgacggttgccgtaaaagtctccttgtcgatctccagcacccggttcatccgggacagatccagaacgatccctccgtctgccggaaccgtggagcctaccaggttggtccctgcacctctgggagtcacagggattccgtgttcaaacgcatatttcataatatcgctgacctctttggttgactcaggaaaaacaagagcttctgcccttcctctcagtctgcccagagtgtccgataaatatttctcttctatattactgtcaaagatgacccgctcactgtcgggtatcacacaattcagtccgtccaaagttatcacctaccgtttcgtaaattttaacgccaccttatctccaagccactgtccaagctggacaatgatgatcaacacgattaccgtaaaggtcaggactccagtctcataacggttatagccgtaccggatagccaggtcaccgatcccgcctcctccgacacttcctgccatggcagagtatccgatgatgctgacaaaagtcacagtcagcccgcggatcaggcttggaagagcttccacaaataaaactttccggataatcagccacacactcgcccctgtagccacggctgcctccacaactcccttgtctacttcgctgaaagagccttccacaagtcttgcataaaatgcaacggacgcaatagacaaaggtactgccgctgccgttgcgccgatgctggttcccaccaagatcctggtcagcgggagcagcactacaagaaggatgataaacggcatggaacggataatattaacgatggtgccggctatagcattgacagtccggttttgataaaacaagggatttgcggtcaaatgcagcaccagaccgatcagcataccaaataccacggctgccagcatcgcgatcaggaccatctggatggtctctatggttgcgtttccaaattccaacttaatgatctccattgtttccttcatcttatcgtcctccctctatctcttctaagcggtaaacattttctctcatataatgaagggctttttttcgctcgtccttttttcctctcaggatcacgattaacacgcccagcggttttttatgaatatagtcaatctttccattgatgatgtcaatcacaacatcatattgtttggaaacctggctgatgacagatgcataggctttttcacctgtgtagcagagcttcaccaattcttcatcctctgagagcttcacctcttccgggacatgtacattgagtaccctctccacaagactcctggtgatctcttctctaggctccgcaaatgctgaataaatgtcacgaacctctttgatctcaccattttccataaatgcgatcctgtcaaacagctttttggcaacttccatttcatgtgtgatgaacacaatggtaatattgtatttttcattgatctctttcagaagtgccacaatctcttctgtgttttccagatccagtgcggacgtagcctcatcacaaagcagaatcttcggatcattggccagcgctcttgcgatcgccactctctgtttctgcccgccgcttaagtttgccggataggaatctgccttttctggaagatgtaccatctcgagaagctctctgacccttgcctggatcttgtcttttggataatggttggcatgaagggcaaacgccacattctcggcgatggtagaaccgctgatcaaattaaagtgctggaagatcattccgatgtccagccggaccttactcagttcttttctttttaaagaagtgatctcgttcccctcgatcagcacctggccgcttgtaggcggctgaagaaggttgatcactctgaccagtgtactctttcctgcaccgctgggccctacgataccaaagatctctcccttctcaatggtcaggtttacattcttaaccgcctgaaaatcctgcttattctgctgaaatgttactccaatattctttaattcaatcacagtctctcacctttctcttttcgtttatttttctccgtatttttctgtccaccagtccggtttctggaaggaacggaagctgcttttttgatctgccactgcttgataaaactcctcagactccactgcttctttcaggtctttgccaaggcggcctttcacgtcctcagtttttactgcaataacatttttgtattgttctgccagcttttccacagccaatgccttggaaaaatccaggtcagcggcatatgcatagttcccaggcaccactcctatggcaaggctgtccagactcctggaaatctgagccgcgtccagtgtaacaaactttaaattctttggattttgggctatgtctttttctgaagctttggtctgatcgattcctttttttaaagtaataactttttcctggctcaaaattcccagtgctctggccagattggaaggatcattaggaatcccgaccttgtctcccttttttaattctttcagggatttcaagctgtctgaaaatattccggctccagctgtgggaacagcaatcactttgctgatctttaaattgttgtcagccgcaaatttctctaaatacgcagtgtgctgcattaagttcgcatcaatctctccgttagccagagcctggtccggaaggacatagtcgctgaattccctgacggacacatggtatccctttttctccaatgaaggagcaatagctttctttaccatgtctccatacggtcctgcgcagacaccgatggtaatatcctttgcggcgctggtatttttacttccgcatccagtcaatgcacttaatgccaatactccaatcataacgattcctgtcaactttttcaacgattttttcataatacgttcctccatttttatgtaaataacatttccttttctcaatatgaaatccccatcagcaaatattcagaagatctgcggccgttcagacttcctaaaaaaattacaaggacaaaattcaagaacaaagtgggcaagcccacttcatctccccaacccctcactctttgaggggcttggcaactttgcgcgccaaatgcgatttgacgtagtcaaatagtttcctcacgcatttgtgtgcatagtgcccgcagggcttttttgttccatagggaggtttgcagaactttcctatggaacaaaaaaaagaagaccatgcatggtctcctctatcactgatccgttatgcttttttatcggcatttaagaaatatccatacaaatatgatgttccggtatttgattgtacgcaaaagaactgcacatgctctgcatctgcatttccatacccatcatatccatcatgagattttcatatgtcttgataaaattcatagcggtaactccttgttttaatttcctatcttgcttctaggttatttgaaatattacacggtattattgtatttgtcaatacacttttttaagattctggcccctgtctgccgaacgaaccgatctcgatcaggtttccttccggatctgccacatagcttgtccgctgtccccaaggttcggtcaccggcgaaagaaccggctttgctcccgcctccaccactcttttaaattctgtgtccacatcctcaaaaacgggcacgtcaaaagccagttccaccgttccgttcattccggcaggatagctgtatgtgcgggaagtcatatcctcaaaatcattccgcccgaacatgatcaaacgcatatctcccgaagaaagctctgcattgggacttgcgtcccagtctgtgtccatccccataacgtccctgtaaaaagaaaccattttctccatatcagtgacaaacaatcctgcagctgtcatttttagcatctctgttcctcctttatttctgaatattctcagtatatcagcaggaaccggacatctgtatgtcatgttcttttgtatttatttaagtttttctctagatcagccacaagatcgtccaccagggactttggctccataacagtcacccggctcccaaagcttaagacccactgcttcatgttgtcataactcacaaaatcccattcaaagaccaggtttccctgatcatcctgtgaaaaacagtccactccatattcctccacaaggcggtacttaacttcctgttcaaaaaccgcttttaaccggactgcatcctgtctgaagtattcctgaaaatccctctttgtctcacccggttccctcacctgatagctttcccgtgtctccttaagctcccacagcctgttcagtttaaacatccggaaatccttcctctttctgcaatatccatacacataccaggaggaccactgaaacaaaagcaaatacggctcgatctcccgatattcctcccccttgctgtaataataacaaaaggtgacggtatgctgtctggaaactgcctgcttgatgagttctatcttttcttttaaggattcctcatagtgggaggccagatcaatgagaacagctccctctgacaaaacggtgtcctccgcatgtacagacagtttctccatgagcctcagagtgaccgacgtcctggaaacactgtcaattccctgaagtccatctaaaaccgccctcagttcgtctttcgtgagtacggtgctgtccagcttataaccttccgcaatacggatccctcctccgtagccctgttcagtgatcaagggaatgcctgcctggcagatggcatcgatgtccctgccgatggtccttctggatacttcaaatctctcagccagttcaggtgccgtgactctgtcatttctgagcagcagcgtgataatcccgatcagacggtcaattttcatatgaatacctcccaagtattatgataaaaacaaagtggcaagcccacttcaacaccccaaccccttacgcatttgtgtgcataatgcccgcagggcttttttattctatagggaggttcgcagaactttcctatagaatggaaaaaactccgtttcaaaagaaacggagtcctacgatgagcgtgcggggattcgaaccccggacaacttgattaaaagtcaagtgctctaccacctgagctacacaccctgattatgtgattgtaaaaatcctgatgaaacaggactcaaaactgggctagctggattcgaaccagcggatgcaggagtcagaatcctgtgccttaccacttggcgatagcccaacagctttatcaatatatcacagcaaaaatcttatgtcaacaacttttttacttttctggcaaaatatatgaaatagatctttaccctgatcttcctcatacggaactgagcgtgcggggattcgaaccccggacaacttgattaaaagtcaagtgctctaccacctgagctacacacccatataaaaatgtcataatgatttcagaaggttccgccttaagcggaacctaactgggctagctggattcgaaccagcggatgcaggagtcagaatcctgtgccttaccacttggcgatagcccaacagctttattaatataccacggaatttcgacaagtgcaatggttttttttaaattttttcaaaaacaaaccgtatttctccataatctccatccggctttggaaagagctcataccggttattttattctatttttattttactatacaagtaatttacagtagttaaatagttcccttacacatttgtgtgcatcaccccggtagggttttcttttgaaattggaaagaaatgcagtaaaacccgttctttttgtttcacaacatttctttcctaaatggtttattttacagttacactgaccttcgcatactttccattttcactaatgacataaatcgttgccttgccggccttcttcgctctgatctttcctttcttgctcaccgtggcaacagaactctttgaggtaacatagcgaatttttgcaccgtggtctttgggctgtttctttccatttggaacacggacctttgctttgatagcctccgtcttgcctttcttaagcttaactgatttcttctttacagagacagaggaagcatttgcataccttgaggtagccctcatcaatacatgcactgtattggattttccaatattctttttctttccattgatcttcttatacggtcttacataaaacttataaggagcatttgatttaagcttccgttttccaatcttcgtgatgacagcctttgtccccttcttcactgtctttatgtatttcggtgaggattttttcccgcactgattaccatagattcggtatccgtctgcgcctttcgtcttggtccatgacacttgtacctttctagagttcttcgctgttccagtcgctataatcactttctttgtagtatctgcccctgcaagagtgatttcacgtgtttttgcacccggagccagattagtagtattggtaccggctgtaggatactgcactttcaccttgaattttccgccctgtccgtatgcttgggataatgctatataatctgtatccaccttaccccattttacatccttactgtttttcttattgacatattttgcatagacggtaaaatctgactttttaatgatctgatttttcttataattcttggtgttctttacataaatctgttttaaaacatactcactggctgaagaaccatgatataaaagaatcggctgtcctgcaactcctccgttgttgcatccataccgggaatactttccgtcttttgtgttgatgttgtttcccgtgaaggtctcattgtacgcaatcgttccatcacagctgtcaaacagctttacaaattccggattatctttgctcatcagggcaaaataagtatcccctttctgcagcttattataactgttatcgggagtattgtaccatgtaggactggtaaccttatccccaagcttcactggaagcaggctggaacttactgttacccatgtgttctgtttcagcaccctcttgtagtctggcttttgcggcccataaccgtctgcaagcctcagtgcatagtaagtgtttcctttcctaagctgccctgccgattttacataagagcctaccttgatcatcctggcaccttttgcatcgttcacagtgatcgtttcattggctttgccatccatgttggcatccacttttttactggaagccgcggataccgatgccgtcattccccccaaagttgcaaacgccatggctgctgataaggccaacgccataccctttgccacgaacgaactgctctctttcctcatactgattcctccttattatgaaattttattccgacaaattcaacggataaataccttcacggaacgaaaccttttgtcagacagagtgataaaatggatgtaatatctgtcaaagaaggttcttttccagacaaaacgcatccactccgtgaaagctttattttattctagcacaagaaacttcaagaaatattgactcggagatctgttgttatttgttgttgattggctttctgcatctgaacaaaaaaataaagccggactattgtatagtccaactttaaattctcaagctttgctggtcctcaccagccaaatatcttacatattacaggatgcgacgatcttataattatctggaatattgtacttgttctccacaggtaccaggttccagttgatctcacataaggtctctctcatcacctttttgcagtacagcataacgatacctgcatcaatctgttcttcataaagattggtttcctcatcatccctgactgtcaggatcagaagtccgccgtcgatgataaatctccaaggctgccgatttaaagtggatggagccattctcgcatagttcaacggctcataaacagctctgttcaccagttcatccaccgaagctttgttgccccaagtatcaagataaacaatctcctccaaaggcatcctcggtgaagtcacactgtcttttacctggaaatcagcgtttgcataacctttccccaagctgacattccctgtaacctttttaaaccgtttctttccatatcccaacgccatgatcgccaccacttctttatcagtgacaatgtttagtttttcaataacggtacggctgtctttaaacgtgatccagcaggaatctactcccagggaatgagccttgatagaaatggattcacctacatatcctccgttttcaatatagtggtcttttttctcagacaaaacaatcatataatgcggagcattaatcaaaatacccttatatccagcatatccgtccaactggcggtaaacagtgtcgttatccataaaccggatatcaatcccaatgctgtcatccaggcgctcacaagactgtgcaaaatcccggatcttcttaaccgtagcggcatcaacttccttctctttatagtctctcacggagtttttgctttcaattaaatctttatattccatcgtcatataacctcccaatatctagcctaaacaataaccaaactgctctttatattataccttatcgcgcgaagcgcgtctacccgaagggtataaaatacgggatgccctgtgggtataccttatcgcgcgaagcgcgtctacccggagggtgtaaaatacgggatgccctgtgggtatgagttattcaccactatttccgtcgcgcttttgaaatgcgctcctccaatagtggtgaataactttcgaaaagtggctccgttttgacagaagcccttctccagcagacattacgtccattttctacatgattggagtgaggcattctaagagccgaacggaaatcatgtggaaaatggacgtaacatctactagataaaaaatgaactgatattaccatacgatagttatttagcactgtcggaggagtgcatttcaaagcacgacggagatagtggtaaataactatcgccgcgcgtctacccggagaaaagaggcagatggttttccacctgcctcttgattctattcctccagataggattctatgacttttacagctttgtcgatcccggtccttccggtattgataaccagctcataattgctcgggtggccccacttgatctttgtgtagtagttatggtaagaagctctttccttgtccacctttttcatcatacgttttgcttccctttcggagacattctccgtatccatgattcgtttaatccgcacagattcagagctgtggatgaagaaagaatggctgcccggaagtttctgcaggataacgtccgcgcaccgccccacaaagatacaggacttctcctgctccgcgatctggcggatggcgatggactggatcacaaacagtttttccggtgtcaggatgcactcatccatcggcgttgtagccggatgtccgatgggcactccaaaaatataggcgtaatcccctgactcttctctctgggtcacgtattcttccgacacatctgccatcttcgccactctggcgatcagttccttgtcaaacagcttgatacccagatcctctgagagcttctccgcaatctcgtggcctccgctcccatattctctggaaatgcatataatcgtgttcggtctcatagcacctctcctttccatgcgaaaaccactctatcggtctacataatatgtaatgagatccaccgcattttccatgcccagttttccaatgttgagaaccatgtgatagttgctcggatggccccatttcactttcgtataataattgtggtaggaagccctttccctatcagttttcttgatcagcttcctagcctccttctcggtgatctgtctgagatccatgatcctctggaccctgtcatcaagagggctgtgcacaaagacagagatacattctgcctggttctgcaaaataacatccgcgcatcgtcccacaaaaatgcaggagccttcatcctttgccatctgccggatggcgatggactggagggcaaataatttctcagaagtcaccacaaagtcacgggtgatatccgtagccacatgccctgacggcatcacaccaaggaaaccccgaaagtccctcacttctccctgttcttccacaaaatcttcgggtacattgcccatctgggccacctttgtaatgatctcgctgtcgaacagcttaatacccagccgcttagacaggcgctctcccagttcatggcctccacttccgaattccctggaaatacatatgatcctgttctctttcataaacatcactcctttgctcataaacagcgattgctaacctcatggataaacccttccctctgcctccgaaacggaggtatgtctatgcctgcaaaagatgtcatacggctgataagaccgatcgatatcttatttttattataccatgatacggagcaaaaaacataaaaatgcatgagattgttcctctatcaaaacaatctcatgcatttttttatttatacgagagcaatccgataagtctgcagccagtagttgacctggagcataaaggccaccatctgcggtccggccatcagctgtccgtaccatggttttccgtagtctgaaggactttttaaaaactcttccgttttcttcttgtcgatcaaatctctgatcggtgcatttggatcggcgatcacttcccttaaccgatctcccagcattttttcatactcaggatggtaagtcttcggatacgggcttttccttcggtacaaaacctcattaggaaggtctccttccccggaagctctcaaaaggcctttgaccatgccgcccggacatttcatttcccaaggcacattccacatgtattcaacgatcctgtggtcggcaaatggtactctggcctccagaccggaatacatgctggtccggtccatccggtctaagagggtcaccataaaccatttcagattcaggtaagagatctccctccttctgctctctgtgggatcctcccctaaaagcctcggagtttctccgatggtcttttcgtaggctctcctggaatggttttcaatatctgccacctggagcacatcatcgcttaagagggcttttcttggttccatatccatggaccatggaaacgcatgggcctcaaagcactcttttttatggaaccacggatatcctccgaagatctcgtcggcacattctcccgtcagagtaaccttttttgtctcggcaactttggaacagaaatagagaagagaagactccacatccgccatacacggcaggtctcttgcatccacggcccggtacaagttttcaatctgctgctcgttattgcattccaggtacgtgtgatttgttccggccgcctccaccatccggtctacccacggtctgtcctgggatggctggaaggagttggccttgaaatattggtcattgttcacaaaatcaaaagaaaaggtatttagctgttttccctgtttacccagttctttggcgcatatggccgtcacaaggctgctgtccacacctccggatagaaaagtacagattggaatatctgagagcatctgcatcttaaccgcatcgtgtaccaggtaggacagcttctctacggtctggtcgtaagactcctcatggggcctgctctcaagctgccaataggtgtgatctttcagtccgtccatactgtactcaagaaaatggcccggcagtacttccgaaatgcctttgaatactccctttccataggatttcgccggtcctaggccaaagatctccccgagtccgtccctgtcaatgactggctcaatgcctgggtactgaaaaatgcccttgatctcagatgaaaataccaatgtctgccccgcaaaagaataaaacagaggcttcacacccagccggtctctgaacaaaaacagtttcttttccgcggaatcccagatactgatcgcaaagatgccgttcagcttctctacaaaagcaggaccgtggaggatgtatccagccagaatcacttccgtgtcactggttgtcttaaagattgccccctcgtttttcaactcctgttttaattccttcatgttgtaaatctcaccattatatacaatgacaaacttacgcccggattcctccctgaccatgggctgatgtccggtgtataagtcaatgattgaaagacgtacatgggccaggccgcacccattttccaaaaacgtcccttgatcatcaggaccccggtgcttctggacctggttcatacggtccaaaatctcttcccactgccctttgttttcctgatacctgttatgaggattacaaaatcctgcaataccacacatatgtgccacctcttcaattatttttatacaggctccgcagtaagacatcactgggagcctgaagttctatccccggataaccggctgatattgtctgccctccagcgctttttccacagtcgggatcaaaaggctggtatcggcgatcatggagttcggttttttaaccggatcgtcctgcccaaatggaacaaaatagatatttttcatgttcatcaaggcaccgatgttcttcatattaattcccagagcatcgttggttgatacagagatcaccaaaggtttatcatttcttaaatgtgcctttgctgccatcaggactggagaatccgtaatgccgttgcaaagcttcgccagcgtattgccagtgcacggaaagaccaccagaacgtcaagaagacttttgggaccaatcggttcagcctgtgcaatggttttcatcggcggaattcctgtgatctcttcggcttttttcagaaaatctccggcttttccaaaccggctgtctatgctctgtgcagcacctgaaaagatcgtctgcacctttgccccttcctccgtaagcttttcaagctggacaaatattttctcatatgtgcagaatgaaccagtcatggcaattcctattttctttccttttacactcatcatacatcccattccgtaatcattgtttctgtcagaatggcagccgcagaacacgccgcatatttaccgggaatcccaaggcacagccttgcgtcgattcccaattcttccgcggcctcaaaatccacaccgccgggagcggacgcgatatccacaatcaggacatcttttttggcaaactccagacattctctgtctaaaaccagagcggggatagtgttgaatatgaaatcagcctgggaaatttcctgtttcagattttccagggagactgcattcatcccaaaagattctgcctgggctctctgcgttggtttccttgcagctacggtcactttggccgaccataggtttaatttttcagccaatacactgccacaacggccaaagcccagtacaagacactggcttccctggatctgcagcggtgagtcgaacaccgcttctgccactgccccctctgccgttgacacggcattttttactgccacggcatccatcttcataaaatcatgcacatcaacacctatatgctggcaatagccgcagaagtcatccgggatacatcccgcaaagatgctctgcccttttgtcagacaacgttttacatcctctataccgaagtcctcacggcacgccatggaaaccagattctcacggtccttggaaaaaggaatcgggccgatcagtgccctggcattcaccacagcttcttccatggaatccgcctgcttctcaccggacacgatcccataagtgatgacagaaaaacctctttcggagagctgttttgccatataagcctgcctgagatctccgccgagaactgcaaaatcatacattttatcgctcctttctgctgccatctaactatagtatatgtatttctcccttggtatgcttcatttttttccacattttacagacaaataggtcatattctgttatattaatacttataactggggtcattgttttcaaagaagggagtttttattatgaagttttttatctgtgaacactgtaaaaatatcatgacattagtccaggacagcggcgtgccagtcatgtgctgcggccagaaaatgacggaacttgttccagggactacggatggcgctgcagaaaagcatgtgcctgccgttacagtggaggaccggaaggtcagtgtaaaagtaggcgaggtggaacatccgatgatggaagcccattacattatgttcatctgtgtcgaaaccagcatgggaaatcatataaagtatttaaagcctggagaaaaaccggaggcagaattcttcctggcagacaatgaggaatttgtagccgcatatgaatactgcaacctgcatggattatggatggcataaccgcataacaaaaggaggcccctctgatgtatcagaaatgcctcctgtttttatgtctcttactatatgtataccctcaaccttttgtttatcctttgtaataagtgctttatccccgactagatgattagaacggccatggccatctcatgcatgtcattgatttatccccctttatactgctttgctttcggtaagaaattcggtaacaatacacactataagaggtcttattcctagtttcaatacaaccgcggggaacgacggaataattgaataaacgttgtatttttttccattaaatagcatctaaaaggataatattcacctgaaatatatgattttcacagtggtaagaaacactgccattatacttctccacgatttctttaatattctggcttccgattccgtgcttctccttatcatgctttgtagtcattaatctgccttcttcaaaaatgactggttttagggtatggttgctttcttctaaaagcagatggtgtcccttcactttaattgttacattgaccgtcttttcctttacatccttgacggcttccgcggcatttttcaaaagatttgaaaacaggatacagatctccgcgttggtcatattcagcttgctgggaatcctgcctttccagtttagatccatcttttcacgctggacgatatcatttaccacaatatccaccacgtcattgccggtagatacaagaatattcagcctctggataccgccgatcaattcgcctaaatattccttcgcctgatcatattctcccttttcaagaaacctgcccagacagcccagctggcttttcatatcatgcctgatctttttcgtcatctcctccttttgaaggagcagttcataatactttttctgttcgttcagcagtctttcattccagagcatctgttgttcaaactgttcctgcttctgccttacactgcagatccttataataatagtactgatcccgatcagcatcagcaaaaatccaagcaggatctcaagcctctttccaaaagacgtccagttctggaatccttcagacaaaaatggtccgatacatgcaatgactccgatgagcaccatcgctcccaaggccacatcactgtacgtatattggatcttattcaccttgaatcttttcctgatcgttataacgatcaggatcatgataaaactaaatatttcttccacatccgcaaaatgattgctggcataggccgtctgaaaatccatttgagcaaagaatatgataaacaaaccaatcagaaagtccatgatggatattccaagccacgtaaagatgggaagaaaaaactttttgaaatagatccagccggatacaataataaaaagaacgatcaccttattgaccgaaaaaccaaatctgtaacacaagacaactcctaagactgccgggatctgaaaaactacggcttcccttttccgcgatggttcaacccctaaaatacctctcatgatcaagatcattttccaaagctcaatcgcataaacatatacccaatataattctctcacttttcaccctcactgtccatttcctggaaatggattagtttatatcacttttgcatatttcgttatgtactcaaaataacggtttttgacttctttttgttttctcttggaaatctgaaattcctttccacagtctaagacaagcttgtccttgttatagtgttcaacaaattggaaattaatgatatatcccttatgaatccgctgaaacctctcatccaaacatccctcaatcttcttcaaagaaagtctcacaatcagatgccctcccacaaggaacaccgcaatttcatcacccaacgcctcaatccaccggatctccctaaaatatacgaatctgctctcttcctttccttccagcatgattccttcattgtcattcatgtcctttagcgcatcttccagagcctccaacaggtcctgtccgctcccgcttttatatagataccggaaggcctgaaccttaaatgctctctgtacccattcatcatggctcgttataaaaatgatcttgccgggcttctgctggcgtttccattcctcagccactgaaaatccatccatatcgggcagttcaacatccagcaaaataatgtcaaactcaccatctgagttaagaagcgctccgcctctttggaaacaggtaatctctgctttttggtttctgctgtccagaaattggagacattcatcttctaaaatatccaagtaagtttgttcatcatcacagattgcaatttttaacgttctctccatctacagtcctttctatatataaagtaaaacttaatcatattttacctctttcctaacccaaatgcaaaaaagaacaggaatgtgcattaaaaaatgcataattcctgttctttttatatattgtcataaaaatattacaattcaaataagatagccataaactatgttcatgaaaaaataggtctcgtccgacaggtttttcagattacattttctaagggttactaggtgacgctgctaaacagcaaaacctgccaggcaactgaccttatttgtatttatctctcaacaaaagtataaatccatgtactggattagtcaacatattttataagaactgtgatatacgtgcaattatggcaataaacgcttcatcattttctattattttactcttcctcccgccgaccttaaacaaacagaacaaaaagggcaagccagcctcatctgaaataaaaaaacaggggttcctgctctggcttcttagcatgtgcttttgcctgcagacccctattttcccaatctgtttattttgttttatatccttccggatgtgtgctgtgccagttccatgcactctcaatgatctcatggagattggcatgttctggattccatccaagaaccttctttgctttctcactggaagcgatcagtactgcaggatctcctgctctccgtccttcttccactgccttgatcggctttccggtcacttcttttgcagtctcgatgacttcttttactgtaaatccaatgccgtttccgagattaaaaatgtcgctctcattgccttgcatcaaatacttcactgccaggatatgtgcctgagccaggtcggtcacatggatatagtccctgacacatgtgccatcctttgttggataatcggttccaaaaatactgatggcatcccttttcccatttggaacctgaaggatcaacgggatcagatgggtctccggattgtgtgcctcaccgatctccccgcttttgtgggctccgcatgcattaaaatatcggagagatacgaaccgaagtccatgtgcctttcccacccatttaaacatcttttccatagagagcttggtctcaccgtaagtgttggtgggctctgtcctgtctgtttccaggattggagttttttccggctccccataagttgcggccgtggatgaaaagacgatcttgtctacaccgtgggccaccatggattccagcatagtttttgtgccgcacagattgttgtcgtagtatttcaacggattcgtcatgctttccccaacgagggagttggccgcaaagtgaatgaccgcatcaatgtcagtctcctgatccagaacgctgtccacaaaagctctgtctcttaaatcaccctgataaaattttgcctttggatgaactgcctctttatatcctgtctccaggttatcgatgatgaccacatcttctcctgcatcgatcaattcataaactgtgtgggacccaatgtatcctgccccgcctaatactaaaatcttcattccttcttccgcctttcttaatgctgatccaacgtacaaatgaatctctcaaactgttccctgccctttttggtacacttataaacacctgcattctcaaggaccttcacaaagacccgcccgatctcctccttcaggatctccatgacattgtcttcgttgatctccttatattttgacacaaactgctctgcccagtcaacatgctttgccaggcactcatgatctttcacaggggttttgtctacaagacagtctgccagaagttccatctcctgcttgagtctggacggcagcaccgcaaggcccatgacttcgatcagcccgatgttctctttttttatatgatggtattcttcatgaggatgaaacagtcccagtggatgtttctctgtggtgatattgttcctcagagtcaggtccagttcataggtatcccctgtttttcttgcaataggggtgatggtattatgcgcttccccctctgtctttgcgtaaatgtgggcggcttcgtccgtatatgccctccagacatgcaaaatatgatccgccagatcgataagacgctcctgatccttagaacggatccgcagcacagacagcggccacttcaggatcccagtttccacatcctcaaatccccggattgtgtaatgtttttctatcttagcctttgccatggcaaactggtaatgccctccctgaaaatggtcatgggacaatatggaacctcccacaatgggaagatccgcattggagccaaggaaataatgagggaactgccgtacaaaatcaaacagctttacaaatacagtccggtcaatcttcatgggtatatgctccccgttaaatacgatacagtgctcattatagtatacatacggagagtactggaatccccatctgctgccgttgaccgtgatcggaataatcctgtggttttggcgggcaggatggttcatacgtcctgcatatccttcattttccatacaaagctgacattttggatacctgccctggactgcatttttagctgccgcgatggcctttggatctttttccggctttgacagattgatggtgatatcaatggttccatatgggctctccacagtccatttccagtcctttttcaccctgtatctgcggatatagtctgtatcctggctgaactgatagaaaaaatcagtggcttccacgggactttttttatacttttccctgaagttccggatcacctggcttggtttcgggaccagaacccccatcagtttggtgtcaaacaagtctctggtcacaatatcattgcttttgatgatataccggtcataggcagcatctgtcaactcatggagcactttctccagatccacctctccataaggttcctccggctcctcatagccatccagatgaaagatctccagaaactgattgatggtataggtccggtcctcaggctcgatcagctttttttctaatccatactgtaccagttttgcaatattatcatttatcatcttcatgcacctcaaacttataagcggtaaacactgcatatctatcttcttttctaaggatcatatccggatgctcctccagattaatggaatttggaagaaattctgtttccagacaaaccccgtccctgttttcattggcttttcctttctttccgggaaatcccccttccagaaaattggatgtatagagttgtacggcagggagatttgtagaaactgtcactttccgtcccgtgccttcatgaaacagcgtaatctgatccctctggctgctgaacagatacggatgatcatatccccctgcaaacttcagctgttgatggtcttccttgatacgtcccccaattttatgaaactttctgaaatcaaatggagtaccgtctacattcatcctctctccggtcgtacagccgtctttatcaatacaggcaatcttggacgcttttattttcagcatgtgatcatatattttttcttttccgccagacaggttaaaataggtatggttggccaggttgacaatggtatccttatctgtggttccatagagtaccatagtcagcgtatttccaaccaattcatatgaaacatggaccctcaggctgcctggatacccctcctccatatctctggacagatagttgaagatcaccctgttttcttttatttcatagtcccagatttttttgtcaaatccttctcttcctccatggagatggttgggtccgttgttgactgccagatgatattcctgtccgtttaggatgaactttccgtccttgatccggtttcccacccgtcccaggattcctccgatatacttctcatcttttttgtaatcgtctatattctcaagtcccagcaccacatcatccacatttccgtctttatctttcatcaggaccgacagaatatggcatcctaaattggtgacgctcactgtcaaatcctttcccttcatctcaatgatatcaataccatctgttctttgttcggttaccttgatctctgtcattgtcctgtctccttacaaaactttcattccgccgtattttcggacttttaagatatggcatgctccttctccgaatacgctgtccatagttttctgatagagcgggacaatctcatttggcacaaacgcctggattgttcccgcaaatccgcctccgtggacacggctcacccctttgtctcccagtatgacatcgcttacggccagtccgatggacacactctgatgattgacttcgtggctggaatacacattttggagatacttaaatgaggaatctcctgaatccttcaccagttttttaaacaggtcaaaccgtctcttctccagggcctcgacttcctgtccgacccttttgttttcctcaaaaaggtgcatagcacgcagtaccgcacggtctccgaggatttcacggatggcggggatgttcagataaaaatctgtcttgtctacttttcttaacacatcttcctcaaaatagcgggccacctgtttcatctcagacggtatcatggcgtaatcctctgtcagatccacatgggagccttttgtgtccacaatgcaaagactgtggccgaaggattcaaagtccacttttacctgttttacttccggtttctctggattttcaaaatcgatataaatcatcccgcccacagaggacgccatctggtccatcagcccgcacggttttccaaaatactcattttctgcatattgtcctgcctgggctaagaacaccggatctatgtccatctggttgtacagccctgaaagaatcgtgccgatcaaggtctcataagctgcggaggaagacagccctgcaccgatcagaacatcgcttgtgatataggcccggaaacccccgatcctatagcctttctgcctcagtctgtcggcaacaccacgaatcagtgccatggacgtctctttttcttcctctctggcaagcaggtcatccaaatccacttccatcaggtcatatccgtcggaaacaaccgtgatccttccgtcttctgtcttagaggccactgcgatggcatccaggttaatggaagtagccagtaccttcccatactgatggtctgtatgattccctcctacttcactccggccgggcgctgaataaatctccacattctccgtcccgaacctgtcttcatattcctttagcgcttttatgtacctttttgtctgactgtccagcagttcctcatccacgtagatgtctctcagcagatccctgtaaatccctttttcaaattcctctatcaatacacttgtctctttcatctatatcactctggcagggcatcatgcttctgccttaaatctcctttcctgtattgtctcaatcacatgtttcataaagctgtcgttgagcttatatgcttttttataaactacataggccaccagcatggaaaccgcaggcactgcacacatcagaacacggatagaattcatcgtcagaaggctctgatccgggctgtttgggatataaccggtctgctggagtgcaaatccgataaaaagagaggtcagcgctgccgtaaactttacgatcaatgtctgcaaagagaagacaactgactcatttcttgttcccagcttatactccccgtaatcaaccacatcggataagaacacggtggcacatccaagctccagtcctgttcccgtctttacaataattcctgcaatggcagtcagcacgatattctgtgggcacacaaatcctacagccaagagcagcgccaatcccacaaacggaagaatacaggccagtagaaaggatacctttctggaaagcctggcagccactttcggaaagatgataagtcccaccacttctgcgatagaggcgctgatcataaacgcggacagcattcctgcatttccacacacatatgtaaaatagtaaactgccacccccataataaactggatgcctacgttatacagcaggatcagacctactgctgactgcagctggtcattctgcttgatgatggaaaatacgccccgaaaagatattttttcggacggcacatttccgccgtcctttactttcaggttaaacacggcaacaccaatggtaaaaataaacattccggcgataaacatcgcaaacctgtgatatccgatgtaacctcctcccagcgccccgatgatctgcactccgaatcctgcaatgatcagtgactggccaaggctggcaaagatacgcggaagtacggataccacttcccgctctcttggatccgaggtcagatttgggatgatggaccaatacggaatatccatgatcgtataggtcatgccccacgccacatagatcacagccacaaatacacagagtgcgttacctgacaaatgaaaatccgtaaataatacaacgaacacgacagagttgatcagagttccgacgaccagccagggaacaaatttcccccaccttgtcctagtgttgtccaccagcatgcccatgaataagtcgttgaatgcgtcccacaattttgctacaaaaaatacaataccgatgaaggccggtgatacctttaaaatatctgtgaaataaatcattgagaatgttgcgatcattccgtagattaaatccttgccaagtgctccgaaggcaaacgtatatttcaccctgcccggtaccttttcactgctttttcttgtttccatacataaagcctcctgttttcatatcttaatatcgttcctatgacatttaccacatgatttccgttcggctcttagaatgcctcactccaatcatgtggtaccccccgaagggagtgagatacggttttccctttgggtatggctttatggtaacaccgtttagtaaataattcaatattagtt

(The sequence listing continues in the following parts.)

We claim:

1. A composition comprising:
a bacterial strain of the genus Anaerostipes that comprises a 16s rRNA gene sequence with at least about 98% sequence identity to the polynucleotide sequence of SEQ ID NO: 1; and
an excipient, diluent, and/or carrier;
wherein the bacterial strain is lyophilized, freeze dried, or spray dried.

2. The composition of claim 1, wherein the bacterial strain is capable of increasing production of IL-10 by a human macrophage, monocyte, peripheral blood mononuclear cell or monocyte-derived dendritic cell in vitro.

3-5. (canceled)

6. The composition of claim 1, wherein the bacterial strain comprises a nucleotide sequence having at least about 70% identity to any one of SEQ ID NOs: 2-52.

7. The composition of claim 1, wherein the bacterial strain comprises a genome having at least 95% average nucleotide identity (ANI) with the genome of Anaerostipes sp. strain P127-B2a, deposited under accession number DSM 33275.

8. (canceled)

9. The composition of claim 1, wherein the bacterial strain is Anaerostipes sp. P127-B2a, deposited under accession number DSM 33275.

10. The composition of claim 1, wherein the composition is formulated as an enteric formulation.

11. The composition of claim 10, wherein the enteric formulation is formulated as a capsule, tablet, caplet, pill, troche, lozenge, powder, or granule.

12. The composition of claim 1, wherein the composition is formulated as a suppository, suspension, emulsion, or gel.

13. The composition of claim 1, wherein the composition comprises at least 1×10³ CFU of the bacterial strain.

14. The composition of claim 1, wherein the composition comprises a therapeutically effective amount of the bacterial strain sufficient to prevent or treat a disorder is administered to a subject in need thereof.

15-17. (canceled)

18. The composition of claim 1, wherein the excipient is selected from the group consisting of cellulose, polyvinyl pyrrolidone, silicon dioxide, stearyl fumarate or a pharmaceutically acceptable salt thereof, and any combination(s) thereof

19. The composition of claim 1, wherein the composition further comprises a cryoprotectant.

20. The composition of claim 19, wherein the cryoprotectant is selected from the group consisting of a fructooligosaccharide, trehalose, and a combination thereof

21. (canceled)

22. The composition of claim 1, wherein the composition is suitable for bolus administration or bolus release.

23-26. (canceled)

27. The composition of claim 1, wherein upon storage for 6 months at 4° C., the composition loses at most 3 log colony forming units (cfus) of the bacterial strain.

28. A food product comprising the composition of a claim 1.

29. A method of treating a dysbiosis, gastrointestinal disorder, inflammatory disorder, or skin disorder in a subject in need thereof, the method comprising administering a therapeutically effective amount of the composition of claim 1 to the subject.

30. A method of modifying a gut microbiome in a subject, the method comprising administering a therapeutically effective amount of the composition of claim 1 to the subject.

31-35. (canceled)

36. A method of treating non-alcoholic fatty liver disease (NAFLD), non-alcoholic steatohepatitis (NASH), metabolic syndrome, insulin deficiency, insulin resistance-related disorders, insulin sensitivity, glucose intolerance, pre-diabetes, diabetes, high body mass index (BMI), excess adiposity, obesity, excess weight, cardiovascular disease, atherosclerosis, hyperlipidemia, hyperglycemia, abnormal lipid metabolism, or hypertension in a subject in need thereof, the method comprising administering a therapeutically effective amount of the composition of claim 1 to the subject.

37. The method of claim 29, further comprising administering a prebiotic to the subject.

38. (canceled)
